(19) United States
(12) Patent Application Publication
(10) Pub. No.: US 2007/0237770 A1
(43) Pub. Date: Oct. 11, 2007

(54) Novel compositions and methods in cancer

(76) Inventors: Albert Lai, Davis, CA (US); Abdallah Fanidi, Emeryville, CA (US); Robert N. Booher, Emeryville, CA (US); Guoying Yu, Emeryville, CA (US); Edward Moler, Emeryville, CA (US); Michael Rowe, Emeryville, CA (US)

Correspondence Address: SAGRES DISCOVERY INC.;INTELLECTUAL PROPERTY - R440, P.O. BOX 8097, EMERYVILLE, CA, 94662-8097, US

(21) Appl. No.: 11/403,116

(22) Filed: Apr. 12, 2006

Related U.S. Application Data
(63) Continuation-in-part of application No. 10/322,696, filed on Dec. 17, 2002, now abandoned.
(63) Continuation-in-part of application No. 10/388,838, filed on Mar. 14, 2003, now abandoned.
(63) Continuation-in-part of application No. 10/737,318, filed on Dec. 15, 2003, now abandoned.
(63) Continuation-in-part of application No. 09/997,722, filed on Nov. 30, 2001, now abandoned.
(63) Continuation-in-part of application No. 10/034,650, filed on Dec. 20, 2001, now abandoned.
(63) Continuation-in-part of application No. 10/331,053, filed on Dec. 26, 2002, now abandoned.
(63) Continuation-in-part of application No. 10/330,773, filed on Dec. 27, 2002, now abandoned.

(51) Int. Cl. A61K 39/395; A61K 31/00; A61K 31/7105; A61P 43/00; C12Q 1/68; A61K 31/711; A61K 38/02

(52) U.S. Cl. 424/138.1; 435/6; 514/1; 514/2; 514/44

(57) ABSTRACT

This invention is in the field of cancer-associated (CA) genes. Specifically it relates to methods for detecting and diagnosing cancer or the likelihood of developing cancer based on the presence or absence of expression of certain genes or proteins encoded by those genes. The invention also provides methods and molecules for upregulating or downregulating these cancer-associated genes.

### CROSS REFERENCE TO RELATED APPLICATIONS

[0001] The present application is a continuation-in-part of U.S. Ser. No. 10/322,696, filed Dec. 17, 2002; U.S. Ser. No. 10/388,838, filed Mar. 14, 2003; U.S. Ser. No.10/737,318, filed Dec. 15, 2003; 09/997,722, filed Nov. 30, 2001; U.S. Ser. No.10/034,650, filed Dec. 20, 2001; U.S. Ser. No. 10/331,053, filed Dec. 26, 2002; and U.S. Ser. No. 10/330,773, filed Dec. 27, 2002; each of which is hereby incorporated by reference in its entirety.

### SEQUENCE LISTING

[0002] This application incorporates by reference the sequence listing saved as an ASCII text file and identified as “20366-080001.txt”, containing 56,716 KB of data, and created on Apr. 12, 2006, filed in computer-readable format (CRF) and encoded on the CD-ROM, mailed with the present application on Apr. 12, 2006.

### FIELD OF THE INVENTION

[0003] This invention is in the field of cancer-associated genes. Specifically it relates to methods for detecting cancer or the likelihood of developing cancer based on the presence of differential expression of certain genes or their gene products. The invention also provides methods and molecules for detecting, diagnosing and treating cancer by modulating these cancer-associated genes.

### BACKGROUND OF THE INVENTION

[0004] Oncogenes are genes that can cause cancer. Carcinogenesis can occur by a wide variety of mechanisms, including infection of cells by viruses containing oncogenes, activation of protooncogenes (normal genes that have the potential to become an oncogene) in the host genome, and mutations of protooncogenes and tumour suppressor genes. Carcinogenesis is fundamentally driven by somatic cell evolution (i.e. mutation and natural selection of variants with progressive loss of growth control). The genes that serve as targets for these somatic mutations are classified as either protooncogenes or tumour suppressor genes, depending on whether their mutant phenotypes are dominant or recessive, respectively.

[0005] There are a number of viruses known to be involved in human as well as animal cancer. Of particular interest here are viruses that do not contain oncogenes themselves; these are slow-transforming retroviruses. Such viruses induce tumours by integrating into the host genome and affecting neighboring protooncogenes in a variety of ways. Provirus insertion mutation is a normal consequence of the retroviral life cycle. In infected cells, a DNA copy of the retrovirus genome (called a provirus) is integrated into the host genome. A newly integrated provirus can affect gene expression in cis at or near the integration site by one of two mechanisms. Type I insertion mutations up-regulate transcription of proximal genes as a consequence of regulatory sequences (enhancers and/or promoters) within the proviral long terminal repeats (LTRs). Type II insertion mutations located within the intron or exon of a gene can up-regulate transcription of said gene as a consequence of regulatory sequences (enhancers and/or promoters) within the proviral long terminal repeats (LTRs). Additionally, type II insertion mutations can cause truncation of coding regions due to either integration directly within an open reading frame or integration within an intron flanked on both sides by coding sequences, which could lead to a truncated or an unstable transcript/protein product. The analysis of sequences at or near the insertion sites has led to the identification of a number of new protooncogenes.

[0006] With respect to lymphoma and leukemia, retroviruses such as AKV murine leukemia virus (MLV) or SL3-3 MLV, are potent inducers of tumours when inoculated into susceptible newborn mice, or when carried in the germline. A number of sequences have been identified as relevant in the induction of lymphoma and leukemia by analyzing the insertion sites; see Sorensen et al., J. Virology 74:2161 (2000); Hansen et al., Genome Res. 10(2):237-43 (2000); Sorensen et al., J. Virology 70:4063 (1996); Sorensen et al., J. Virology 67:7118 (1993); Joosten et al., Virology 268:308 (2000); and Li et al., Nature Genetics 23:348 (1999); all of which are expressly incorporated by reference herein. With respect to cancers, especially breast cancer, prostate cancer and cancers with epithelial origin, the mammalian retrovirus, mouse mammary tumour virus (MMTV) is a potent inducer of tumours when inoculated into susceptible newborn mice, or when carried in the germ line. Mammary Tumours in the Mouse, edited by J. Hilgers and M. Sluyser; Elsevier/North-Holland Biomedical Press; New York, N.Y.

[0007] The pattern of gene expression in a particular living cell is characteristic of its current state. Nearly all differences in the state or type of a cell are reflected in the differences in RNA levels of one or more genes. Comparing expression patterns of uncharacterized genes may provide clues to their function. High throughput analysis of expression of hundreds or thousands of genes can help in (a) identification of complex genetic diseases, (b) analysis of differential gene expression over time, between tissues and disease states, and (c) drug discovery and toxicology studies. Increase or decrease in the levels of expression of certain genes correlate with cancer biology. For example, oncogenes are positive regulators of tumourigenesis, while tumour suppressor genes are negative regulators of tumourigenesis. (Marshall, Cell, 64: 313-326 (1991); Weinberg, Science, 254: 1138-1146 (1991)).

[0008] Immunotherapy, or the use of antibodies for therapeutic purposes has been used in recent years to treat cancer. Passive immunotherapy involves the use of monoclonal antibodies in cancer treatments. See for example, Cancer: Principles and Practice of Oncology, 6th Edition (2001) Chapt. 20 pp.495-508. Inherent therapeutic biological activity of these antibodies include direct inhibition of tumour cell growth or survival, and the ability to recruit the natural cell killing activity of the body's immune system. These agents are administered alone or in conjunction with radiation or chemotherapeutic agents. Rituxan® and Herceptin®, approved for treatment of lymphoma and breast cancer, respectively, are two examples of such therapeutics. Alternatively, antibodies are used to make antibody conjugates where the antibody is linked to a toxic agent and directs that agent to the tumour by specifically binding to the tumour. Mylotarg® is an example of an approved antibody conjugate used for the treatment of leukemia. However, these antibodies target the tumour itself rather than the cause.

[0009] An additional approach for anti-cancer therapy is to target the protooncogenes that can cause cancer. Genes identified as causing cancer can be monitored to detect the onset of cancer and can then be targeted to treat cancer.

### SUMMARY OF THE INVENTION

[0010] In some aspects, the present invention provides methods for treating cancer in a patient comprising modulating the level of an expression product of a cancer-associated gene selected from the group consisting of ABCB9, AD026, ADSSL1, ANP32A, ANXA3, ARF3, ARHGEF1, ARID1B, ARMC1, ARPC2, ATP2B4, ATP8B4, BCL11B, BCL2L1, BLK, BLM, BLR1, BRAF, BRPF3, BTNL2, C10orf45, C13orf18, C13orf24, C14orf 4, C1orf41, C1orf9, C20orf174, C2orf11, C6orf190, C6orf32, C9orf5, CACNA1D, CACNA1E, CALM2, CCND2, CCRN4L, CD28, CD38, CD3Z, CFTR, CHD7, CHDH, CHIC2, CLEC2D, CLIC1, CNR2, CNTN2, COL19A1, CPNE4, CR1, CREG1, CTSL, CXCR4, CYB5, DAD1, DDR2, DKFZP564J047, DKKL1, DLST, DMBT1, DNAJC6, DNMT3A, DPT, DYM, EGR2, EIF4G3, ENAH, ETV1, F2RL2, F5, FAS, FBN2, FCGR2B, FGF10, FGFR3, FLJ10996, FLJ11155, FLJ14075, FLJ20604, FLJ22800, FLJ23235, FLJ40873, FLJ46156, FNBP1, FOXD3, FZD10, GALNAC4S-6ST, GFI1, GGTA1, GSCL, GSH-2, HAAO, HIVEP3, HMGA1, ICOS, IGF1R, IGF2, IL12A, IL7R, IRF2, ITK, ITPR1, JAK1, JARID2, JDP2, KCNH5, KIAA0261, KIAA0350, KIAA0427, KIAA1040, LCK, LFNG, LMO2, LMO7, LOC145814, LOC340075, LOC401548, LOC64744, LPP, LRFN3, LTB, MAP2K5, MAP3K8, MARLIN1, MATN2, MBNL1, MCM3AP, MCM5, MCOLN3, MED12L, MGC45474, MHC2TA, MR1, MSCP, NCF4, NEDD4L, NEDD9, NEU1, NFKBIZ, NR3C1, NTRK3, OASL, PAP, PDCD1LG2, PDGFRA, PIGM, PPP3CC, PRDM11, PRIM2A, PRKCH, PSMB1, PSMB9, PTP4A2, PTPRK, RAC2, RAI17, RAMP, RGC32, RNASE1, RNPC1, RORC, RREB1, RUNX3, SEC5L1, SELL, SEPT9, SH3MD1, SIAT7C, SLC12A7, SLCIA2, SLC28A2, SLC39A10, SLC41A1, SLCO3A1, SLPI, SOS1, SOX11, SPATA13, SPATA3, SRC, TFEB, THADA, THRB, THSD2, TLE3, TMEFF2, TNFRSF8, TNFSF11, TNFSF8, TNN, TP53I11, TTC15, UBASH3A, USP25, UTS2, VIL2, WDFY1, WNT10B, WNT6, WRNIP1, ZNF31, ZNF608, and ZSCAN2. In some embodiments the cancer is carcinoma, melanoma, breast cancer, lymphoma, leukemia, colon cancer, kidney cancer, liver cancer, lung cancer, ovary cancer, pancreatic cancer, prostate cancer, uterine cancer, cervical cancer, bladder cancer, stomach cancer or skin cancer. In some embodiments the cancer is carcinoma, breast cancer, lymphoma or leukemia.

[0011] In some aspects, the present invention provides methods of treating a cancer in a patient characterized by overexpression of the gene relative to a control. In some embodiments the method comprises modulating gene expression in the patient.

[0012] In some aspects, the present invention provides methods for diagnosing cancer comprising detecting evidence of differential expression in a patient sample of a cancer-associated gene selected from the group consisting of ABCB9, AD026, ADSSL1, ANP32A, ANXA3, ARF3, ARHGEF1, ARID1B, ARMC1, ARPC2, ATP2B4, ATP8B4, BCL11B, BCL2L1, BLK, BLM, BLR1, BRAF, BRPF3, BTNL2, C10orf45, C13orf18, C13orf24, C14orf4, C1orf41, C1orf9, C20Orf174, C2orf11, C6orf190, C6orf32, C9orf5, CACNA1D, CACNA1E, CALM2, CCND2, CCRN4L, CD28, CD38, CD3Z, CFTR, CHD7, CHDH, CHIC2, CLEC2D, CLIC1, CNR2, CNTN2, COL19A1, CPNE4, CR1, CREG1, CTSL, CXCR4, CYB5, DAD1, DDR2, DKFZP564J047, DKKL1, DLST, DMBT1, DNAJC6, DNMT3A, DPT, DYM, EGR2, EIF4G3, ENAH, ETV1, F2RL2, F5, FAS, FBN2, FCGR2B, FGF10, FGFR3, FLJ10996, FLJ11155, FLJ14075, FLJ20604, FLJ22800, FLJ23235, FLJ40873, FLJ46156, FNBP1, FOXD3, FZD10, GALNAC4S-6ST, GFI1, GGTA1, GSCL, GSH-2, HAAO, HIVEP3, HMGA1, ICOS, IGF1R, IGF2, IL12A, IL7R, IRF2, ITK, ITPR1, JAK1, JARID2, JDP2, KCNH5, KIAA0261, KIAA0350, KIAA0427, KIAA1040, LCK, LFNG, LMO2, LMO7, LOC145814, LOC340075, LOC401548, LOC64744, LPP, LRFN3, LTB, MAP2K5, MAP3K8, MARLIN1, MATN2, MBNL1, MCM3AP, MCM5, MCOLN3, MED12L, MGC45474, MHC2TA, MR1, MSCP, NCF4, NEDD4L, NEDD9, NEU1, NFKBIZ, NR3C1, NTRK3, OASL, PAP, PDCD1LG2, PDGFRA, PIGM, PPP3CC, PRDM11, PRIM2A, PRKCH, PSMB1, PSMB9, PTP4A2, PTPRK, RAC2, RA117, RAMP, RGC32, RNASE1, RNPC1, RORC, RREB1, RUNX3, SEC5L1, SELL, SEPT9, SH3MD1, SIAT7C, SLC12A7, SLC1A2, SLC28A2, SLC39A10, SLC41A1, SLCO3A1, SLPI, SOS1, SOX11, SPATA13, SPATA3, SRC, TFEB, THADA, THRB, THSD2, TLE3, TMEFF2, TNFRSF8, TNFSF11, TNFSF8, TNN, TP53I11, TTC15, UBASH3A, USP25, UTS2, VIL2, WDFY1, WNT10B, WNT6, WRNIP1, ZNF31, ZNF608, and ZSCAN2. In some embodiments evidence of differential expression of the gene is diagnostic of cancer.

[0013] In some aspects, the present invention provides methods for detecting a cancerous cell in a patient sample comprising detecting evidence of an expression product of a cancer-associated gene selected from the group consisting of ABCB9, AD026, ADSSL1, ANP32A, ANXA3, ARF3, ARHGEF1, ARID1B, ARMC1, ARPC2, ATP2B4, ATP8B4, BCL11B, BCL2L1, BLK, BLM, BLR1, BRAF, BRPF3, BTNL2, C10orf45, C13orf18, C13orf24, C14orf4, C1orf41, C1orf9, C20Orf174, C2orf11, C6orf190, C6orf2, C9orf5, CACNA1D, CACNA1E, CALM2, CCND2, CCRN4L, CD28, CD38, CD3Z, CFTR, CHD7, CHDH, CHIC2, CLEC2D, CLIC1, CNR2, CNTN2, COL19A1, CPNE4, CR1, CREG1, CTSL, CXCR4, CYB5, DAD1, DDR2, DKFZP564J047, DKKL1, DLST, DMBT1, DNAJC6, DNMT3A, DPT, DYM, EGR2, EIF4G3, ENAH, ETV1, F2RL2, F5, FAS, FBN2, FCGR2B, FGF10, FGFR3, FLJ10996, FLJ11155, FLJ14075, FLJ20604, FLJ22800, FLJ23235, FLJ40873, FLJ46156, FNBP1, FOXD3, FZD10, GALNAC4S-6ST, GFI1, GGTA1, GSCL, GSH-2, HAAO, HIVEP3, HMGA1, ICOS, IGF1R, IGF2, IL12A, IL7R, IRF2, ITK, ITPR1, JAK1, JARID2, JDP2, KCNH5, KIAA0261, KIAA0350, KIAA0427, KIAA1040, LCK, LFNG, LMO2, LMO7, LOC145814, LOC340075, LOC401548, LOC64744, LPP, LRFN3, LTB, MAP2K5, MAP3K8, MARLIN1, MATN2, MBNL1, MCM3AP, MCM5, MCOLN3, MED12L, MGC45474, MHC2TA, MR1, MSCP, NCF4, NEDD4L, NEDD9, NEU1, NFKBIZ, NR3C1, NTRK3, OASL, PAP, PDCD1LG2, PDGFRA, PIGM, PPP3CC, PRDM11, PRIM2A, PRKCH, PSMB1, PSMB9, PTP4A2, PTPRK, RAC2, RA117, RAMP, RGC32, RNASE1, RNPC1, RORC, RREB1, RUNX3, SEC5L1, SELL, SEPT9, SH3MD1, SIAT7C, SLC12A7, SLC1A2, SLC28A2, SLC39A10, SLC41A1, SLCO3A1, SLPI, SOS1, SOX11, SPATA13, SPATA3, SRC, TFEB, THADA, THRB, THSD2, TLE3, TMEFF2, TNFRSF8, TNFSF11, TNFSF8, TNN, TP53I11, TTC15, UBASH3A, USP25, UTS2, VIL2, WDFY1, WNT10B, WNT6, WRNIP1, ZNF31, ZNF608, and ZSCAN2. In some embodiments evidence of expression of the gene in the sample indicates that a cell in the sample is cancerous.

[0014] In some aspects, the present invention provides methods for assessing the progression of cancer in a patient comprising comparing the level of an expression product of a cancer-associated gene selected from the group consisting of ABCB9, AD026, ADSSL1, ANP32A, ANXA3, ARF3, ARHGEF1, ARID1B, ARMC1, ARPC2, ATP2B4, ATP8B4, BCL11B, BCL2L1, BLK, BLM, BLR1, BRAF, BRPF3, BTNL2, C10orf45, C13orf18, C13orf24, C14orf4, C1orf41, C1orf9, C20orf174, C2orf11, C6orf190, C6orf32, C9orf5, CACNA1D, CACNA1E, CALM2, CCND2, CCRN4L, CD28, CD38, CD3Z, CFTR, CHD7, CHDH, CHIC2, CLEC2D, CLIC1, CNR2, CNTN2, COL19A1, CPNE4, CR1, CREG1, CTSL, CXCR4, CYB5, DAD1, DDR2, DKFZP564J047, DKKL1, DLST, DMBT1, DNAJC6, DNMT3A, DPT, DYM, EGR2, EIF4G3, ENAH, ETV1, F2RL2, F5, FAS, FBN2, FCGR2B, FGF10, FGFR3, FLJ10996, FLJ11155, FLJ14075, FLJ20604, FLJ22800, FLJ23235, FLJ40873, FLJ46156, FNBP1, FOXD3, FZD10, GALNAC4S-6ST, GFI1, GGTA1, GSCL, GSH-2, HAAO, HIVEP3, HMGA1, ICOS, IGF1R, IGF2, IL12A, IL7R, IRF2, ITK, ITPR1, JAK1, JARID2, JDP2, KCNH5, KIAA0261, KIAA0350, KIAA0427, KIAA1040, LCK, LFNG, LMO2, LMO7, LOC145814, LOC340075, LOC401548, LOC64744, LPP, LRFN3, LTB, MAP2K5, MAP3K8, MARLIN1, MATN2, MBNL1, MCM3AP, MCM5, MCOLN3, MED12L, MGC45474, MHC2TA, MR1, MSCP, NCF4, NEDD4L, NEDD9, NEU1, NFKBIZ, NR3C1, NTRK3, OASL, PAP, PDCD1LG2, PDGFRA, PIGM, PPP3CC, PRDM11, PRIM2A, PRKCH, PSMB1, PSMB9, PTP4A2, PTPRK, RAC2, RAI17, RAMP, RGC32, RNASE1, RNPC1, RORC, RREB1, RUNX3, SEC5L1, SELL, SEPT9, SH3MD1, SIAT7C, SLC12A7, SLC1A2, SLC28A2, SLC39A10, SLC41A1, SLCO3A1, SLPI, SOS1, SOX11, SPATA13, SPATA3, SRC, TFEB, THADA, THRB, THSD2, TLE3, TMEFF2, TNFRSF8, TNFSF11, TNFSF8, TNN, TP53I11, TTC15, UBASH3A, USP25, UTS2, VIL2, WDFY1, WNT10B, WNT6, WRNIP1, ZNF31, ZNF608, and ZSCAN2 in a biological sample at a first time point to a level of the same expression product at a second time point. In some embodiments a change in the level of the expression product at the second time point relative to the first time point is indicative of the progression of the cancer.

[0015] In some aspects, the present invention provides methods of diagnosing cancer comprising:
[0016] (a) measuring a level of mRNA of a cancer-associated gene selected from the group consisting of ABCB9, AD026, ADSSL1, ANP32A, ANXA3, ARF3, ARHGEF1, ARID1B, ARMC1, ARPC2, ATP2B4, ATP8B4, BCL11B, BCL2L1, BLK, BLM, BLR1, BRAF, BRPF3, BTNL2, C10orf45, C13orf18, C13orf24, C14orf4, C1orf41, C1orf9, C20Orf174, C2orf11, C6orf190, C6orf32, C9orf5, CACNA1D, CACNA1E, CALM2, CCND2, CCRN4L, CD28, CD38, CD3Z, CFTR, CHD7, CHDH, CHIC2, CLEC2D, CLIC1, CNR2, CNTN2, COL19A1, CPNE4, CR1, CREG1, CTSL, CXCR4, CYB5, DAD1, DDR2, DKFZP564J047, DKKL1, DLST, DMBT1, DNAJC6, DNMT3A, DPT, DYM, EGR2, EIF4G3, ENAH, ETV1, F2RL2, F5, FAS, FBN2, FCGR2B, FGF10, FGFR3, FLJ10996, FLJ11155, FLJ14075, FLJ20604, FLJ22800, FLJ23235, FLJ40873, FLJ46156, FNBP1, FOXD3, FZD10, GALNAC4S-6ST, GFI1, GGTA1, GSCL, GSH-2, HAAO, HIVEP3, HMGA1, ICOS, IGF1R, IGF2, IL12A, IL7R, IRF2, ITK, ITPR1, JAK1, JARID2, JDP2, KCNH5, KIAA0261, KIAA0350, KIAA0427, KIAA1040, LCK, LFNG, LMO2, LMO7, LOC145814, LOC340075, LOC401548, LOC64744, LPP, LRFN3, LTB, MAP2K5, MAP3K8, MARLIN1, MATN2, MBNL1, MCM3AP, MCM5, MCOLN3, MED12L, MGC45474, MHC2TA, MR1, MSCP, NCF4, NEDD4L, NEDD9, NEU1, NFKBIZ, NR3C1, NTRK3, OASL, PAP, PDCD1LG2, PDGFRA, PIGM, PPP3CC, PRDM11, PRIM2A, PRKCH, PSMB1, PSMB9, PTP4A2, PTPRK, RAC2, RA117, RAMP, RGC32, RNASE1, RNPC1, RORC, RREB1, RUNX3, SEC5L1, SELL, SEPT9, SH3MD1, SIAT7C, SLC12A7, SLC1A2, SLC28A2, SLC39A10, SLC41A1, SLCO3A1, SLPI, SOS1, SOX11, SPATA13, SPATA3, SRC, TFEB, THADA, THRB, THSD2, TLE3, TMEFF2, TNFRSF8, TNFSF11, TNFSF8, TNN, TP53I11, TTC15, UBASH3A, USP25, UTS2, VIL2, WDFY1, WNT10B, WNT6, WRNIP1, ZNF31, ZNF608, and ZSCAN2, in a first sample, said first sample comprising a first tissue type of a first individual; and
[0017] (b) comparing the level of mRNA in (a) to:
   [0018] (1) a level of the mRNA in a second sample, said second sample comprising a normal tissue type of said first individual, or
   [0019] (2) a level of the mRNA in a third sample, said third sample comprising a normal tissue type from an unaffected individual. In some embodiments at least a two fold difference between the level of mRNA in (a) and the level of the mRNA in the second sample or the third sample indicates that the first individual has or is predisposed to cancer.

[0020] In some aspects, the present invention provides of screening for anti-cancer activity comprising:
[0021] (a) contacting a cell that expresses a cancer-associated gene selected from the group consisting of ABCB9, AD026, ADSSL1, ANP32A, ANXA3, ARF3, ARHGEF1, ARID1B, ARMC1, ARPC2, ATP2B4, ATP8B4, BCL11B, BCL2L1, BLK, BLM, BLR1, BRAF, BRPF3, BTNL2, C10orf45, C13orf18, C13orf24, C14orf4, C1orf41, C1orf9, C20orf174, C2orf11, C6orf190, C6orf32, C9orf5, CACNA1D, CACNA1E, CALM2, CCND2, CCRN4L, CD28, CD38, CD3Z, CFTR, CHD7, CHDH, CHIC2, CLEC2D, CLIC1, CNR2, CNTN2, COL19A1, CPNE4, CR1, CREG1, CTSL, CXCR4, CYB5, DAD1, DDR2, DKFZP564J047, DKKL1, DLST, DMBT1, DNAJC6, DNMT3A, DPT, DYM, EGR2, EIF4G3, ENAH, ETV1, F2RL2, F5, FAS, FBN2, FCGR2B, FGF10, FGFR3, FLJ10996, FLJ11155, FLJ14075, FLJ20604, FLJ22800, FLJ23235, FLJ40873, FLJ46156, FNBP1, FOXD3, FZD10, GALNAC4S-6ST, GFI1, GGTA1, GSCL, GSH-2, HAAO, HIVEP3, HMGA1, ICOS, IGF1R, IGF2, IL12A, IL7R, IRF2, ITK, ITPR1, JAK1, JARID2, JDP2, KCNH5, KIAA0261, KIAA0350, KIAA0427, KIAA1040, LCK, LFNG, LMO2, LMO7, LOC145814, LOC340075, LOC401548, LOC64744, LPP, LRFN3, LTB, MAP2K5, MAP3K8, MARLIN1, MATN2, MBNL1, MCM3AP, MCM5, MCOLN3, MED12L, MGC45474, MHC2TA, MR1, MSCP, NCF4, NEDD4L, NEDD9, NEU1, NFKBIZ, NR3C1, NTRK3, OASL, PAP, PDCD1LG2, PDGFRA, PIGM, PPP3CC, PRDM11, PRIM2A, PRKCH, PSMB1, PSMB9, PTP4A2, PTPRK, RAC2, RAI17, RAMP, RGC32, RNASE1, RNPC1, RORC, RREB1, RUNX3, SEC5L1, SELL, SEPT9, SH3MD1, SIAT7C, SLC12A7, SLC1A2, SLC28A2, SLC39A10, SLC41A1, SLCO3A1, SLPI, SOS1, SOX11, SPATA13, SPATA3, SRC, TFEB, THADA, THRB, THSD2, TLE3, TMEFF2, TNFRSF8, TNFSF11, TNFSF8, TNN, TP53I11, TTC15, UBASH3A, USP25, UTS2, VIL2, WDFY1, WNT10B, WNT6, WRNIP1, ZNF31, ZNF608, and ZSCAN2, with a candidate anti-cancer agent; and
[0022] (b) detecting at least a two fold difference between the level of the gene's expression in the cell in the presence and in the absence of the candidate anti-cancer agent. In some embodiments at least a two fold difference between the level of the gene's expression in the cell in the presence and in the absence of the candidate anti-cancer agent indicates that the candidate anti-cancer agent has anti-cancer activity.

[0023] In some aspects, the present invention provides methods for identifying a patient as susceptible to treatment with an antibody that binds to an expression product of a cancer-associated gene selected from the group consisting of ABCB9, AD026, ADSSL1, ANP32A, ANXA3, ARF3, ARHGEF1, ARID1B, ARMC1, ARPC2, ATP2B4, ATP8B4, BCL11B, BCL2L1, BLK, BLM, BLR1, BRAF, BRPF3, BTNL2, C10orf45, C13orf18, C13orf24, C14orf4, C1orf41, C1orf9, C20Orf174, C2orf11, C6orf190, C6orf32, C9orf5, CACNA1D, CACNA1E, CALM2, CCND2, CCRN4L, CD28, CD38, CD3Z, CFTR, CHD7, CHDH, CHIC2, CLEC2D, CLIC1, CNR2, CNTN2, COL19A1, CPNE4, CR1, CREG1, CTSL, CXCR4, CYB5, DAD1, DDR2, DKFZP564J047, DKKL1, DLST, DMBT1, DNAJC6, DNMT3A, DPT, DYM, EGR2, EIF4G3, ENAH, ETV1, F2RL2, F5, FAS, FBN2, FCGR2B, FGF10, FGFR3, FLJ10996, FLJ11155, FLJ14075, FLJ20604, FLJ22800, FLJ23235, FLJ40873, FLJ46156, FNBP1, FOXD3, FZD10, GALNAC4S-6ST, GFI1, GGTA1, GSCL, GSH-2, HAAO, HIVEP3, HMGA1, ICOS, IGF1R, IGF2, IL12A, IL7R, IRF2, ITK, ITPR1, JAK1, JARID2, JDP2, KCNH5, KIAA0261, KIAA0350, KIAA0427, KIAA1040, LCK, LFNG, LMO2, LMO7, LOC145814, LOC340075, LOC401548, LOC64744, LPP, LRFN3, LTB, MAP2K5, MAP3K8, MARLIN1, MATN2, MBNL1, MCM3AP, MCM5, MCOLN3, MED12L, MGC45474, MHC2TA, MR1, MSCP, NCF4, NEDD4L, NEDD9, NEU1, NFKBIZ, NR3C1, NTRK3, OASL, PAP, PDCD1LG2, PDGFRA, PIGM, PPP3CC, PRDM11, PRIM2A, PRKCH, PSMB1, PSMB9, PTP4A2, PTPRK, RAC2, RAI17, RAMP, RGC32, RNASE1, RNPC1, RORC, RREB1, RUNX3, SEC5L1, SELL, SEPT9, SH3MD1, SIAT7C, SLC12A7, SLC1A2, SLC28A2, SLC39A10, SLC41A1, SLCO3A1, SLPI, SOS1, SOX11, SPATA13, SPATA3, SRC, TFEB, THADA, THRB, THSD2, TLE3, TMEFF2, TNFRSF8, TNFSF11, TNFSF8, TNN, TP53I11, TTC15, UBASH3A, USP25, UTS2, VIL2, WDFY1, WNT10B, WNT6, WRNIP1, ZNF31, ZNF608, and ZSCAN2, comprising measuring the level of the expression product of the gene in a biological sample from that patient.

[0024] In some aspects, the present invention provides kit for the diagnosis or detection of cancer in a mammal. In some embodiments the kit comprises an antibody or fragment thereof, or an immunoconjugate or fragment thereof, according to any one of the proceeding embodiments. In some embodiments the antibody or fragment specifically binds a cancer-associated tumor cell antigen; one or more reagents for detecting a binding reaction between said antibody and said tumor cell antigen. In some embodiments the kits comprise instructions for using the kit.

[0025] In some aspects, the present invention provides kits for diagnosing cancer comprising a nucleic acid probe that hybridises under stringent conditions to a cancer-associated gene selected from the group consisting of ABCB9, AD026, ADSSL1, ANP32A, ANXA3, ARF3, ARHGEF1, ARID1B, ARMC1, ARPC2, ATP2B4, ATP8B4, BCL11B, BCL2L1, BLK, BLM, BLR1, BRAF, BRPF3, BTNL2, C10orf45, C13orf18, C13orf24, C14orf4, C1orf41, C1orf9, C20orf174, C2orf11, C6orf190, C6or32, C9orf5, CACNA1D, CACNA1E, CALM2, CCND2, CCRN4L, CD28, CD38, CD3Z, CFTR, CHD7, CHDH, CHIC2, CLEC2D, CLIC1, CNR2, CNTN2, COL19A1, CPNE4, CR1, CREG1, CTSL, CXCR4, CYB5, DAD1, DDR2, DKFZP564J047, DKKL1, DLST, DMBT1, DNAJC6, DNMT3A, DPT, DYM, EGR2, EIF4G3, ENAH, ETV1, F2RL2, F5, FAS, FBN2, FCGR2B, FGF10, FGFR3, FLJ10996, FLJ11155, FLJ14075, FLJ20604, FLJ22800, FLJ23235, FLJ40873, FLJ46156, FNBP1, FOXD3, FZD10, GALNAC4S-6ST, GFI1, GGTA1, GSCL, GSH-2, HAAO, HIVEP3, HMGA1, ICOS, IGF1R, IGF2, IL12A, IL7R, IRF2, ITK, ITPR1, JAK1, JARID2, JDP2, KCNH5, KIAA0261, KIAA0350, KIAA0427, KIAA1040, LCK, LFNG, LMO2, LMO7, LOC145814, LOC340075, LOC401548, LOC64744, LPP, LRFN3, LTB, MAP2K5, MAP3K8, MARLIN1, MATN2, MBNL1, MCM3AP, MCM5, MCOLN3, MED12L, MGC45474, MHC2TA, MR1, MSCP, NCF4, NEDD4L, NEDD9, NEU1, NFKBIZ, NR3C1, NTRK3, OASL, PAP, PDCD1LG2, PDGFRA, PIGM, PPP3CC, PRDM11, PRIM2A, PRKCH, PSMB1, PSMB9, PTP4A2, PTPRK, RAC2, RAI17, RAMP, RGC32, RNASE1, RNPC1, RORC, RREB1, RUNX3, SEC5L1, SELL, SEPT9, SH3MD1, SIAT7C, SLC12A7, SLC1A2, SLC28A2, SLC39A10, SLC41A1, SLCO3A1, SLPI, SOS1, SOX11, SPATA13, SPATA3, SRC, TFEB, THADA, THRB, THSD2, TLE3, TMEFF2, TNFRSF8, TNFSF11, TNFSF8, TNN, TP53I11, TTC15, UBASH3A, USP25, UTS2, VIL2, WDFY1, WNT10B, WNT6, WRNIP1, ZNF31, ZNF608, and ZSCAN2, and primers for amplifying the gene. In some embodiments the kits comprise instructions for using the kit.

[0026] In some aspects, the present invention provides compositions comprising one or more antibodies or oligonucleotides specific for an expression product of a cancer-associated gene selected from the group consisting of ABCB9, AD026, ADSSL1, ANP32A, ANXA3, ARF3, ARHGEF1, ARID1B, ARMC1, ARPC2, ATP2B4, ATP8B4, BCL11B, BCL2L1, BLK, BLM, BLR1, BRAF, BRPF3, BTNL2, C10orf45, C13orf18, C13orf24, C14orf4, C1orf41, C1orf9, C20orf174, C2orf11, C6orf190, C6orf32, C9orf5, CACNA1D, CACNA1E, CALM2, CCND2, CCRN4L, CD28, CD38, CD3Z, CFTR, CHD7, CHDH, CHIC2, CLEC2D, CLIC1, CNR2, CNTN2, COL19A1, CPNE4, CR1, CREG1, CTSL, CXCR4, CYB5, DAD1, DDR2, DKFZP564J047, DKKL1, DLST, DMBT1, DNAJC6, DNMT3A, DPT, DYM, EGR2, EIF4G3, ENAH, ETV1, F2RL2, F5, FAS, FBN2, FCGR2B, FGF10, FGFR3, FLJ10996, FLJ11155, FLJ14075, FLJ20604, FLJ22800, FLJ23235, FLJ40873, FLJ46156, FNBP1, FOXD3, FZD10, GALNAC4S-6ST, GFI1, GGTA1, GSCL, GSH-2, HAAO, HIVEP3, HMGA1, ICOS, IGF1R, IGF2, IL12A, IL7R, IRF2, ITK, ITPR1, JAK1, JARID2, JDP2, KCNH5, KIAA0261, KIAA0350, KIAA0427, KIAA1040, LCK, LFNG, LMO2, LMO7, LOC145814, LOC340075, LOC401548, LOC64744, LPP, LRFN3, LTB, MAP2K5, MAP3K8, MARLIN1, MATN2, MBNL1, MCM3AP, MCM5, MCOLN3, MED12L, MGC45474, MHC2TA, MR1, MSCP, NCF4, NEDD4L, NEDD9, NEU1, NFKBIZ, NR3C1, NTRK3, OASL, PAP, PDCD1LG2, PDGFRA, PIGM, PPP3CC, PRDM11, PRIM2A, PRKCH, PSMB1, PSMB9, PTP4A2, PTPRK, RAC2, RAI17, RAMP, RGC32, RNASE1, RNPC1, RORC, RREB1, RUNX3, SEC5L1, SELL, SEPT9, SH3MD1, SIAT7C, SLC12A7, SLC1A2, SLC28A2, SLC39A10, SLC41A1, SLCO3A1, SLPI, SOS1, SOX11, SPATA13, SPATA3, SRC, TFEB, THADA, THRB, THSD2, TLE3, TMEFF2, TNFRSF8, TNFSF11, TNFSF8, TNN, TP53I11, TTC15, UBASH3A, USP25, UTS2, VIL2, WDFY1, WNT10B, WNT6, WRNIP1, ZNF31, ZNF608, and ZSCAN2.

[0027] These and other aspects of the present invention will be elucidated in the following detailed description of the invention.

### DETAILED DESCRIPTION

[0028] Protooncogenes have been identified in humans using a process known as “provirus tagging”, in which slow-transforming retroviruses that act by an insertion mutation mechanism are used to isolate protooncogenes using mouse models. In some models, uninfected animals have low cancer rates, and infected animals have high cancer rates. It is known that many of the retroviruses involved do not carry transduced host protooncogenes or pathogenic transacting viral genes, and thus the cancer incidence must therefore be a direct consequence of proviral integration effects into host protooncogenes. Since proviral integration is random, rare integrants will “activate” host protooncogenes that provide a selective growth advantage, and these rare events result in new proviruses at clonal stoichiometries in tumors. In contrast to mutations caused by chemicals, radiation, or spontaneous errors, protooncogene insertion mutations can be easily located by virtue of the fact that a convenient-sized genetic marker of known sequence (the provirus) is present at the site of mutation. Host sequences that flank clonally integrated proviruses can be cloned using a variety of strategies. Once these sequences are in hand, the tagged protooncogenes can be subsequently identified. The presence of provirus at the same locus in two or more independent tumors is prima facie evidence that a protooncogene is present at or very near the provirus integration sites (Kim et al, Journal of Virology, 2003, 77:2056-2062; Mikkers, H and Berns, A, Advances in Cancer Research, 2003, 88:53-99; Keoko et al. Nucleic Acids Research, 2004, 32:D523-D527). This is because the genome is too large for random integrations to result in observable clustering. Any clustering that is detected is unequivocal evidence for biological selection (i.e. the tumor phenotype). Moreover, the pattern of proviral integrants (including orientations) provides compelling positional information that makes localization of the target gene at each cluster relatively simple. The three mammalian retroviruses that are known to cause cancer by an insertion mutation mechanism are FeLV (leukemia/lymphoma in cats), MLV (leukemia/lymphoma in mice and rats), and MMTV (mammary cancer in mice). Once protooncogenes have been identified in mouse models, the human orthologs can be annotated as protooncogenes and further investigations carried out.

[0029] Thus, the use of oncogenic retroviruses, whose sequences insert into the genome of the host organism resulting in cancer, allows the identification of host genes involved in cancer. These sequences may then be used in a number of different ways, including diagnosis, prognosis, screening for modulators (including both agonists and antagonists), antibody generation (for immunotherapy and imaging), etc. However, as will be appreciated by those in the art, oncogenes that are identified in one type of cancer such as those identified in the present invention, have a strong likelihood of being involved in other types of cancers as well.

[0030] The invention therefore provides methods for detecting cancerous cells in a biological sample comprising determining the sequence or expression level of one or more (i.e. 1, 2, 3, 4, 5 or more) cancer-associated genes.

[0031] As used herein, the term “cancer-associated genes” refers to genes selected from ABCB9, AD026, ADSSL1, ANP32A, ANXA3, ARF3, ARHGEF1, ARID1B, ARMC1, ARPC2, ATP2B4, ATP8B4, BCL11B, BCL2L1, BLK, BLM, BLR1, BRAF, BRPF3, BTNL2, C10orf45, C13orf18, C13orf24, C14orf4, C1orf41, C1orf9, C20orf174, C2orf11, C6orf190, C6orf32, C9orf5, CACNA1D, CACNA1E, CALM2, CCND2, CCRN4L, CD28, CD38, CD3Z, CFTR, CHD7, CHDH, CHIC2, CLEC2D, CLIC1, CNR2, CNTN2, COL19A1, CPNE4, CR1, CREG1, CTSL, CXCR4, CYB5, DAD1, DDR2, DKFZP564J047, DKKL1, DLST, DMBT1, DNAJC6, DNMT3A, DPT, DYM, EGR2, EIF4G3, ENAH, ETV1, F2RL2, F5, FAS, FBN2, FCGR2B, FGF10, FGFR3, FLJ10996, FLJ11155, FLJ14075, FLJ20604, FLJ22800, FLJ23235, FLJ40873, FLJ46156, FNBP1, FOXD3, FZD10, GALNAC4S-6ST, GFI1, GGTA1, GSCL, GSH-2, HAAO, HIVEP3, HMGA1, ICOS, IGF1R, IGF2, IL12A, IL7R, IRF2, ITK, ITPR1, JAK1, JARID2, JDP2, KCNH5, KIAA0261, KIAA0350, KIAA0427, KIAA1040, LCK, LFNG, LMO2, LMO7, LOC145814, LOC340075, LOC401548, LOC64744, LPP, LRFN3, LTB, MAP2K5, MAP3K8, MARLIN1, MATN2, MBNL1, MCM3AP, MCM5, MCOLN3, MED12L, MGC45474, MHC2TA, MR1, MSCP, NCF4, NEDD4L, NEDD9, NEU1, NFKBIZ, NR3C1, NTRK3, OASL, PAP, PDCDILG2, PDGFRA, PIGM, PPP3CC, PRDM11, PRIM2A, PRKCH, PSMB1, PSMB9, PTP4A2, PTPRK, RAC2, RAI17, RAMP, RGC32, RNASE1, RNPC1, RORC, RREB1, RUNX3, SEC5L1, SELL, SEPT9, SH3MD1, SIAT7C, SLC12A7, SLC1A2, SLC28A2, SLC39A10, SLC41A1, SLCO3A1, SLPI, SOS1, SOX11, SPATA13, SPATA3, SRC, TFEB, THADA, THRB, THSD2, TLE3, TMEFF2, TNFRSF8, TNFSF11, TNFSF8, TNN, TP53I11, TTC15, UBASH3A, USP25, UTS2, VIL2, WDFY1, WNT10B, WNT6, WRNIP1, ZNF31, ZNF608, and ZSCAN2.

[0032] These genes have been identified and validated as proto-oncogenes using the methods described herein.

[0033] In some embodiments the methods include measuring the level of expression of one or more (i.e. 1, 2, 3, 4, 5, 6, 7, 8, 9, 10 or more) expression products of the cancer-associated gene, wherein a level of expression that is different to a control level is indicative of disease.

[0034] In some embodiments the expression product is a protein, although alternatively mRNA expression products may be detected. If a protein is used, the protein is preferably detected by an antibody which preferably binds specifically to that protein. The term “binds specifically” means that the antibodies have substantially greater affinity for their target polypeptide than their affinity for other related polypeptides. As used herein, the term “antibody” refers to intact molecules as well as to fragments thereof, such as Fab, F(ab′)2 and Fv, which are capable of binding to the antigenic determinant in question. By “substantially greater affinity” we mean that there is a measurable increase in the affinity for the target polypeptide of the invention as compared with the affinity for other related polypeptide. In some embodiments, the affinity is at least 1.5-fold, 2-fold, 5-fold 10-fold, 100-fold, 10³-fold, 10⁴-fold, 10⁵-fold, 10⁶-fold or greater for the target polypeptide.

[0035] In some embodiments, the antibodies bind with high affinity, with a dissociation constant of 10⁻⁴ M or less, 10⁻⁷ M or less, 10⁻⁹ M or less; or subnanomolar affinity (0.9, 0.8, 0.7, 0.6, 0.5, 0.4, 0.3, 0.2, 0.1 nM or even less).

[0036] Where mRNA expression product is used, in some embodiments it is detected by contacting a tissue sample with a probe under conditions that allow the formation of a hybrid complex between the mRNA and the probe; and detecting the formation of a complex. In some embodiments stringent hybridization conditions are used.

[0037] Cancer associated genes themselves may be detected by contacting a biological sample with a probe under conditions that allow the formation of a hybrid complex between a nucleic acid expression product encoding a cancer-associated gene and the probe; and detecting the formation of a complex between the probe and the nucleic acid from the biological sample. In some embodiments, the absence of the formation of a complex is indicative of a mutation in the sequence of the cancer-associated gene.

[0038] Methods include comparing the amount of complex formed with that formed when a control tissue is used, wherein a difference in the amount of complex formed between the control and the sample indicates the presence of cancer. In some embodiments the difference between the amount of complex formed by the test tissue compared to the normal tissue is an increase or decrease. In some embodiments two-fold increase or decrease in the amount of complex formed is indicative of disease. In some embodiments, a 3-fold, 4-fold, 5-fold, 10-fold, 20-fold, 50-fold or even 100-fold increase or decrease in the amount of complex formed is indicative of disease.

[0039] In some embodiments the biological sample used in the methods of the invention is a tissue sample. Any tissue sample may be used. In some embodiments, however, the tissue is selected from breast tissue, colon tissue, kidney tissue, liver tissue, lung tissue, lymphoid tissue, ovary tissue, pancreas tissue, prostate tissue, uterine tissue, cervix tissue or skin tissue.

[0040] The invention also provides methods for assessing the progression of cancer in a patient comprising comparing the expression of one or more (i.e. 1, 2, 3, 4, 5, 6, 7, 8, 9, 10 or more) expression products of the cancer-associated genes referred to above in a biological sample at a first time point to the expression of the same expression product at a second time point, wherein an increase or decrease in expression, or in the rate of increase or decrease of expression, at the second time point relative to the first time point is indicative of the progression of the cancer.

[0041] The invention also provides kits useful for diagnosing cancer comprising an antibody that binds to a polypeptide expression product of a cancer-associated gene; and a reagent useful for the detection of a binding reaction between said antibody and said polypeptide. In some embodiments, the antibody binds specifically to the polypeptide product of the cancer-associated gene.

[0042] Furthermore, the invention provides a kit for diagnosing cancer comprising a nucleic acid probe that hybridises under stringent conditions to a cancer-associated gene; primers useful for amplifying the cancer-associated gene; and, optionally, instructions for using the probe and primers for facilitating the diagnosis of disease.

[0043] The invention further provides antibodies, nucleic acids, or proteins suitable for use in modulating the expression of an expression product of one or more (i.e. 1, 2, 3, 4, 5, 6, 7, 8, 9, 10 or more) of the cancer-associated genes listed above, for use in treating cancer.

[0044] Accordingly, the invention provides methods for treating cancer in a patient, comprising modulating the level of one or more (i.e. 1, 2, 3, 4, 5, 6, 7, 8, 9, 10 or more) expression products of any one of the cancer-associated genes listed above. In some embodiments the methods comprise administering to the patient a therapeutically-effective amount of an antibody, a nucleic acid, or a polypeptide that modulates the level of said expression product.

[0045] The invention therefore also provides the use of an antibody, a nucleic acid, or a polypeptide that modulates the level of an expression product of one or more (i.e. 1, 2, 3, 4, 5, 6, 7, 8, 9, 10 or more) cancer-associated genes, in the manufacture of a medicament for the treatment, detection or diagnosis of cancer. In some embodiments the level of expression is modulated by action on the gene, mRNA or the encoded protein. In some embodiments the expression is upregulated or downregulated. For example, the change in regulation may be 2-fold, 3-fold, 5-fold, 10-fold, 20-fold, 50-fold, or even 100 fold or more.

[0046] Antibodies suitable for use in accordance with the present invention may be specific for cancer-associated proteins as these are expressed on or within cancerous cells. For example, glycosylation patterns in cancer-associated proteins as expressed on cancerous cells may be different to the patterns of glycosylation in these same proteins as these are expressed on non-cancerous cells. In some embodiments antibodies according to the invention are specific for cancer-associated proteins as expressed on cancerous cells only. This is of particular value for therapeutic antibodies. Anti-target antibodies may also bind to splice variants, deletion, addition and/or substitution mutants of the target.

[0047] Antibodies suitable for therapeutic use in accordance with the present invention elicit antibody-dependent cellular cytotoxicity (ADCC). ADCC refers to the cell-mediated reaction wherein non-specific cytotoxic cells that express Fc receptors recognize bound antibody on a target cell and subsequently cause lysis of the target cell (Raghavan et al., 1996, Annu Rev Cell Dev Biol 12:181-220; Ghetie et al., 2000, Annu Rev Immunol 18:739-766; Ravetch et al., 2001, Annu Rev Immunol 19:275-290). Antibodies suitable for therapeutic use in accordance with the present invention may elicit antibody-dependent cell-mediated phagocytosis (ADCP). ADCP is the cell-mediated reaction wherein nonspecific cytotoxic cells that express Fc receptors recognize bound antibody on a target cell and subsequently cause phagocytosis. These processes are mediated by natural killer (NK) cells, which possess receptors on their surface for the Fc portion of IgG antibodies. When IgG is made against epitopes on “foreign” membrane-bound cells, including cancer cells, the Fab portions of the antibodies react with the cancerous cell. The NK cells then bind to the Fc portion of the antibody.

[0048] In embodiments where it is desirable to modify the antibody of the invention with respect to effector function, e.g. so as to enhance antigen-dependent cell-mediated cyotoxicity (ADCC) and/or complement dependent cytotoxicity (CDC) of the antibody, one or more amino acid substitutions can be introduced into an Fc region of the antibody. Alternatively or additionally, cysteine residue(s) may be introduced in the Fc region, thereby allowing interchain disulfide bond formation in this region (For review: Weiner and Carter (2005) Nature Biotechnology 23(5): 556-557). The homodimeric antibody thus generated may have improved internalization capability and/or increased complement-mediated cell killing and antibody-dependent cellular cytotoxicity (ADCC). See Caron et al., J. Exp Med. 176:1191-1195 (1992) and Shopes, B. J. Immunol. 148:2918-2922 (1992). Homodimeric antibodies with enhanced anti-tumor activity may also be prepared using heterobifunctional cross-linkers as described in Wolff et al. Cancer Research 53:2560-2565 (1993). Alternatively, an antibody can be engineered which has dual Fc regions and may thereby have enhanced complement lysis and ADCC capabilities. See Stevenson et al. Anti-Cancer Drug Design 3:219-230 (1989). Antibodies can be produced with modified glycosylation within the Fc region. For example, lowering the fucose content in the carbohydrate chains may improve the antibody's intrinsic ADCC activity (see for example BioWa's Potillegent™ ADCC Enhancing Technology, described in WO0061739). Alternately, antibodies can be produced in cell lines that add bisected non-fucosylated oligosaccharide chains (see U.S. Pat. No. 6,602,684). Both these technologies produce antibodies with an increased affinity for the FcgammaIIIa receptor on effector cells which results in increased ADCC efficiency. The Fc region can also be engineered to alter the serum half life of the antibodies of the invention. Abdegs are engineered IgGs with an increased affinity for the FcRn salvage receptor, and so have shorter half life than conventional IgGs (see Vaccaro et al, (2005) Nature Biotechnology 23(10): 1283-1288). To increase serum half life, specific mutations can be introduced into the Fc region that appear to decrease the affinity with FcRn (see Hinton et al, (2004) J Biol Chem 297(8): 6213-6216). Antibodies of the invention can also be modified to use other mechanisms to alter serum half life, such as including a serum albumin binding domain (dAb) (see WO05035572 for example). Engineered Fc domains (see for example XmAB™, WO05077981) may also be incorporated into the antibodies of the invention to lead to improved ADCC activity, altered serum half life or increased antibody protein stability.

[0049] In some embodiments, antibodies for therapeutic use in accordance with the invention are effective to elicit ADCC, and modulates the survival of cancerous cells by binding to target and having ADCC activity. Antibodies can be engineered to heighten ADCC activity (see, for example, US 20050054832A1, Xencor Inc. and the documents cited therein).

[0050] In some embodiments the nucleic acid type used in such methods is an antisense construct, a ribozyme or RNAi, including, for example, siRNA.

[0051] The cancer may be treated by the inhibition of tumour growth or the reduction of tumour volume or, alternatively, by reducing the invasiveness of a cancer cell. In some embodiments, the methods of treatment described above are used in conjunction with one or more of surgery, hormone ablation therapy, radiotherapy or chemotherapy. For example, if a patient is already receiving chemotherapy, a compound of the invention that modulates the level of an expression product as listed above may also be administered. The chemotherapeutic, hormonal and/or rediotherapeutic agent and compound according to the invention may be administered simultaneously, separately or sequentially.

[0052] In some embodiments the cancer being detected or treated according to one of the methods described above is melanoma, breast cancer, lymphoma, leukemia, colon cancer, kidney cancer, liver cancer, lung cancer, ovary cancer, pancreatic cancer, prostate cancer, uterine cancer, cervical cancer, bladder cancer, stomach cancer or skin cancer. In some embodiments the cancer is carcinoma, breast cancer, lymphoma or leukemia.

[0053] The invention provides methods for diagnosing cancer comprising detecting evidence of differential expression in a patient sample of a gene selected from the group consisting of ABCB9, AD026, ADSSL1, ANP32A, ANXA3, ARF3, ARHGEF1, ARID1B, ARMC1, ARPC2, ATP2B4, ATP8B4, BCL11B, BCL2L1, BLK, BLM, BLR1, BRAF, BRPF3, BTNL2, C10orf45, C13orf18, C13orf24, C14orf4, C1orf41, C1orf9, C20Orf174, C2orf11, C6orf190, C6orf32, C9orf5, CACNA1D, CACNA1E, CALM2, CCND2, CCRN4L, CD28, CD38, CD3Z, CFTR, CHD7, CHDH, CHIC2, CLEC2D, CLIC1, CNR2, CNTN2, COL19A1, CPNE4, CR1, CREG1, CTSL, CXCR4, CYB5, DAD1, DDR2, DKFZP564J047, DKKL1, DLST, DMBT1, DNAJC6, DNMT3A, DPT, DYM, EGR2, EIF4G3, ENAH, ETV1, F2RL2, F5, FAS, FBN2, FCGR2B, FGF10, FGFR3, FLJ10996, FLJ11155, FLJ14075, FLJ20604, FLJ22800, FLJ23235, FLJ40873, FLJ46156, FNBP1, FOXD3, FZD10, GALNAC4S-6ST, GFI1, GGTA1, GSCL, GSH-2, HAAO, HIVEP3, HMGA1, ICOS, IGF1R, IGF2, IL12A, IL7R, IRF2, ITK, ITPR1, JAK1, JARID2, JDP2, KCNH5, KIAA0261, KIAA0350, KIAA0427, KIAA1040, LCK, LFNG, LMO2, LMO7, LOC145814, LOC340075, LOC401548, LOC64744, LPP, LRFN3, LTB, MAP2K5, MAP3K8, MARLIN1, MATN2, MBNL1, MCM3AP, MCM5, MCOLN3, MED12L, MGC45474, MHC2TA, MR1, MSCP, NCF4, NEDD4L, NEDD9, NEU1, NFKBIZ, NR3C1, NTRK3, OASL, PAP, PDCD1LG2, PDGFRA, PIGM, PPP3CC, PRDM11, PRIM2A, PRKCH, PSMB1, PSMB9, PTP4A2, PTPRK, RAC2, RA117, RAMP, RGC32, RNASE1, RNPC1, RORC, RREB1, RUNX3, SEC5L1, SELL, SEPT9, SH3MD1, SIAT7C, SLC12A7, SLC1A2, SLC28A2, SLC39A10, SLC41A1, SLCO3A1, SLPI, SOS1, SOX11, SPATA13, SPATA3, SRC, TFEB, THADA, THRB, THSD2, TLE3, TMEFF2, TNFRSF8, TNFSF11, TNFSF8, TNN, TP53I11, TTC15, UBASH3A, USP25, UTS2, VIL2, WDFY1, WNT10B, WNT6, WRNIP1, ZNF31, ZNF608, and ZSCAN2.

[0054] Evidence of differential expression of the gene is diagnostic of cancer. In some embodiments the cancer is carcinoma, melanoma, breast cancer, lymphoma, leukemia, colon cancer, kidney cancer, liver cancer, lung cancer, ovary cancer, pancreatic cancer, prostate cancer, uterine cancer, cervical cancer, bladder cancer, stomach cancer or skin cancer. In some embodiments the cancer is carcinoma, breast cancer, lymphoma or leukemia.In some embodiments, evidence of differential expression of the gene is detected by measuring the level of an expression product of the gene. In some embodiments the expression product is a protein or mRNA. In some embodiments the level of expression of protein is measured using an antibody which binds specifically to the protein. In some embodiments the antibody is linked to an imaging agent. In some embodiments the level of expression product of the gene in the patient sample is compared to a control. In some embodiments the control is a known normal tissue of the same tissue type as in the patient sample. In some embodiments the level of the expression product in the sample is increased relative to the control.

[0055] The invention also provides methods for detecting a cancerous cell in a patient sample comprising detecting evidence of an expression product of a gene selected from the group consisting of ABCB9, AD026, ADSSL1, ANP32A, ANXA3, ARF3, ARHGEF1, ARID1B, ARMC1, ARPC2, ATP2B4, ATP8B4, BCL11B, BCL2L1, BLK, BLM, BLR1, BRAF, BRPF3, BTNL2, C10orf45, C13orf18, C13orf24, C14orf4, C1orf41, C1orf9, C20Orf174, C2orf11, C6orf190, C6orf32, C9orf5, CACNA1D, CACNA1E, CALM2, CCND2, CCRN4L, CD28, CD38, CD3Z, CFTR, CHD7, CHDH, CHIC2, CLEC2D, CLIC1, CNR2, CNTN2, COL19A1, CPNE4, CR1, CREG1, CTSL, CXCR4, CYB5, DAD1, DDR2, DKFZP564J047, DKKL1, DLST, DMBT1, DNAJC6, DNMT3A, DPT, DYM, EGR2, EIF4G3, ENAH, ETV1, F2RL2, F5, FAS, FBN2, FCGR2B, FGF10, FGFR3, FLJ10996, FLJ11155, FLJ14075, FLJ20604, FLJ22800, FLJ23235, FLJ40873, FLJ46156, FNBP1, FOXD3, FZD10, GALNAC4S-6ST, GFI1, GGTA1, GSCL, GSH-2, HAAO, HIVEP3, HMGA1, ICOS, IGF1R, IGF2, IL12A, IL7R, IRF2, ITK, ITPR1, JAK1, JARID2, JDP2, KCNH5, KIAA0261, KIAA0350, KIAA0427, KIAA1040, LCK, LFNG, LMO2, LMO7, LOC145814, LOC340075, LOC401548, LOC64744, LPP, LRFN3, LTB, MAP2K5, MAP3K8, MARLIN1, MATN2, MBNL1, MCM3AP, MCM5, MCOLN3, MED12L, MGC45474, MHC2TA, MR1, MSCP, NCF4, NEDD4L, NEDD9, NEU1, NFKBIZ, NR3C1, NTRK3, OASL, PAP, PDCD1LG2, PDGFRA, PIGM, PPP3CC, PRDM11, PRIM2A, PRKCH, PSMB1, PSMB9, PTP4A2, PTPRK, RAC2, RAI17, RAMP, RGC32, RNASE1, RNPC1, RORC, RREB1, RUNX3, SEC5L1, SELL, SEPT9, SH3MD1, SIAT7C, SLC12A7, SLC1A2, SLC28A2, SLC39A10, SLC41A1, SLCO3A1, SLPI, SOS1, SOX11, SPATA13, SPATA3, SRC, TFEB, THADA, THRB, THSD2, TLE3, TMEFF2, TNFRSF8, TNFSF11, TNFSF8, TNN, TP53I11, TTC15, UBASH3A, USP25, UTS2, VIL2, WDFY1, WNT10B, WNT6, WRNIP1, ZNF31, ZNF608, and ZSCAN2. Evidence of expression of the gene in the sample indicates that a cell in the sample is cancerous. In some embodiments the cell is a breast cell, colon cell, kidney cell, liver cell, lung cell, lymphatic cell, ovary cell, pancreas cell, prostate cell, uterine cell, cervical cell, bladder cell, stomach cell or skin cell. In some embodiments the cell is a breast cell or a lymphatic cell. In some embodiments evidence of the expression product is detected using an antibody linked to an imaging agent.

[0056] The invention provides methods for assessing the progression of cancer in a patient comprising comparing the level of an expression product of a gene selected from the group consisting of ABCB9, AD026, ADSSL1, ANP32A, ANXA3, ARF3, ARHGEF1, ARID1B, ARMC1, ARPC2, ATP2B4, ATP8B4, BCL11B, BCL2L1, BLK, BLM, BLR1, BRAF, BRPF3, BTNL2, C10orf45, C13orf18, C13orf24, C14orf4, C1orf41, C1orf9, C20Orf174, C2orf11, C6orf190, C6orf32, C9orf5, CACNA1D, CACNA1E, CALM2, CCND2, CCRN4L, CD28, CD38, CD3Z, CFTR, CHD7, CHDH, CHIC2, CLEC2D, CLIC1, CNR2, CNTN2, COL19A1, CPNE4, CR1, CREG1, CTSL, CXCR4, CYB5, DAD1, DDR2, DKFZP564J047, DKKL1, DLST, DMBT1, DNAJC6, DNMT3A, DPT, DYM, EGR2, EIF4G3, ENAH, ETV1, F2RL2, F5, FAS, FBN2, FCGR2B, FGF10, FGFR3, FLJ10996, FLJ11155, FLJ14075, FLJ20604, FLJ22800, FLJ23235, FLJ40873, FLJ46156, FNBP1, FOXD3, FZD10, GALNAC4S-6ST, GFI1, GGTA1, GSCL, GSH-2, HAAO, HIVEP3, HMGA1, ICOS, IGF1R, IGF2, IL12A, IL7R, IRF2, ITK, ITPR1, JAK1, JARID2, JDP2, KCNH5, KIAA0261, KIAA0350, KIAA0427, KIAA1040, LCK, LFNG, LMO2, LMO7, LOC145814, LOC340075, LOC401548, LOC64744, LPP, LRFN3, LTB, MAP2K5, MAP3K8, MARLIN1, MATN2, MBNL1, MCM3AP, MCM5, MCOLN3, MED12L, MGC45474, MHC2TA, MR1, MSCP, NCF4, NEDD4L, NEDD9, NEU1, NFKBIZ, NR3C1, NTRK3, OASL, PAP, PDCD1LG2, PDGFRA, PIGM, PPP3CC, PRDM11, PRIM2A, PRKCH, PSMB1, PSMB9, PTP4A2, PTPRK, RAC2, RA117, RAMP, RGC32, RNASE1, RNPC1, RORC, RREB1, RUNX3, SEC5L1, SELL, SEPT9, SH3MD1, SIAT7C, SLC12A7, SLC1A2, SLC28A2, SLC39A10, SLC41A1, SLCO3A1, SLPI, SOS1, SOX11, SPATA13, SPATA3, SRC, TFEB, THADA, THRB, THSD2, TLE3, TMEFF2, TNFRSF8, TNFSF11, TNFSF8, TNN, TP53I11, TTC15, UBASH3A, USP25, UTS2, VIL2, WDFY1, WNT1OB, WNT6, WRNIP1, ZNF31, ZNF608, and ZSCAN2, in a biological sample at a first time point to a level of the same expression product at a second time point. A change in the level of the expression product at the second time point relative to the first time point is indicative of the progression of the cancer.

[0057] The invention also provides methods of diagnosing cancer comprising (a) measuring a level of mRNA of a gene selected from the group consisting of ABCB9, AD026, ADSSL1, ANP32A, ANXA3, ARF3, ARHGEF1, ARID1B, ARMC1, ARPC2, ATP2B4, ATP8B4, BCL11B, BCL2L1, BLK, BLM, BLR1, BRAF, BRPF3, BTNL2, C10orf45, C13orf18, C13orf24, C14orf4, C1orf41, C1orf9, C20orf174, C2orf11, C6orf190, C6orf32, C9orf5, CACNA1D, CACNA1E, CALM2, CCND2, CCRN4L, CD28, CD38, CD3Z, CFTR, CHD7, CHDH, CHIC2, CLEC2D, CLIC1, CNR2, CNTN2, COL19A1, CPNE4, CR1, CREG1, CTSL, CXCR4, CYB5, DAD1, DDR2, DKFZP564J047, DKKL1, DLST, DMBT1, DNAJC6, DNMT3A, DPT, DYM, EGR2, EIF4G3, ENAH, ETV1, F2RL2, F5, FAS, FBN2, FCGR2B, FGF10, FGFR3, FLJ10996, FLJ11155, FLJ14075, FLJ20604, FLJ22800, FLJ23235, FLJ40873, FLJ46156, FNBP1, FOXD3, FZD10, GALNAC4S-6ST, GFI1, GGTA1, GSCL, GSH-2, HAAO, HIVEP3, HMGA1, ICOS, IGF1R, IGF2, IL12A, IL7R, IRF2, ITK, ITPR1, JAK1, JARID2, JDP2, KCNH5, KIAA0261, KIAA0350, KIAA0427, KIAA1040, LCK, LFNG, LMO2, LMO7, LOC145814, LOC340075, LOC401548, LOC64744, LPP, LRFN3, LTB, MAP2K5, MAP3K8, MARLIN1, MATN2, MBNL1, MCM3AP, MCM5, MCOLN3, MED12L, MGC45474, MHC2TA, MR1, MSCP, NCF4, NEDD4L, NEDD9, NEU1, NFKBIZ, NR3C1, NTRK3, OASL, PAP, PDCD1LG2, PDGFRA, PIGM, PPP3CC, PRDM11, PRIM2A, PRKCH, PSMB1, PSMB9, PTP4A2, PTPRK, RAC2, RA117, RAMP, RGC32, RNASE1, RNPC1, RORC, RREB1, RUNX3, SEC5L1, SELL, SEPT9, SH3MD1, SIAT7C, SLC12A7, SLC1A2, SLC28A2, SLC39A10, SLC41A1, SLCO3A1, SLPI, SOS1, SOX11, SPATA13, SPATA3, SRC, TFEB, THADA, THRB, THSD2, TLE3, TMEFF2, TNFRSF8, TNFSF11, TNFSF8, TNN, TP53I11, TTC15, UBASH3A, USP25, UTS2, VIL2, WDFY1, WNT10B, WNT6, WRNIP1, ZNF31, ZNF608, and ZSCAN2, in a first sample wherein the first sample comprises a first tissue type of a first individual; and (b) comparing the level of mRNA in (a) to a control. Detection of at least a two fold difference between the level of mRNA in (a) and the level of the mRNA in the second sample or the third sample indicates that the first individual has or is predisposed to cancer. In some embodiments the control sample comprises a normal tissue type of the first individual. In some embodiments the control sample comprises a normal tissue type from an unaffected individual. In some embodiments, at least a three fold difference between the level of mRNA in the first sample and the control indicates that the first individual has or is predisposed to cancer.

[0058] The invention provides methods of screening for anti-cancer activity comprising (a) contacting a cell that expresses a gene selected from the group consisting of ABCB9, AD026, ADSSL1, ANP32A, ANXA3, ARF3, ARHGEF1, ARID1B, ARMC1, ARPC2, ATP2B4, ATP8B4, BCL11B, BCL2L1, BLK, BLM, BLR1, BRAF, BRPF3, BTNL2, C10orf45, C13orf18, C13orf24, C14orf4, C1orf41, C1orf9, C20orf174, C2orf11, C6orf190, C6orf32, C9orf5, CACNA1D, CACNA1E, CALM2, CCND2, CCRN4L, CD28, CD38, CD3Z, CFTR, CHD7, CHDH, CHIC2, CLEC2D, CLIC1, CNR2, CNTN2, COL19A1, CPNE4, CR1, CREG1, CTSL, CXCR4, CYB5, DAD1, DDR2, DKFZP564J047, DKKL1, DLST, DMBT1, DNAJC6, DNMT3A, DPT, DYM, EGR2, EIF4G3, ENAH, ETV1, F2RL2, F5, FAS, FBN2, FCGR2B, FGF10, FGFR3, FLJ10996, FLJ11155, FLJ14075, FLJ20604, FLJ22800, FLJ23235, FLJ40873, FLJ46156, FNBP1, FOXD3, FZD10, GALNAC4S-6ST, GFI1, GGTA1, GSCL, GSH-2, HAAO, HIVEP3, HMGA1, ICOS, IGF1R, IGF2, IL12A, IL7R, IRF2, ITK, ITPR1, JAK1, JARID2, JDP2, KCNH5, KIAA0261, KIAA0350, KIAA0427, KIAA1040, LCK, LFNG, LMO2, LMO7, LOC145814, LOC340075, LOC401548, LOC64744, LPP, LRFN3, LTB, MAP2K5, MAP3K8, MARLIN1, MATN2, MBNL1, MCM3AP, MCM5, MCOLN3, MED12L, MGC45474, MHC2TA, MR1, MSCP, NCF4, NEDD4L, NEDD9, NEU1, NFKBIZ, NR3C1, NTRK3, OASL, PAP, PDCDILG2, PDGFRA, PIGM, PPP3CC, PRDM11, PRIM2A, PRKCH, PSMB1, PSMB9, PTP4A2, PTPRK, RAC2, RAI17, RAMP, RGC32, RNASE1, RNPC1, RORC, RREB1, RUNX3, SEC5L1, SELL, SEPT9, SH3MD1, SIAT7C, SLC12A7, SLC1A2, SLC28A2, SLC39A10, SLC41A1, SLCO3A1, SLPI, SOS1, SOX11, SPATA13, SPATA3, SRC, TFEB, THADA, THRB, THSD2, TLE3, TMEFF2, TNFRSF8, TNFSF11, TNFSF8, TNN, TP53I11, TTC15, UBASH3A, USP25, UTS2, VIL2, WDFY1, WNT10B, WNT6, WRNIP1, ZNF31, ZNF608, and ZSCAN2, with a candidate anti-cancer agent; and (b) detecting at least a two fold difference between the level of gene expression in the cell in the presence and in the absence of the candidate anti-cancer agent. At least a two fold difference between the level of gene expression in the cell in the presence compared to the level level of gene expression in the cell in the absence of the candidate anti-cancer agent indicates that the candidate anti-cancer agent has anti-cancer activity. In some embodiments at least a three fold difference between the level of gene expression in the cell in the presence and in the absence of the candidate anti-cancer agent indicates that the candidate anti-cancer agent has anti-cancer activity. In some embodiments the candidate anti-cancer agent is an antibody, small organic compound, small inorganic compound, or polynucleotide. In some embodiments the candidate anti-cancer agent is a monoclonal antibody. In some embodiments the candidate anti-cancer agent is a human or humanized antibody. In some embodiments the polynucleotide is an antisense oligonucleotide. In some embodiments the polynucleotide is an oligonucleotide.

[0059] The invention also provides kits for the diagnosis or detection of cancer in a mammal. In some embodiments the kit comprises an antibody or fragment thereof, or an immunoconjugate or fragment thereof. In some embodiments the antibody or fragment is capable of specifically binding a tumor cell antigen wherein said tumor cell antigen is selected from the group of ABCB9, AD026, ADSSL1, ANP32A, ANXA3, ARF3, ARHGEF1, ARID1B, ARMC1, ARPC2, ATP2B4, ATP8B4, BCL11B, BCL2L1, BLK, BLM, BLR1, BRAF, BRPF3, BTNL2, C10orf45, C13orf18, C13orf24, C14rf4, C1orf41, C1orf9, C20orf174, C2orf11, C6orf190, C6orf32, C9orf5, CACNA1D, CACNA1E, CALM2, CCND2, CCRN4L, CD28, CD38, CD3Z, CFTR, CHD7, CHDH, CHIC2, CLEC2D, CLIC1, CNR2, CNTN2, COL19A1, CPNE4, CR1, CREG1, CTSL, CXCR4, CYB5, DAD1, DDR2, DKFZP564J047, DKKL1, DLST, DMBT1, DNAJC6, DNMT3A, DPT, DYM, EGR2, EIF4G3, ENAH, ETV1, F2RL2, F5, FAS, FBN2, FCGR2B, FGF10, FGFR3, FLJ10996, FLJ11155, FLJ14075, FLJ20604, FLJ22800, FLJ23235, FLJ40873, FLJ46156, FNBP1, FOXD3, FZD10, GALNAC4S-6ST, GFI1, GGTA1, GSCL, GSH-2, HAAO, HIVEP3, HMGA1, ICOS, IGF1R, IGF2, IL12A, IL7R, IRF2, ITK, ITPR1, JAK1, JARID2, JDP2, KCNH5, KIAA0261, KIAA0350, KIAA0427, KIAA1040, LCK, LFNG, LMO2, LMO7, LOC145814, LOC340075, LOC401548, LOC64744, LPP, LRFN3, LTB, MAP2K5, MAP3K8, MARLIN1, MATN2, MBNL1, MCM3AP, MCM5, MCOLN3, MED12L, MGC45474, MHC2TA, MR1, MSCP, NCF4, NEDD4L, NEDD9, NEU1, NFKBIZ, NR3C1, NTRK3, OASL, PAP, PDCD1LG2, PDGFRA, PIGM, PPP3CC, PRDMI1, PRIM2A, PRKCH, PSMB1, PSMB9, PTP4A2, PTPRK, RAC2, RAI17, RAMP, RGC32, RNASE1, RNPC1, RORC, RREB1, RUNX3, SEC5L1, SELL, SEPT9, SH3MD1, SIAT7C, SLC12A7, SLC1A2, SLC28A2, SLC39A10, SLC41A1, SLCO3A1, SLPI, SOS1, SOX11, SPATA13, SPATA3, SRC, TFEB, THADA, THRB, THSD2, TLE3, TMEFF2, TNFRSF8, TNFSF11, TNFSF8, TNN, TP53I11, TTC15, UBASH3A, USP25, UTS2, VIL2, WDFY1, WNT10B, WNT6, WRNIP1, ZNF31, ZNF608, and ZSCAN2. The kits further comprise one or more reagents for detecting a binding-reaction between the antibody and the tumor cell antigen. In some embodiments the kit comprises instructions for using the kit.

[0060] The invention also provides kits for diagnosing cancer. In some embodiments the kis comprise a nucleic acid probe that hybridises under stringent conditions to a gene selected from the group consisting of ABCB9, AD026, ADSSL1, ANP32A, ANXA3, ARF3, ARHGEF1, ARID1B, ARMC1, ARPC2, ATP2B4, ATP8B4, BCL11B, BCL2L1, BLK, BLM, BLR1, BRAF, BRPF3, BTNL2, C10orf45, C13orf18, C13orf24, C14 orf4, C1orf41, C1orf9, C20orf174, C2orf11, C6orf190, C6orf32, C9orf5, CACNA1D, CACNA1E, CALM2, CCND2, CCRN4L, CD28, CD38, CD3Z, CFTR, CHD7, CHDH, CHIC2, CLEC2D, CLIC1, CNR2, CNTN2, COL19A1, CPNE4, CR1, CREG1, CTSL, CXCR4, CYB5, DAD1, DDR2, DKFZP564J047, DKKL1, DLST, DMBT1, DNAJC6, DNMT3A, DPT, DYM, EGR2, EIF4G3, ENAH, ETV1, F2RL2, F5, FAS, FBN2, FCGR2B, FGF10, FGFR3, FLJ10996, FLJ11155, FLJ14075, FLJ20604, FLJ22800, FLJ23235, FLJ40873, FLJ46156, FNBP1, FOXD3, FZD10, GALNAC4S-6ST, GFI1, GGTA1, GSCL, GSH-2, HAAO, HIVEP3, HMGA1, ICOS, IGF1R, IGF2, IL12A, IL7R, IRF2, ITK, ITPR1, JAK1, JARID2, JDP2, KCNH5, KIAA0261, KIAA0350, KLAA0427, KIAA1040, LCK, LFNG, LMO2, LMO7, LOC145814, LOC340075, LOC401548, LOC64744, LPP, LRFN3, LTB, MAP2K5, MAP3K8, MARLIN1, MATN2, MBNL1, MCM3AP, MCM5, MCOLN3, MED12L, MGC45474, MHC2TA, MR1, MSCP, NCF4, NEDD4L, NEDD9, NEU1, NFKBIZ, NR3C1, NTRK3, OASL, PAP, PDCD1LG2, PDGFRA, PIGM, PPP3CC, PRDM11, PRIM2A, PRKCH, PSMB1, PSMB9, PTP4A2, PTPRK, RAC2, RA117, RAMP, RGC32, RNASE1, RNPC1, RORC, RREB1, RUNX3, SEC5L1, SELL, SEPT9, SH3MD1, SIAT7C, SLC12A7, SLC1A2, SLC28A2, SLC39A10, SLC41A1, SLCO3A1, SLPI, SOS1, SOX11, SPATA13, SPATA3, SRC, TFEB, THADA, THRB, THSD2, TLE3, TMEFF2, TNFRSF8, TNFSF11, TNFSF8, TNN, TP53I11, TTC15, UBASH3A, USP25, UTS2, VIL2, WDFY1, WNT10B, WNT6, WRNIP1, ZNF31, ZNF608, and ZSCAN2. The kits also comprise primers for amplifying the cancer-associated gene. In some embodiments the kits comprise instructions for using the kit.

[0061] The invention provides methods for treating cancer in a patient. In some embodiments the methods comprises modulating the level of an expression product of a gene selected from the group consisting of ABCB9, AD026, ADSSL1, ANP32A, ANXA3, ARF3, ARHGEF1, ARID1B, ARMC1, ARPC2, ATP2B4, ATP8B4, BCL11B, BCL2L1, BLK, BLM, BLR1, BRAF, BRPF3, BTNL2, C10orf45, C13orf18, C13orf24, C14orf4, C1orf41, C1orf9, C20orf174, C2orf11, C6orf190, C6orf32, C9orf5, CACNA1D, CACNA1E, CALM2, CCND2, CCRN4L, CD28, CD38, CD3Z, CFTR, CHD7, CHDH, CHIC2, CLEC2D, CLIC1, CNR2, CNTN2, COL19A1, CPNE4, CR1, CREG1, CTSL, CXCR4, CYB5, DAD1, DDR2, DKFZP564J047, DKKL1, DLST, DMBT1, DNAJC6, DNMT3A, DPT, DYM, EGR2, EIF4G3, ENAH, ETV1, F2RL2, F5, FAS, FBN2, FCGR2B, FGF10, FGFR3, FLJ10996, FLJ11155, FLJ14075, FLJ20604, FLJ22800, FLJ23235, FLJ40873, FLJ46156, FNBP1, FOXD3, FZD10, GALNAC4S-6ST, GFI1, GGTA1, GSCL, GSH-2, HAAO, HIVEP3, HMGA1, ICOS, IGF1R, IGF2, IL12A, IL7R, IRF2, ITK, ITPR1, JAK1, JARID2, JDP2, KCNH5, KIAA0261, KIAA0350, KIAA0427, KIAA1040, LCK, LFNG, LMO2, LMO7, LOC145814, LOC340075, LOC401548, LOC64744, LPP, LRFN3, LTB, MAP2K5, MAP3K8, MARLIN1, MATN2, MBNL1, MCM3AP, MCM5, MCOLN3, MED12L, MGC45474, MHC2TA, MR1, MSCP, NCF4, NEDD4L, NEDD9, NEU1, NFKBIZ, NR3C1, NTRK3, OASL, PAP, PDCD1LG2, PDGFRA, PIGM, PPP3CC, PRDM11, PRIM2A, PRKCH, PSMB1, PSMB9, PTP4A2, PTPRK, RAC2, RAI17, RAMP, RGC32, RNASE1, RNPC1, RORC, RREB1, RUNX3, SEC5L1, SELL, SEPT9, SH3MD1, SIAT7C, SLC12A7, SLC1A2, SLC28A2, SLC39A10, SLC41A1, SLCO3A1, SLPI, SOS1, SOX11, SPATA13, SPATA3, SRC, TFEB, THADA, THRB, THSD2, TLE3, TMEFF2, TNFRSF8, TNFSF11, TNFSF8, TNN, TP53I11, TTC15, UBASH3A, USP25, UTS2, VIL2, WDFY1, WNT10B, WNT6, WRNIP1, ZNF31, ZNF608, and ZSCAN2. In some embodiments the methods comprise administering to the patient an antibody, a nucleic acid, or a polypeptide that modulates the level of the expression product. In some embodiments the level of the expression product is upregulated or downregulated by at least a 2-fold change. In some embodiments the cancer is treated by the inhibition of tumour growth or the reduction of tumour volume. In some embodiments the cancer is treated by reducing the invasiveness of a cancer cell. In some embodiments the expression product is a protein or mRNA. In some embodiments the expression level of the expression product at a first time point is compared to the expression level of the same expression product at a second time point, wherein an increase or decrease in expression at the second time point relative to the first time point is indicative of the progression of cancer.

[0062] The invention also provides methods for treating cancer in a patient comprising modulating a cancer-associated gene-activity. In some embodiments the cancer-associated gene- activity is cell proliferation, cell growth, cell motility, metastasis, cell migration, cell survival, or tumorigneicity. In some embodiments the methods comprise administering to the patient an antibody, a nucleic acid, or a polypeptide that inhibits the cancer-associated gene activity. In some embodiments the antibody is a neutralizing antibody. In some embodiments the antibody is a monoclonal antibody. In some embodiments the monoclonal antibody binds to an cancer-associated polypeptide with an affinity of at least 1×10⁸Ka. In some embodiments the monoclonal antibody inhibits one or more of cancer cell growth, tumor formation, cell survival and cancer cell proliferation. In some embodiments the antibody is a monoclonal antibody, a polyclonal antibody, a chimeric antibody, a human antibody, a humanized antibody, a single-chain antibody, a bi-specific antibody, a multi-specific antibody, or a Fab fragment.

[0063] The invention also provides methods of treating a cancer in a patient characterized by overexpression of a cancer-associated gene relative to a control. In some embodiments the methods comprise modulating a cancer-associated gene activity in the patient. In some embodiments the cancer-associated gene activity is selected from the group consisting of cell proliferation, cell growth, cell motility, metastasis, cell migration, cell survival, gene expression and tumorigenicity. In some embodiments the cancer is selected from the group consisting of carcinoma, breast cancer, lymphoma and leukemia. In some embodiments the methods comprise administering to the patient an antibody, a nucleic acid, or a polypeptide that inhibits the cancer-associated gene activity.

[0064] The present invention also provides methods for identifying a patient as susceptible to treatment with an antibody that binds to an expression product of a gene selected from the group consisting of ABCB9, AD026, ADSSL1, ANP32A, ANXA3, ARF3, ARHGEF1, ARID1B, ARMC1, ARPC2, ATP2B4, ATP8B4, BCL11B, BCL2L1, BLK, BLM, BLR1, BRAF, BRPF3, BTNL2, C10orf45, C13orf18, C13orf24, C14orf4, C1orf4l, C1orf9, C20Orf174, C2orf11, C6orf190, C6orf32, C9orf5, CACNA1D, CACNA1E, CALM2, CCND2, CCRN4L, CD28, CD38, CD3Z, CFTR, CHD7, CHDH, CHIC2, CLEC2D, CLIC1, CNR2, CNTN2, COL19A1, CPNE4, CR1, CREG1, CTSL, CXCR4, CYB5, DAD1, DDR2, DKFZP564J047, DKKL1, DLST, DMBT1, DNAJC6, DNMT3A, DPT, DYM, EGR2, EIF4G3, ENAH, ETV1, F2RL2, F5, FAS, FBN2, FCGR2B, FGF10, FGFR3, FLJ10996, FLJ11155, FLJ14075, FLJ20604, FLJ22800, FLJ23235, FLJ40873, FLJ46156, FNBP1, FOXD3, FZD10, GALNAC4S-6ST, GFI1, GGTA1, GSCL, GSH-2, HAAO, HIVEP3, HMGA1, ICOS, IGF1R, IGF2, IL12A, IL7R, IRF2, ITK, ITPR1, JAK1, JARID2, JDP2, KCNH5, KIAA0261, KIAA0350, KIAA0427, KIAA1040, LCK, LFNG, LMO2, LMO7, LOC145814, LOC340075, LOC401548, LOC64744, LPP, LRFN3, LTB, MAP2K5, MAP3K8, MARLIN1, MATN2, MBNL1, MCM3AP, MCM5, MCOLN3, MED12L, MGC45474, MHC2TA, MR1, MSCP, NCF4, NEDD4L, NEDD9, NEU1, NFKBIZ, NR3C1, NTRK3, OASL, PAP, PDCD1LG2, PDGFRA, PIGM, PPP3CC, PRDMl 1, PRIM2A, PRKCH, PSMB1, PSMB9, PTP4A2, PTPRK, RAC2, RA117, RAMP, RGC32, RNASE1, RNPC1, RORC, RREB1, RUNX3, SEC5L1, SELL, SEPT9, SH3MD1, SIAT7C, SLC12A7, SLC1A2, SLC28A2, SLC39A10, SLC41A1, SLCO3A1, SLPI, SOS1, SOX11, SPATA13, SPATA3, SRC, TFEB, THADA, THRB, THSD2, TLE3, TMEFF2, TNFRSF8, TNFSF11, TNFSF8, TNN, TP53I11, TTC15, UBASH3A, USP25, UTS2, VIL2, WDFY1, WNT10B, WNT6, WRNIP1, ZNF31, ZNF608, and ZSCAN2, comprising measuring the level of the expression product of the gene in a biological sample from that patient.

[0065] The invention also provides compositions for treating, diagnosing or detecting cancer. In some embodiments the compositions comprise an antibody or oligonucleotide specific for an expression product of a gene selected from the group consisting of ABCB9, AD026, ADSSL1, ANP32A, ANXA3, ARF3, ARHGEF1, ARID1B, ARMC1, ARPC2, ATP2B4, ATP8B4, BCL11B, BCL2L1, BLK, BLM, BLR1, BRAF, BRPF3, BTNL2, C10orf45, C13orf18, C13orf24, C14orf4, C1orf41, C1orf9, C20Orf174, C2orf11, C6orf190, C6orf32, C9orf5, CACNA1D, CACNA1E, CALM2, CCND2, CCRN4L, CD28, CD38, CD3Z, CFTR, CHD7, CHDH, CHIC2, CLEC2D, CLIC1, CNR2, CNTN2, COL19A1, CPNE4, CR1, CREG1, CTSL, CXCR4, CYB5, DAD1, DDR2, DKFZP564J047, DKKL1, DLST, DMBT1, DNAJC6, DNMT3A, DPT, DYM, EGR2, EIF4G3, ENAH, ETV1, F2RL2, F5, FAS, FBN2, FCGR2B, FGF10, FGFR3, FLJ10996, FLJ11155, FLJ14075, FLJ20604, FLJ22800, FLJ23235, FLJ40873, FLJ46156, FNBP1, FOXD3, FZD10, GALNAC4S-6ST, GFI1, GGTA1, GSCL, GSH-2, HAAO, HIVEP3, HMGA1, ICOS, IGF1R, IGF2, IL12A, IL7R, IRF2, ITK, ITPR1, JAK1, JARID2, JDP2, KCNH5, KIAA0261, KIAA0350, KIAA0427, KIAA1040, LCK, LFNG, LMO2, LMO7, LOC145814, LOC340075, LOC401548, LOC64744, LPP, LRFN3, LTB, MAP2K5, MAP3K8, MARLIN1, MATN2, MBNL1, MCM3AP, MCM5, MCOLN3, MED12L, MGC45474, MHC2TA, MR1, MSCP, NCF4, NEDD4L, NEDD9, NEU1, NFKBIZ, NR3C1, NTRK3, OASL, PAP, PDCD1LG2, PDGFRA, PIGM, PPP3CC, PRDM11, PRIM2A, PRKCH, PSMB1, PSMB9, PTP4A2, PTPRK, RAC2, RAI17, RAMP, RGC32, RNASE1, RNPC1, RORC, RREB1, RUNX3, SEC5L1, SELL, SEPT9, SH3MD1, SIAT7C, SLC12A7, SLC1A2, SLC28A2, SLC39A10, SLC41A1, SLCO3A1, SLPI, SOS1, SOX11, SPATA13, SPATA3, SRC, TFEB, THADA, THRB, THSD2, TLE3, TMEFF2, TNFRSF8, TNFSF11, TNFSF8, TNN, TP53I11, TTC15, UBASH3A, USP25, UTS2, VIL2, WDFY1, WNT10B, WNT6, WRNIP1, ZNF31, ZNF608, and ZSCAN2. In some embodiments the compositions further comprise a conventional cancer medicament. In some embodiments the compositions are pharmaceutical compositions. In some embodiments the compositions are sterile injectables.

[0066] The invention further provides assays for identifying a candidate agent that modulates the growth of a cancerous cell, comprising a) detecting the level of expression of one or more (i.e. 1, 2, 3, 4, 5, 6, 7, 8, 9, 10, or more) expression product of a cancer-associated gene as listed in any of the above-described embodiments of the invention in the presence of the candidate agent; and b) comparing that level of expression with the level of expression in the absence of the candidate agent, wherein a difference in expression indicates that the candidate agent modulates the level of expression of the expression product of the cancer-associated gene.

[0067] The invention also provides methods for identifying an agent that modifies the expression level of a cancer-associated gene, comprising: a) contacting a cell expressing a cancer-associated gene as listed in any of the above-described embodiments of the invention with a candidate agent, and b) determining the effect of the candidate agent on the cell, wherein a change in expression level indicates that the candidate agent is able to modulate expression.

[0068] In some embodiments the candidate agent is a polynucleotide, a polypeptide, an antibody or a small organic molecule.

[0069] The invention also provides methods for detecting breast cancer in a biological sample comprising determining the sequence or expression level of one or more of a cancer-associated gene of the present invention which are correlated to breast cancer.

[0070] The invention also provides methods for detecting lymphoid cancer in a biological sample comprising determining the sequence or expression level of one or more of a cancer-associated gene of the present invention which are correlated to lymphoid cancer.

[0071] The invention also provides methods for detecting leukemia in a biological sample comprising determining the sequence or expression level of one or more of a cancer-associated gene of the present invention which are correlated to leukemia.

Definitions

[0072] The present invention identifies genes which are related to cancer (e.g. “cancer-associated genes”). Thus, polypeptides encoded by these genes are referred to as “cancer-associated polypeptides” or “cancer-associated proteins”. Nucleic acid sequences that encode these cancer-associated polypeptides are referred to as “cancer-associated polynucleotides”. Cells which encode and/or express a cancer-associated gene are referred to as “cancer-associated cells”. Cells which encode a cancer-associated gene are said to have a “cancer-associated genotype”. Cells which express a cancer-associated protein are said to have a “cancer-associated phenotype”. “Cancer-associated sequences” refers to both polypeptide and polynucleotide sequences derived from cancer-associated genes. “Cancer-associated nucleic acids” includes the DNA comprising the cancer-associated gene, as well as mRNA and cDNA derived from that gene.

[0073] “Associated” in this context means that the nucleotide or protein sequences are either differentially expressed, activated, inactivated or altered in cancers as compared to normal tissue. As outlined below, cancer-associated sequences include those that are up-regulated (i.e. expressed at a higher level), as well as those that are down-regulated (i.e. expressed at a lower level), in cancers. Cancer-associated sequences also include sequences that have been altered (i.e., truncated sequences or sequences with substitutions, deletions or insertions, including point mutations) and show either the same expression profile or an altered profile. Generally, the cancer-associated sequences are from humans; however, as will be appreciated by those in the art, cancer-associated sequences from other organisms may be useful in animal models of disease and drug evaluation; thus, other cancer-associated sequences may be identified, from vertebrates, including mammals, including rodents (rats, mice, hamsters, guinea pigs, etc.), primates, and farm animals (including sheep, goats, pigs, cows, horses, etc). In some cases, prokaryotic cancer-associated sequences may be useful. Cancer-associated sequences from other organisms may be obtained using the techniques outlined below.

[0074] Cancer-associated sequences include recombinant nucleic acids. By the term “recombinant nucleic acid” herein is meant nucleic acid, originally formed in vitro, in general, by the manipulation of nucleic acid by polymerases and endonucleases, in a form not normally found in nature. Thus a recombinant nucleic acid is also an isolated nucleic acid, in a linear form, or cloned in a vector formed in vitro by ligating DNA molecules that are not normally joined, are both considered recombinant for the purposes of this invention. It is understood that once a recombinant nucleic acid is made and reintroduced into a host cell or organism, it will replicate using the in vivo cellular machinery of the host cell rather than in vitro manipulations; however, such nucleic acids, once produced recombinantly, although subsequently replicated in vivo, are still considered recombinant or isolated for the purposes of the invention. As used herein a “polynucleotide” or “nucleic acid” is a polymeric form of nucleotides of any length, either ribonucleotides or deoxyribonucleotides. This term refers only to the primary structure of the molecule. Thus, this term includes double- and single-stranded DNA and RNA. It also includes known types of modifications, for example, labels which are known in the art, methylation, “caps”, substitution of one or more of the naturally occurring nucleotides with an analog, internucleotide modifications such as, for example, those with uncharged linkages (e.g., phosphorothioates, phosphorodithioates, etc.), those containing pendant moieties, such as, for example proteins (including e.g., nucleases, toxins, antibodies, signal peptides, poly-L-lysine, etc.), those with intercalators (e.g., acridine, psoralen, etc.), those containing chelators (e.g., metals, radioactive metals, etc.), those containing alkylators, those with modified linkages (e.g., alpha anomeric nucleic acids, etc.), as well as unmodified forms of the polynucleotide.

[0075] As used herein, a polynucleotide “derived from” a designated sequence refers to a polynucleotide sequence which is comprised of a sequence of approximately at least about 6 nucleotides, at least about 8 nucleotides, at least about 10-12 nucleotides, and at least about 15-20 nucleotides corresponding to a region of the designated nucleotide sequence. “Corresponding” means homologous to or complementary to the designated sequence. In some embodiments, the sequence of the region from which the polynucleotide is derived is homologous to or complementary to a sequence that is unique to a cancer-associated gene.

[0076] A “recombinant protein” is a protein made using recombinant techniques, i.e. through the expression of a recombinant nucleic acid as depicted above. A recombinant protein is distinguished from naturally occurring protein by at least one or more characteristics. For example, the protein may be isolated or purified away from some or all of the proteins and compounds with which it is normally associated in its wild type host, and thus may be substantially pure. For example, an isolated protein is unaccompanied by at least some of the material with which it is normally associated in its natural state, constituting at least about 0.5%, or at least about 5% by weight of the total protein in a given sample. A substantially pure protein comprises about 50-75%, at least about 80%, or at least about 90% by weight of the total protein. The definition includes the production of a cancer-associated protein from one organism in a different organism or host cell. Alternatively, the protein may be made at a significantly higher concentration than is normally seen, through the use of an inducible promoter or high expression promoter, such that the protein is made at increased concentration levels. Alternatively, the protein may be in a form not normally found in nature, as in the addition of an epitope tag or amino acid substitutions, insertions and deletions, as discussed below.

[0077] As used herein, the term “tag,” “sequence tag” or “primer tag sequence” refers to an oligonucleotide with specific nucleic acid sequence that serves to identify a batch of polynucleotides bearing such tags therein. Polynucleotides from the same biological source are covalently tagged with a specific sequence tag so that in subsequent analysis the polynucleotide can be identified according to its source of origin. The sequence tags also serve as primers for nucleic acid amplification reactions.

[0078] A “microarray” is a linear or two-dimensional array of preferably discrete regions, each having a defined area, formed on the surface of a solid support. The density of the discrete regions on a microarray is determined by the total numbers of target polynucleotides to be detected on the surface of a single solid phase support, preferably at least about 50/cm², more preferably at least about 100/cm², even more preferably at least about 500/cm², and still more preferably at least about 1,000/cm². As used herein, a DNA microarray is an array of oligonucleotide primers placed on a chip or other surfaces used to amplify or clone target polynucleotides. Since the position of each particular group of primers in the array is known, the identities of the target polynucleotides can be determined based on their binding to a particular position in the microarray.

[0079] A “linker” is a synthetic oligodeoxyribonucleotide that contains a restriction site. A linker may be blunt end-ligated onto the ends of DNA fragments to create restriction sites that can be used in the subsequent cloning of the fragment into a vector molecule.

[0080] The term “label” refers to a composition capable of producing a detectable signal indicative of the presence of the target polynucleotide in an assay sample. Suitable labels include radioisotopes, nucleotide chromophores, enzymes, substrates, fluorescent molecules, chemiluminescent moieties, magnetic particles, bioluminescent moieties, and the like. As such, a label is any composition detectable by spectroscopic, photochemical, biochemical, immunochemical, electrical, optical, chemical, or any other appropriate means. The term “label” is used to refer to any chemical group or moiety having a detectable physical property or any compound capable of causing a chemical group or moiety to exhibit a detectable physical property, such as an enzyme that catalyzes conversion of a substrate into a detectable product. The term “label” also encompasses compounds that inhibit the expression of a particular physical property. The label may also be a compound that is a member of a binding pair, the other member of which bears a detectable physical property.

[0081] The term “support” refers to conventional supports such as beads, particles, dipsticks, fibers, filters, membranes, and silane or silicate supports such as glass slides.

[0082] The term “amplify” is used in the broad sense to mean creating an amplification product which may include, for example, additional target molecules, or target-like molecules or molecules complementary to the target molecule, which molecules are created by virtue of the presence of the target molecule in the sample. In the situation where the target is a nucleic acid, an amplification product can be made enzymatically with DNA or RNA polymerases or reverse transcriptases.

[0083] As used herein, a “biological sample” refers to a sample of tissue or fluid isolated from an individual, including but not limited to, for example, blood, plasma, serum, spinal fluid, lymph fluid, skin, respiratory, intestinal and genitourinary tracts, tears, saliva, milk, cells (including but not limited to blood cells), tumors, organs, and also samples of in vitro cell culture constituents.

[0084] The term “biological sources” as used herein refers to the sources from which the target polynucleotides are derived. The source can be of any form of “sample” as described above, including but not limited to, cell, tissue or fluid. “Different biological sources” can refer to different cells/tissues/organs of the same individual, or cells/tissues/organs from different individuals of the same species, or cells/tissues/organs from different species.

Cancer-associated Genes

[0085] Cancer-associated genes of the present invention are set forth below. The listings provide gene name, gene description, and accession numbers.

| Gene | Accession Number; Gene Description |
|---|---|
| ABCB9 | NM_019624; NM_019625; ATP-binding cassette, sub-family B |
| | (MDR/TAP), member 9 |
| AD026; also | NM_004706; 9138; “ARHGEF1” Rho guanine nucleotide exchange |
| known as | factor 1, transcript variant 2 |
| ADORA3 | |
| ADSSL1 | NM_152328; NM_199165; adenylosuccinate synthase like 1 |
| ANP32A | NM_006305; acidic (leucine-rich) nuclear phosphoprotein 32 family, |
| | member A |
| ANXA3 | NM_005139; annexin A3 |
| ARF3 | NM_001659; ADP-ribosylation factor 3 |
| ARHGEF1 | NM_004706; Rho guanine nucleotide exchange factor (GEF) 1 |
| ARID1B | NM_017519; AT rich interactive domain 1B (SWI1-like) |
| ARMC1 | NM_018120; armadillo repeat containing 1 |
| ARPC2 | NM_152862; NM_005731; NM_005731; actin related protein 2/3 |
| | complex, subunit 2, 34 kDa |
| ATP2B4 | NM_001684; NM_001001396; ATPase, Ca++ transporting, plasma |
| | membrane 4 |
| ATP8B4 | NM_024837; ATPase, Class I, type 8B, member 4 |
| BCL11B | NM_022898; B-cell CLL/lymphoma 11B (zinc finger protein) |
| BCL2L1 | NM_138578; BCL2-like 1 |
| BLK | NM_001715; B lymphoid tyrosine kinase |
| BLM | NM_000057; Bloom syndrome |
| BLR1 | NM_001716; Burkitt lymphoma receptor 1, GTP binding protein |
| | (chemokine (C—X—C motif) receptor 5) |
| BRAF | NM_004333; v-raf murine sarcoma viral oncogene homolog B1 |
| BRPF3 | XM_166450; bromodomain and PHD finger containing, 3 |
| BTNL2 | NM_019602; butyrophilin-like 2 (MHC class II associated) |
| C10orf45; also | NM_031453; chromosome 10 open reading frame 45 |
| known as | |
| FAM107B | |
| C13orf18 | NM_025113; chromosome 13 open reading frame 18. |
| C13orf24 | NM_006346; chromosome 13 open reading frame 24 |
| C14orf4 | NM_024496; chromosome 14 open reading frame 4 |
| C1orf41 | NM_016126; chromosome 1 open reading frame 41 |
| C1orf9 | NM_016227; chromosome 1 open reading frame 9 |
| C20orf174 | XM_066058; chromosome 20 open reading frame 174 |
| C2orf11 | NM_144629; chromosome 2 open reading frame 11 |
| C6orf190 | XM_376535; chromosome 6 open reading frame 190 |
| C6orf32 | NM_015864; chromosome 6 open reading frame 32 |
| C9orf5 | NM_032012; chromosome 9 open reading frame 5 |
| CACNA1D | NM_000720; calcium channel, voltage-dependent, L type, alpha 1D |
| | subunit |
| CACNA1E | NM_000721; calcium channel, voltage-dependent, alpha 1E subunit |
| CALM2 | NM_001743; calmodulin 2 (phosphorylase kinase, delta) |
| CCND2 | NM_001759; cyclin D2 |
| CCRN4L | NM_012118; CCR4 carbon catabolite repression 4-like (S. cerevisiae) |
| CD28 | NM_006139; CD28 antigen (Tp44) |
| CD38 | NM_001775; CD38 antigen (p45) |
| CD3Z | NM_000734; CD3Z antigen, zeta polypeptide (TiT3 complex) |
| CFTR | NM_000492; cystic fibrosis transmembrane conductance regulator, |
| | ATP-binding cassette (sub-family C, member 7) |
| CHD7 | NM_024300; coiled-coil-helix-coiled-coil-helix domain containing 7 |
| CHDH | NM_018397; choline dehydrogenase |
| CHIC2 | NM_012110; cysteine-rich hydrophobic domain 2 |
| CLEC2D | NM_027562; NM_001004419; NM_013269; NM_001004420; C-type |
| | lectin superfamily 2, member D |
| CLIC1 | NM_001288; chloride intracellular channel 1 |
| CNR2 | NM_001841; cannabinoid receptor 2 (macrophage) |
| CNTN2 | NM_005076; contactin 2 (axonal) |
| COL19A1 | NM_001858; collagen, type XIX, alpha 1 |
| CPNE4 | NM_130808; copine IV |
| CR1 | NM_000573; complement component (3b/4b) receptor 1, including |
| | Knops blood group system |
| CREG1 | NM_003851; cellular repressor of E1A-stimulated genes 1 |
| CTSL | NM_001912; NM_145918; cathepsin L |
| CXCR4 | NM_003467; chemokine (C—X—C motif) receptor 4 |
| CYB5 | NM_148923; cytochrome b-5 |
| DAD1 | NM_001344; defender against cell death 1 |
| DDR2 | NM_006182; discoidin domain receptor family, member 2 |
| KFZP564J047 | NM_032126; hypothetical protein DKFZp564J047 |
| DKKL1 | NM_014419; dickkopf-like 1 (soggy) |
| DLST | NM_001933; dihydrolipoamide S-succinyltransferase (E2 component of |
| | 2-oxo-glutarate complex) |
| DMBT1 | NM_007769; NM_004406; NM_007329; NM_017579; deleted in |
| | malignant brain tumors 1 |
| DNAJC6 | NM_014787; DnaJ (Hsp40) homolog, subfamily C, member 6 |
| DNMT3A | NM_022552; DNA (cytosine-5-)-methyltransferase 3 alpha |
| DPT | NM_001937; dermatopontin |
| DYM | NM_017653; dymeclin |
| EGR2 | NM_000399; early growth response 2 (Krox-20 homolog, Drosophila) |
| EIF4G3 | NM_003760; eukaryotic translation initiation factor 4 gamma, 3 |
| ENAH | NM_001008493; NM_018212; enabled homolog (Drosophila) |
| ETV1 | NM_004956; ets variant gene 1 |
| F2RL2 | NM_004101; coagulation factor II (thrombin) receptor-like 2 |
| F5 | NM_000130; coagulation factor V (proaccelerin, labile factor) |
| FAS | NM_152871; NM_152877; NM_152873; NM_000043; Fas (TNF |
| | receptor superfamily member) |
| FBN2 | NM_001999; fibrillin 2 (congenital contractural arachnodactyly) |
| FCGR2B | NM_001002275; Fc fragment of IgG, low affinity IIb, receptor for |
| | (CD32) |
| FGF10 | NM_004465; fibroblast growth factor 10 |
| FGFR3 | NM_022965; NM_000142; NM_022965; fibroblast growth factor |
| | receptor 3 (achondroplasia, thanatophoric dwarfism) |
| FLJ10996 | NM_019044; NM_031447; hypothetical protein FLJ10996 |
| FLJ11155 | NM_018342; hypothetical protein FLJ11155 |
| FLJ14075; also | NM_024894; hypothetical protein FLJ14075 |
| known as NOL10 | |
| FLJ20604; also | NM_017897; hypothetical protein FLJ20604 |
| known as OXSM | |
| FLJ22800; also | NM_024795; hypothetical protein FLJ22800 |
| known as | |
| TM4SF20 | |
| FLJ23235 | NM_024943; hypothetical protein FLJ23235 |
| FLJ40873 | NM_152665; hypothetical protein FLJ40873 |
| FLJ46156 | NM_198499; FLJ46156 protein |
| FNBP1 | XM_052666; formin binding protein 1 |
| FOXD3 | NM_012183; forkhead box D3 |
| FZD10 | NM_007197; frizzled homolog 10 (Drosophila) |
| GALNAC4S-6ST | NM_015892; NM_029935; NM_015892; B cell RAG associated protein |
| GFI1 | NM_004188; GFI1B growth factor independent 1B (potential |
| | regulator of CDKN1A, translocated in CML) |
| GGTA1 | NG_001125; glycoprotein, alpha-galactosyltransferase 1 |
| GSCL | NM_005315; goosecoid-like |
| GSH-2 | NM_133267; homeobox protein GSH-2 |
| HAAO | NM_012205; 3-hydroxyanthranilate 3,4-dioxygenase |
| HIVEP3 | NM_024503; human immunodeficiency virus type I enhancer binding |
| | protein 3 |
| HMGA1 | NM_002131; NM_145899; NM_145904; high mobility group AT-hook 1 |
| ICOS | NM_012092; inducible T-cell co-stimulator |
| IGF1R | NM_000875; NM_015883; insulin-like growth factor 1 receptor |
| IGF2 | NM_000612; insulin-like growth factor 2 (somatomedin A) |
| IL12A | NM_000882; interleukin 12A (natural killer cell stimulatory factor 1, |
| | cytotoxic lymphocyte maturation factor 1, p35) |
| IL7R | NM_002185; interleukin 7 receptor |
| IRF2 | NM_002199; interferon regulatory factor 2 |
| ITK | NM_005546; IL2-inducible T-cell kinase |
| ITPR1 | NM_002222; inositol 1,4,5-triphosphate receptor, type 1 |
| JAK1 | NM_002227; Janus kinase 1 (a protein tyrosine kinase) |
| JARID2 | NM_004973; Jumonji, AT rich interactive domain 2 |
| JDP2 | NM_130469; jun dimerization protein 2 |
| KCNH5 | NM_172376; NM_139318; potassium voltage-gated channel, subfamily |
| | H (eag-related), member 5 |
| KIAA0261 | NM_015045; XM_290471; |
| KIAA0350 | NM_015226; KIAA0350 protein |
| KIAA0427 | XM_375538; KIAA0427 |
| KIAA1040 | XM_051091; IAA1040 protein |
| LCK | NM_005356; lymphocyte-specific protein tyrosine kinase |
| LFNG | XM_496845; lunatic fringe homolog (Drosophila) |
| LMO2 | NM_005574; LIM domain only 2 (rhombotin-like 1) |
| LMO7 | NM_005358; LIM domain 7 |
| LOC64744; also | NM_022733; hypothetical protein AL133206 |
| known as | |
| SMAP1L | |
| LPP | NM_005578; LIM domain containing preferred translocation partner in |
| | lipoma |
| LRFN3 | NM_024509; leucine rich repeat and fibronectin type III domain |
| | containing 3 |
| LTB | NM_002341; NM_009588; lymphotoxin beta (TNF superfamily, |
| | member 3) |
| MAP2K5 | NM_145160; NM_002757; mitogen-activated protein kinase kinase 5 |
| MAP3K8 | NM_005204; mitogen-activated protein kinase kinase kinase 8 |
| MARLIN1 | NM_144720; multiple coiled-coil GABABR1-binding protein |
| MATN2 | NM_030583; matrilin 2 |
| MBNL1 | NM_207297; NM_207292; MBNL1 muscleblind-like (Drosophila) |
| MCM3AP | NM_003906; MCM3 minichromosome maintenance deficient 3 (S. cerevisiae) |
| | associated protein |
| MCM5 | NM_006739; minichromosome maintenance deficient 5, cell division |
| | cycle 46 (S. cerevisiae) |
| MCOLN3 | NM_018298; mucolipin 3 |
| MED12L | NM_053002; mediator of RNA polymerase II transcription, subunit 12 |
| | homolog (yeast)-like |
| MGC45474; also | NM_152369; hypothetical protein MGC45474 |
| known as | |
| SLC44A3 | |
| MHC2TA; also | NM_000246; MHC class II transactivator |
| known as CIITA | |
| MR1 | NM_001531; major histocompatibility complex, class I-related |
| MSCP; also | NM_016612; mitochondrial solute carrier protein |
| known as | |
| SLC25A37 | |
| NCF4 | NM_013416; NM_000631; neutrophil cytosolic factor 4, 40 kDa |
| NEDD4L | NM_015277; Homo sapiens neural precursor cell expressed, |
| | developmentally down-regulated 4-like |
| NEDD9 | NM_006403; neural precursor cell expressed, developmentally down- |
| | regulated 9 |
| NEU1 | NM_000434; sialidase 1 (lysosomal sialidase) |
| NFKBIZ | NM_031419; nuclear factor of kappa light polypeptide gene enhancer in |
| | B-cells inhibitor, zeta |
| NR3C1 | NM_000176; nuclear receptor subfamily 3, group C, member 1 |
| | (glucocorticoid receptor) |
| NTRK3 | NM_001007155; NM_001007156; neurotrophic tyrosine kinase, |
| | receptor, type 3 |
| OASL | NM_003733; 2′-5′-oligoadenylate synthetase-like |
| PAP; also known | NM_002580; pancreatitis-associated protein |
| as REG3A | |
| PDCD1LG2 | NM_025239; programmed cell death 1 ligand 2 |
| PDGFRA | NM_006206; platelet-derived growth factor receptor, alpha polypeptide |
| PIGM | NM_145167; phosphatidylinositol glycan, class M |
| PPP3CC | NM_005605; protein phosphatase 3 (formerly 2B), catalytic subunit, |
| | gamma isoform (calcineurin A gamma) |
| PRDM11 | NM_020229; PR domain containing 11 |
| PRIM2A | NM_000947; primase, polypeptide 2A, 58 kDa |
| PRKCH | NM_006255; protein kinase C, eta |
| PSMB1 | NM_002793; proteasome (prosome, macropain) subunit, beta type, 1 |
| PSMB9 | NM_002800; proteasome (prosome, macropain) subunit, beta type, 9 |
| | (large multifunctional protease 2) |
| PTP4A2 | NM_003479; protein tyrosine phosphate type IVA, member 2 |
| PTPRK | NM_002844; protein tyrosine phosphatase, receptor type, K |
| RAC2 | NM_002872; ras-related C3 botulinum toxin substrate 2 (rho family, |
| | small GTP binding protein Rac2) |
| RAI17 | NM_020338; retinoic acid induced 17 |
| RAMP | NM_016448; RA-regulated nuclear matrix-associated protein |
| RGC32 | NM_014059; response gene to complement 32 |
| RNASE1 | NM_002933; NM_198235; RNASE1 ribonuclease, RNase A family, 1 |
| | (pancreatic) |
| RNPC1 | NM_017495;; NM_183425; Homo sapiens RNA-binding region (RNP1, |
| | RRM) containing 1, transcript variant |
| RORC | NM_005060; RAR-related orphan receptor C |
| RREB1 | NM_001003698; ras responsive element binding protein 1 |
| RUNX3 | NM_004350; runt-related transcription factor 3 |
| SEC5L1; also | NM_018303; SEC5-like 1 (S. cerevisiae) |
| known as EXOC2 | |
| SELL | NM_000655; selectin L (lymphocyte adhesion molecule 1) |
| SEPT9 | NM_006640; septin 9 |
| SH3MD1 | XM_374831; NM_014631; SH3 multiple domains 1 |
| SIAT7C | NM_152996; sialyltransferase 7 ((alpha-N-acetylneuraminyl-2,3-beta- |
| | galactosyl-1,3)-N-acetyl galactosaminide alpha-2,6-sialyltransferase) C |
| SLC12A7 | NM_006598; solute carrier family 12 (potassium/chloride transporters), |
| | member 7 |
| SLC1A2 | NM_004171; solute carrier family 1 (glial high affinity glutamate |
| | transporter), member 2 |
| SLC28A2 | NM_004212; solute carrier family 28 (sodium-coupled nucleoside |
| | transporter), member 2 |
| SLC39A10 | XM_047707; solute carrier family 39 (zinc transporter), member 10 |
| SLC41A1 | NM_173854; solute carrier family 41, member 1 |
| SLCO3A1 | NM_013272; solute carrier organic anion transporter family, member |
| | 3A1 |
| SLPI | NM_003064; secretory leukocyte protease inhibitor |
| | (antileukoproteinase) |
| SOS1 | NM_005633; son of sevenless homolog 1 (Drosophila) |
| SOX11 | NM_003108; SRY (sex determining region Y)-box 11 |
| SPATA13 | NM_153023; spermatogenesis associated 13 |
| SPATA3 | NM_139073; spermatogenesis associated 3 |
| SRC | NM_005417; v-src sarcoma (Schmidt-Ruppin A-2) viral oncogene |
| | homolog (avian) |
| TFEB | NM_007162; transcription factor EB |
| THADA | NM_022065; thyroid adenoma associated |
| THRB | NM_000461; thyroid hormone receptor, beta (erythroblastic leukemia |
| | viral (v-erb-a) oncogene homolog 2, avian) |
| THSD2 | NM_032784; Homo sapiens R-spondin 3 homolog (Xenopus laevis) |
| | (RSPO3) |
| TLE3 | NM_005078; transducin-like enhancer of split 3 (E(spl) homolog, |
| | Drosophila) |
| TMEFF2 | NM_016192; transmembrane protein with EGF-like and two follistatin- |
| | like domains 2 |
| TNFRSF8 | NM_001243; tumor necrosis factor receptor superfamily, member 8 |
| TNFSF11 | NM_033012; NM_003701; tumor necrosis factor (ligand) superfamily, |
| | member 11 |
| TNFSF8 | NM_001244; tumor necrosis factor (ligand) superfamily, member 8 |
| TNN | XM_040527; tenascin N |
| TP53I11 | NM_006034; tumor protein p53 inducible protein 11 |
| TTC15 | NM_016030; tetratricopeptide repeat domain 15 |
| UBASH3A | NM_018961; Homo sapiens ubiquitin associated and SH3 domain |
| | containing transcript variant 1 |
| USP25 | NM_013396; ubiquitin specific protease 25 |
| UTS2 | NM_021995; urotensin 2 |
| VIL2 | NM_003379; villin 2 (ezrin) |
| WDFY1 | NM_020830; Homo sapiens WD repeat and FYVE domain containing 1 |
| WNT10B | NM_003394; wingless-type MMTV integration site family, member 10B |
| WNT6 | NM_006522; wingless-type MMTV integration site family, member 6 |
| WRNIP1 | NM_020135; Werner helicase interacting protein 1 |
| ZNF31 | NM_145238; zinc finger protein 31 (KOX 29) |
| ZNF608 | NM_020747; XM_114432; XM_114432; zinc finger protein 608 |
| ZSCAN2 | NM_181877; Homo sapiens zinc finger and SCAN domain containing 2 |
| | transcript variant 1 |

[0086] The presence or absence of expression of one of these genes alone may be sufficient to cause cancer. Alternatively an increase or decrease in expression of one of these genes (whether the expression of the gene is increased or decreased in cancer is dependent, in some embodiments on the gene and the cancer type) may be sufficient to cause cancer. In a further alternative, cancer may be induced when the expression of one or more (i.e. 1, 2, 3, 4, 5, 6, 7, 8, 9, 10 or more) of these genes reaches or exceeds a threshold level. The threshold level may be represented as a percentage increase or decrease in expression of the gene when compared with that in a “normal” control level of expression.

[0087] In some embodiments, differential expression or amplification of the genes of the invention may be evaluated using an in vivo diagnostic assay, e.g. by administering a molecule (such as an antibody) which binds the molecule to be detected and is tagged with a detectable label (e.g. a radioactive isotope) and externally scanning the patient for localization of the label.

[0088] In some embodiments, genes or gene expression products are selected for targeting by comparison of the expression level of the gene or gene expression product in comparison with neighboring healthy tissue or with pooled normal tissue. In some embodiments there is at least a 3 fold (300%) increased expression relative to normal tissue and/or control. In some embodiments a 3 fold increase is seen in comparison with a majority of pooled, commercially available normal tissue samples. Screening can also be carried out using laser capture microscopy to dissect cancerous tissues from normal adjacent ones, followed by expressional microarray analysis utilizing standard commercially available chips such as the standard Affimetrix chip U133 (cat# 900370) (see for example, Yang et al, (2005) Oncogene, 10-31). In some embodiments, custom chips containing nucleic acid samples derived from pools of patient tissue samples grouped by cancer type can be made and probed to analyze expression profiles (see for example Makino et al, Dis Esophagus. 2005;18(1):37-40.).

[0089] The invention also allows the use of homologs, fragments, and functional equivalents of the above-referenced cancer-associated genes. Homology can be based on the full gene sequence referenced above and is generally determined as outlined below, using homology programs or hybridization conditions. A homolog of a cancer-associated gene has preferably greater than about 75% (i.e. at least 80, at least 85, at least 90, at least 92, at least 94, at least 95, at least 96, at least 97, at least 98, at least 99% or more) homology with the cancer-associated gene. Such homologs may include splice variants, deletion, addition and/or substitution mutants and generally have functional similarity.

[0090] Homology in this context means sequence similarity or identity. One comparison for homology purposes is to compare the sequence containing sequencing errors to the correct sequence. This homology will be determined using standard techniques known in the art, including, but not limited to, the local homology algorithm of Smith & Waterman, Adv. Appl. Math. 2:482 (1981), by the homology alignment algorithm of Needleman & Wunsch, J. Mol. Biol. 48:443 (1970), by the search for similarity method of Pearson & Lipman, PNAS USA 85:2444 (1988), by computerized implementations of these algorithms (GAP, BESTFIT, FASTA, and TFASTA in the Wisconsin Genetics Software Package, Genetics Computer Group, 575 Science Drive, Madison, Wiss.), the Best Fit sequence program described by Devereux et al., Nucl. Acid Res. 12:387-395 (1984), in some embodiments using the default settings, or by inspection.

[0091] One example of a useful algorithm is PILEUP. PILEUP creates a multiple sequence alignment from a group of related sequences using progressive, pairwise alignments. It can also plot a tree showing the clustering relationships used to create the alignment. PILEUP uses a simplification of the progressive alignment method of Feng & Doolittle, J. Mol. Evol. 35:351-360 (1987); the method is similar to that described by Higgins & Sharp CABIOS 5:151-153 (1989). Useful PILEUP parameters include a default gap weight of 3.00, a default gap length weight of 0.10, and weighted end gaps.

[0092] Another example of a useful algorithm is the BLAST (Basic Local Alignment Search Tool) algorithm, described in Altschul et al., J. Mol. Biol. 215, 403-410, (1990) and Karlin et al., PNAS USA 90:5873-5787 (1993). A particularly useful BLAST program is the WU-BLAST-2 program which was obtained from Altschul et al., Methods in Enzymology, 266: 460-480 (1996); http://blast.wustl.edu/]. WU-BLAST-2 uses several search parameters, most of which are set to the default values. The adjustable parameters are set with the following values: overlap span=1, overlap fraction=0.125, word threshold (T)=11. The HSP S and HSP S2 parameters are dynamic values and are established by the program itself depending upon the composition of the particular sequence and composition of the particular database against which the sequence of interest is being searched; however, the values may be adjusted to increase sensitivity. A percent amino acid sequence identity value is determined by the number of matching identical residues divided by the total number of residues of the “longer” sequence in the aligned region. The “longer” sequence is the one having the most actual residues in the aligned region (gaps introduced by WU-Blast-2 to maximize the alignment score are ignored).

[0093] The alignment may include the introduction of gaps in the sequences to be aligned. In addition, for sequences which contain either more or fewer nucleotides than those of the cancer-associated genes, it is understood that the percentage of homology will be determined based on the number of homologous nucleosides in relation to the total number of nucleosides. Thus homology of sequences shorter than those of the sequences identified herein will be determined using the number of nucleosides in the shorter sequence.

[0094] In some embodiments of the invention, polynucleotide compositions are provided that are capable of hybridizing under moderate to high stringency conditions to a polynucleotide sequence provided herein, or a fragment thereof, or a complementary sequence thereof. Hybridization techniques are well known in the art of molecular biology. For purposes of illustration, suitable moderately stringent conditions for testing the hybridization of a polynucleotide of this invention with other polynucleotides include prewashing in a solution of 5×SSC (“saline sodium citrate”; 9 mM NaCl, 0.9 mM sodium citrate), 0.5% SDS, 1.0 mM EDTA (pH 8.0); hybridizing at 50-60° C, 5×SSC, overnight; followed by washing twice at 65° C. for 20 minutes with each of 2x, 0.5× and 0.2×SSC containing 0.1% SDS. One skilled in the art will understand that the stringency of hybridization can be readily manipulated, such as by altering the salt content of the hybridization solution and/or the temperature at which the hybridization is performed. For example, in some embodiments, suitable highly stringent hybridization conditions include those described above, with the exception that the temperature of hybridization is increased, e.g., to 60-65° C., or 65-70° C. Stringent conditions may also be achieved with the addition of destabilizing agents such as formamide.

[0095] Thus nucleic acids that hybridize under high stringency to the nucleic acids identified throughout the present application and sequence listing, or their complements, are considered cancer-associated sequences. High stringency conditions are known in the art; see for example Maniatis et al., Molecular Cloning: A Laboratory Manual, 2nd Edition, 1989, and Short Protocols in Molecular Biology, ed. Ausubel, et al., both of which are hereby incorporated by reference. Stringent conditions are sequence-dependent and will be different in different circumstances. Longer sequences hybridize specifically at higher temperatures. An extensive guide to the hybridization of nucleic acids is found in Tijssen, Techniques in Biochemistry and Molecular Biology-Hybridization with Nucleic Acid Probes, “Overview of principles of hybridization and the strategy of nucleic acid assays” (1993). Generally, stringent conditions are selected to be about 5-10° C. lower than the thermal melting point (Tₘ) for the specific sequence at a defined ionic strength pH. The Tₘ is the temperature (under defined ionic strength, pH and nucleic acid concentration) at which 50% of the probes complementary to the target hybridize to the target sequence at equilibrium (as the target sequences are present in excess, at Tₘ, 50% of the probes are occupied at equilibrium). Stringent conditions will be those in which the salt concentration is less than about 1.0 M sodium ion, typically about 0.01 to 1.0 M sodium ion concentration (or other salts) at pH 7.0 to 8.3 and the temperature is at least about 30° C. for short probes (e.g. 10 to 50 nucleotides) and at least about 60° C. for longer probes (e.g. greater than 50 nucleotides). In another embodiment, less stringent hybridization conditions are used; for example, moderate or low stringency conditions may be used, as are known in the art; see Maniatis and Ausubel, supra, and Tijssen, supra.

Detection of Cancer-associated Gene Expression

[0096] The cancer-associated gene may be cloned and, if necessary, its constituent parts recombined to form the entire cancer-associated nucleic acid. Once isolated from its natural source, e.g., contained within a plasmid or other vector or excised therefrom as a linear nucleic acid segment, the recombinant cancer-associated nucleic acid can be further used as a probe to identify and isolate other cancer-associated nucleic acids, for example additional coding regions. It can also be used as a “precursor” nucleic acid to make modified or variant cancer-associated nucleic acids and proteins. The nucleotide sequence of the cancer-associated gene can also be used to design probes specific for the cancer-associated gene.

[0097] The cancer-associated nucleic acids may be used in several ways. Nucleic acid probes hybridizable to cancer-associated nucleic acids can be made and attached to biochips to be used in screening and diagnostic methods, or for gene therapy and/or antisense applications. Alternatively, the cancer-associated nucleic acids that include coding regions of cancer-associated proteins can be put into expression vectors for the expression of cancer-associated proteins, again either for screening purposes or for administration to a patient.

[0098] One such system for quantifying gene expression is kinetic polymerase chain reaction (PCR). Kinetic PCR allows for the simultaneous amplification and quantification of specific nucleic acid sequences. The specificity is derived from synthetic oligonucleotide primers designed to preferentially adhere to single-stranded nucleic acid sequences bracketing the target site. This pair of oligonucleotide primers forms specific, non-covalently bound complexes on each strand of the target sequence. These complexes facilitate in vitro transcription of double-stranded DNA in opposite orientations. Temperature cycling of the reaction mixture creates a continuous cycle of primer binding, transcription, and re-melting of the nucleic acid to individual strands. The result is an exponential increase of the target dsDNA product. This product can be quantified in real time either through the use of an intercalating dye or a sequence specific probe. SYBR® Greene I, is an example of an intercalating dye, that preferentially binds to dsDNA resulting in a concomitant increase in the fluorescent signal. Sequence specific probes, such as used with TaqMan® technology, consist of a fluorochrome and a quenching molecule covalently bound to opposite ends of an oligonucleotide. The probe is designed to selectively bind the target DNA sequence between the two primers. When the DNA strands are synthesized during the PCR reaction, the fluorochrome is cleaved from the probe by the exonuclease activity of the polymerase resulting in signal dequenching. The probe signaling method can be more specific than the intercalating dye method, but in each case, signal strength is proportional to the dsDNA product produced. Each type of quantification method can be used in multi-well liquid phase arrays with each well representing primers and/or probes specific to nucleic acid sequences of interest. When used with messenger RNA preparations of tissues or cell lines, an array of probe/primer reactions can simultaneously quantify the expression of multiple gene products of interest. See Germer, S., et al., Genome Res. 10:258-266 (2000); Heid, C. A., et al., Genome Res. 6, 986-994 (1996).

[0099] Recent developments in DNA microarray technology make it possible to conduct a large scale assay of a plurality of target cancer-associated nucleic acid molecules on a single solid phase support. U.S. Pat. No. 5,837,832 (Chee et al.) and related patent applications describe immobilizing an array of oligonucleotide probes for hybridization and detection of specific nucleic acid sequences in a sample. Target polynucleotides of interest isolated from a tissue of interest are hybridized to the DNA chip and the specific sequences detected based on the target polynucleotides' preference and degree of hybridization at discrete probe locations. One important use of arrays is in the analysis of differential gene expression, where the profile of expression of genes in different cells, often a cell of interest and a control cell, is compared and any differences in gene expression among the respective cells are identified. Such information is useful for the identification of the types of genes expressed in a particular cell or tissue type and diagnosis of cancer conditions based on the expression profile.

[0100] Typically, RNA from the sample of interest is subjected to reverse transcription to obtain labeled cDNA. See U.S. Pat. No. 6,410,229 (Lockhart et al.) The cDNA is then hybridized to oligonucleotides or cDNAs of known sequence arrayed on a chip or other surface in a known order. The location of the oligonucleotide to which the labeled cDNA hybridizes provides sequence information on the cDNA, while the amount of labeled hybridized RNA or cDNA provides an estimate of the relative representation of the RNA or cDNA of interest. See Schena, et al. Science 270:467-470 (1995). For example, use of a cDNA microarray to analyze gene expression patterns in human cancer is described by DeRisi, et al. (Nature Genetics 14:457-460 (1996)).

[0101] Nucleic acid probes corresponding to cancer-associated nucleic acids may be made. Typically, these probes are synthesized based on the disclosed cancer-associated genes. The nucleic acid probes attached to the biochip are designed to be substantially complementary to the cancer-associated nucleic acids, i.e. the target sequence (either the target sequence of the sample or to other probe sequences, for example in sandwich assays), such that specific hybridization of the target sequence and the probes of the present invention occurs. As outlined below, this complementarity need not be perfect, in that there may be any number of base pair mismatches that will interfere with hybridization between the target sequence and the single stranded nucleic acids of the present invention. It is expected that the overall homology of the genes at the nucleotide level will be about 40% or greater, about 60% or greater, or about 80% or greater; and in addition that there will be corresponding contiguous sequences of about 8-12 nucleotides or longer. However, if the number of mutations is so great that no hybridization can occur under even the least stringent of hybridization conditions, the sequence is not a complementary target sequence. Thus, by “substantially complementary” herein is meant that the probes are sufficiently complementary to the target sequences to hybridize under normal reaction conditions, particularly high stringency conditions, as outlined herein. Whether or not a sequence is unique to a cancer-associated gene according to this invention can be determined by techniques known to those of skill in the art. For example, the sequence can be compared to sequences in databanks, e.g., GeneBank, to determine whether it is present in the uninfected host or other organisms. The sequence can also be compared to the known sequences of other viral agents, including those that are known to induce cancer.

[0102] A nucleic acid probe is generally single stranded but can be partly single and partly double stranded. The strandedness of the probe is dictated by the structure, composition, and properties of the target sequence. In general, the oligonucleotide probes range from about 6, 8, 10, 12, 15, 20, 30 to about 100 bases long, from about 10 to about 80 bases, or from about 30 to about 50 bases. In some embodiments entire genes are used as probes. In some embodiments, much longer nucleic acids can be used, up to hundreds of bases. The probes are sufficiently specific to hybridize to complementary template sequence under conditions known by those of skill in the art. The number of mismatches between the probes sequences and their complementary template (target) sequences to which they hybridize during hybridization generally do not exceed 15%, 10% or 5%, as determined by FASTA (default settings).

[0103] Oligonucleotide probes can include the naturally-occurring heterocyclic bases normally found in nucleic acids (uracil, cytosine, thymine, adenine and guanine), as well as modified bases and base analogues. Any modified base or base analogue compatible with hybridization of the probe to a target sequence is useful in the practice of the invention. The sugar or glycoside portion of the probe can comprise deoxyribose, ribose, and/or modified forms of these sugars, such as, for example, 2′-O-alkyl ribose. In some embodiments, the sugar moiety is 2′-deoxyribose; however, any sugar moiety that is compatible with the ability of the probe to hybridize to a target sequence can be used.

[0104] The nucleoside units of the probe may be linked by a phosphodiester backbone, as is well known in the art. In some embodiments, internucleotide linkages can include any linkage known to one of skill in the art that is compatible with specific hybridization of the probe including, but not limited to phosphorothioate, methylphosphonate, sulfamate (e.g., U.S. Pat. No. 5,470,967) and polyamide (i.e., peptide nucleic acids). Peptide nucleic acids are described in Nielsen et al. (1991) Science 254: 1497-1500, U.S. Pat. No.5,714,331, and Nielsen (1999) Curr. Opin. Biotechnol. 10:71-75.

[0105] The probe can be a chimeric molecule; i.e., can comprise more than one type of base or sugar subunit, and/or the linkages can be of more than one type within the same primer. The probe can comprise a moiety to facilitate hybridization to its target sequence, as are known in the art, for example, intercalators and/or minor groove binders. Variations of the bases, sugars, and internucleoside backbone, as well as the presence of any pendant group on the probe, will be compatible with the ability of the probe to bind, in a sequence-specific fashion, with its target sequence. A large number of structural modifications, both known and to be developed, are possible within these bounds. Advantageously, the probes according to the present invention may have structural characteristics such that they allow the signal amplification, such structural characteristics being, for example, branched DNA probes as those described by Urdea et al. (Nucleic Acids Symp. Ser., 24:197-200 (1991)) or in the European Patent No. EP-0225,807. Moreover, synthetic methods for preparing the various heterocyclic bases, sugars, nucleosides and nucleotides that form the probe, and preparation of oligonucleotides of specific predetermined sequence, are well-developed and known in the art. A method for oligonucleotide synthesis incorporates the teaching of U.S. Pat. No. 5,419,966.

[0106] Multiple probes may be designed for a particular target nucleic acid to account for polymorphism and/or secondary structure in the target nucleic acid, redundancy of data and the like. In some embodiments, where more than one probe per sequence is used, either overlapping probes or probes to different sections of a single target cancer-associated gene are used. That is, two, three, four or more probes, with three being preferred, are used to build in a redundancy for a particular target. The probes can be overlapping (i.e. have some sequence in common), or specific for distinct sequences of a cancer-associated gene. When multiple target polynucleotides are to be detected according to the present invention, each probe or probe group corresponding to a particular target polynucleotide is situated in a discrete area of the microarray.

[0107] Probes may be in solution, such as in wells or on the surface of a micro-array, or attached to a solid support. Examples of solid support materials that can be used include a plastic, a ceramic, a metal, a resin, a gel and a membrane. Useful types of solid supports include plates, beads, magnetic material, microbeads, hybridization chips, membranes, crystals, ceramics and self-assembling monolayers. Some embodiments comprise a two-dimensional or three-dimensional matrix, such as a gel or hybridization chip with multiple probe binding sites (Pevzner et al., J. Biomol. Struc. & Dyn. 9:399-410, 1991; Maskos and Southern, Nuc. Acids Res. 20:1679-84, 1992). Hybridization chips can be used to construct very large probe arrays that are subsequently hybridized with a target nucleic acid. Analysis of the hybridization pattern of the chip can assist in the identification of the target nucleotide sequence. Patterns can be manually or computer analyzed, but it is clear that positional sequencing by hybridization lends itself to computer analysis and automation. Algorithms and software, which have been developed for sequence reconstruction, are applicable to the methods described herein (R. Drmanac et al., J. Biomol. Struc. & Dyn. 5:1085-1102, 1991; P. A. Pevzner, J. Biomol. Struc. & Dyn. 7:63-73, 1989).

[0108] As will be appreciated by those in the art, nucleic acids can be attached or immobilized to a solid support in a wide variety of ways. By “immobilized” herein is meant the association or binding between the nucleic acid probe and the solid support is sufficient to be stable under the conditions of binding, washing, analysis, and removal as outlined below. The binding can be covalent or non-covalent. By “non-covalent binding” and grammatical equivalents herein is meant one or more of electrostatic, hydrophilic, and hydrophobic interactions. Included in non-covalent binding is the covalent attachment of a molecule, such as streptavidin, to the support and the non-covalent binding of the biotinylated probe to the streptavidin. By “covalent binding” and grammatical equivalents herein is meant that the two moieties, the solid support and the probe, are attached by at least one bond, including sigma bonds, pi bonds and coordination bonds. Covalent bonds can be formed directly between the probe and the solid support or can be formed by a cross linker or by inclusion of a specific reactive group on either the solid support or the probe or both molecules. Immobilization may also involve a combination of covalent and non-covalent interactions.

[0109] Nucleic acid probes may be attached to the solid support by covalent binding such as by conjugation with a coupling agent or by, covalent or non-covalent binding such as electrostatic interactions, hydrogen bonds or antibody-antigen coupling, or by combinations thereof. Typical coupling agents include biotin/avidin, biotin/streptavidin, Staphylococcus aureus protein A/IgG antibody Fc fragment, and streptavidin/protein A chimeras (T. Sano and C. R. Cantor, Bio/Technology 9:1378-81 (1991)), or derivatives or combinations of these agents. Nucleic acids may be attached to the solid support by a photocleavable bond, an electrostatic bond, a disulfide bond, a peptide bond, a diester bond or a combination of these sorts of bonds. The array may also be attached to the solid support by a selectively releasable bond such as 4,4′-dimethoxytrityl or its derivative. Derivatives which have been found to be useful include 3 or 4 [bis-(4-methoxyphenyl)]-methyl-benzoic acid, N-succinimidyl-3 or 4 [bis-(4-methoxyphenyl)]-methyl-benzoic acid, N-succinimidyl-3 or 4 [bis-(4-methoxyphenyl)]-hydroxymethyl-benzoic acid, N-succinimidyl-3 or 4 [bis-(4-methoxyphenyl)]-chloromethyl-benzoic acid, and salts of these acids.

[0110] Probes may be attached to biochips in a wide variety of ways, as will be appreciated by those in the art. As described herein, the nucleic acids can either be synthesized first, with subsequent attachment to the biochip, or can be directly synthesized on the biochip.

[0111] Biochips comprise a suitable solid substrate. By “substrate” or “solid support” or other grammatical equivalents herein is meant any material that can be modified to contain discrete individual sites appropriate for the attachment or association of the nucleic acid probes and is amenable to at least one detection method. The solid phase support of the present invention can be of any solid materials and structures suitable for supporting nucleotide hybridization and synthesis. Preferably, the solid phase support comprises at least one substantially rigid surface on which the primers can be immobilized and the reverse transcriptase reaction performed. The substrates with which the polynucleotide microarray elements are stably associated may be fabricated from a variety of materials, including plastics, ceramics, metals, acrylamide, cellulose, nitrocellulose, glass, polystyrene, polyethylene vinyl acetate, polypropylene, polymethacrylate, polyethylene, polyethylene oxide, polysilicates, polycarbonates, Teflon®, fluorocarbons, nylon, silicon rubber, polyanhydrides, polyglycolic acid, polylactic acid, polyorthoesters, polypropylfumerate, collagen, glycosaminoglycans, and polyamino acids. Substrates may be two-dimensional or three-dimensional in form, such as gels, membranes, thin films, glasses, plates, cylinders, beads, magnetic beads, optical fibers, woven fibers, etc. One form of array is a three-dimensional array. One type of three-dimensional array is a collection of tagged beads. Each tagged bead has different primers attached to it. Tags are detectable by signaling means such as color (Luminex, Illumina) and electromagnetic field (Pharmaseq) and signals on tagged beads can even be remotely detected (e.g., using optical fibers). The size of the solid support can be any of the standard microarray sizes, useful for DNA microarray technology, and the size may be tailored to fit the particular machine being used to conduct a reaction of the invention. In general, the substrates allow optical detection and do not appreciably fluoresce.

[0112] The surface of the biochip and the probe may be derivatized with chemical functional groups for subsequent attachment of the two. Thus, for example, the biochip is derivatized with a chemical functional group including, but not limited to, amino groups, carboxy groups, oxo groups and thiol groups, with amino groups being particularly preferred. Using these functional groups, the probes can be attached using functional groups on the probes. For example, nucleic acids containing amino groups can be attached to surfaces comprising amino groups, for example using linkers as are known in the art; for example, homo- or hetero-bifunctional linkers as are well known (see 1994 Pierce Chemical Company catalog, technical section on cross-linkers, pages 155-200, incorporated herein by reference). In addition, in some cases, additional linkers, such as alkyl groups (including substituted and heteroalkyl groups) may be used.

[0113] The oligonucleotides may be synthesized as is known in the art, and then attached to the surface of the solid support. As will be appreciated by those skilled in the art, either the 5′ or 3′ terminus may be attached to the solid support, or attachment may be via an internal nucleoside. In an additional embodiment, the immobilization to the solid support may be very strong, yet non-covalent. For example, biotinylated oligonucleotides can be made, which bind to surfaces covalently coated with streptavidin, resulting in attachment.

[0114] Arrays may be produced according to any convenient methodology, such as preforming the polynucleotide microarray elements and then stably associating them with the surface. Alternatively, the oligonucleotides may be synthesized on the surface, as is known in the art. A number of different array configurations and methods for their production are known to those of skill in the art and disclosed in WO 95/25116 and WO 95/35505 (photolithographic techniques), U.S. Pat. No. 5,445,934 (in situ synthesis by photolithography), U.S. Pat. No. 5,384,261 (in situ synthesis by mechanically directed flow paths); and U.S. Pat. No. 5,700,637 (synthesis by spotting, printing or coupling); the disclosure of which are herein incorporated in their entirety by reference. Another method for coupling DNA to beads uses specific ligands attached to the end of the DNA to link to ligand-binding molecules attached to a bead. Possible ligand-binding partner pairs include biotin-avidin/streptavidin, or various antibody/antigen pairs such as digoxygenin-antidigoxygenin antibody (Smith et al., “Direct Mechanical Measurements of the Elasticity of Single DNA Molecules by Using Magnetic Beads,” Science 258:1122-1126 (1992)). Covalent chemical attachment of DNA to the support can be accomplished by using standard coupling agents to link the 5′-phosphate on the DNA to coated microspheres through a phosphoamidate bond. Methods for immobilization of oligonucleotides to solid-state substrates are well established. See Pease et al., Proc. Natl. Acad. Sci. USA 91(11):5022-5026 (1994). One method of attaching oligonucleotides to solid-state substrates is described by Guo et al., Nucleic Acids Res. 22:5456-5465 (1994). Immobilization can be accomplished either by in situ DNA synthesis (Maskos and Southern, Nucleic Acids Research, 20:1679-1684 (1992) or by covalent attachment of chemically synthesized oligonucleotides (Guo et al., supra) in combination with robotic arraying technologies.

Expression Products

[0115] The term “expression products” as used herein refers to both nucleic acids, including, for example, mRNA, and polypeptide products produced by transcription and/or translation of a cancer-associated gene.

[0116] The polypeptides may be in the form of a mature protein or may be a pre-, pro- or prepro- protein that can be activated by cleavage of the pre-, pro- or prepro- portion to produce an active mature polypeptide. In such polypeptides, the pre-, pro- or prepro- sequence may be a leader or secretory sequence or may be a sequence that is employed for purification of the mature polypeptide sequence. Such polypeptides are referred to as “cancer-associated polypeptides”.

[0117] The term “cancer-associated polypeptides” also includes variants such as fragments, homologs, fusions and mutants. Homologous polypeptides have at least 80% or more (i.e. at least 85, at least 90, at least 91, at least 92, at least 93, at least 94, at least 95, at least 96, at least 97, at least 98, at least 99%) sequence identity with a cancer-associated polypeptide as referred to above, as determined by the Smith-Waterman homology search algorithm using an affine gap search with a gap open penalty of 12 and a gap extension penalty of 2, BLOSUM matrix of 62. The Smith-Waterman homology search algorithm is taught in Smith and Waterman, Adv. Appl. Math. (1981) 2: 482-489. The variant polypeptides can be naturally or non-naturally glycosylated, i.e., the polypeptide has a glycosylation pattern that differs from the glycosylation pattern found in the corresponding naturally occurring protein.

[0118] Mutants can include amino acid substitutions, additions or deletions. The amino acid substitutions can be conservative amino acid substitutions or substitutions to eliminate non-essential amino acids, such as to alter a glycosylation site, a phosphorylation site or an acetylation site, or to minimize misfolding by substitution or deletion of one or more cysteine residues that are not necessary for function. Conservative amino acid substitutions are those that preserve the general charge, hydrophobicity/hydrophilicity, and/or steric bulk of the amino acid substituted. Variants of these products can be designed so as to retain or have enhanced biological activity of a particular region of the protein (e.g., a functional domain and/or, where the polypeptide is a member of a protein family, a region associated with a consensus sequence). Such variants may then be used in methods of detection or treatment. Selection of amino acid alterations for production of variants can be based upon the accessibility (interior vs. exterior) of the amino acid (see, e.g., Go et al, Int. J. Peptide Protein Res. (1980) 15:211), the thermostability of the variant polypeptide (see, e.g., Querol et al., Prot. Eng. (1996) 9:265), desired glycosylation sites (see, e.g., Olsen and Thomsen, J. Gen. Microbiol. (1991) 137:579), desired disulfide bridges (see, e.g., Clarke et al., Biochemistry (1993) 32:4322; and Wakarchuk et al., Protein Eng. (1994) 7:1379), desired metal binding sites (see, e.g., Toma et al., Biochemistry (1991) 30:97, and Haezerbrouck et al., Protein Eng. (1993) 6:643), and desired substitutions within proline loops (see, e.g., Masul et al., Appl. Env. Microbiol. (1994) 60:3579). Cysteine-depleted muteins can be produced as disclosed in U.S. Pat. No. 4,959,314.

[0119] Variants also include fragments of the polypeptides disclosed herein, particularly biologically active fragments and/or fragments corresponding to functional domains. Fragments of interest will typically be at least about 8 amino acids (aa) 10 aa, 15 aa, 20 aa, 25 aa, 30 aa, 35 aa, 40 aa, to at least about 45 aa in length, usually at least about 50 aa in length, at least about 75 aa, at least about 100 aa, at least about 125 aa, at least about 150 aa in length, at least about 200 aa, at least about 300 aa, at least about 400 aa and can be as long as 500 aa in length or longer, but will usually not exceed about 1000 aa in length, where the fragment will have a stretch of amino acids that is identical to a polypeptide encoded by a polynucleotide having a sequence of any one of the polynucleotide sequences provided herein, or a homolog thereof. The protein variants described herein are encoded by polynucleotides that are within the scope of the invention. The genetic code can be used to select the appropriate codons to construct the corresponding variants.

[0120] Altered levels of expression of the polypeptides encoded by cancer-associated genes may indicate that the gene and its products play a role in cancers. In some embodiments, a two-fold increase or decrease in the amount of complex formed is indicative of disease. In some embodiments, a 3-fold, 4-fold, 5-fold, 10-fold, 20-fold, 50-fold or even 100-fold increase or decrease in the amount of complex formed is indicative of disease.

[0121] Cancer-associated polypeptides may be shorter or longer than the wild type amino acid sequences, and the equivalent coding mRNAs may be similarly modified as compared to the wild type mRNA. Thus, included within the definition of cancer-associated polypeptides are portions or fragments of the wild type sequences herein. In addition, as outlined above, the cancer-associated genes may be used to obtain additional coding regions, and thus additional protein sequence, using techniques known in the art.

[0122] In some embodiments, the cancer-associated polypeptides are derivative or variant cancer-associated polypeptides as compared to the wild-type sequence. That is, as outlined more fully below, the derivative cancer-associated polypeptides will contain at least one amino acid substitution, deletion or insertion. The amino acid substitution, insertion or deletion may occur at any residue within the cancer-associated polypeptides.

[0123] Also included are amino acid sequence variants of cancer-associated polypeptides. These variants fall into one or more of three classes: substitutional, insertional or deletional variants. These variants ordinarily are prepared by site-specific mutagenesis of nucleotides in the DNA encoding the cancer associated protein, using cassette or PCR mutagenesis or other techniques well known in the art, to produce DNA encoding the variant, and thereafter expressing the DNA in recombinant cell culture as outlined above. However, variant cancer-associated polypeptide fragments having up to about 100-150 residues may be prepared by in vitro synthesis using established techniques. Amino acid sequence variants are characterized by the predetermined nature of the variation, a feature that sets them apart from naturally occurring allelic or interspecies variation of the cancer-associated polypeptide amino acid sequence. The variants typically exhibit the same qualitative biological activity as the naturally occurring analogue, although variants can also be selected which have modified characteristics as will be more fully outlined below.

[0124] While the site or region for introducing an amino acid sequence variation is predetermined, the mutation per se need not be predetermined. For example, in order to optimize the performance of a mutation at a given site, random mutagenesis may be conducted at the target codon or region and the expressed cancer-associated polypeptide variants screened for the optimal combination of desired activity. Techniques for making substitution mutations at predetermined sites in DNA having a known sequence are well known, for example, M13 primer mutagenesis and LAR mutagenesis. Screening of the mutants is done using assays of cancer-associated protein activities.

[0125] Amino acid substitutions are typically of single residues, though, of course may be of multiple residues; insertions usually will be on the order of from about 1 to 20 amino acids, although considerably larger insertions may be tolerated. Deletions range from about 1 to about 20 residues, although in some cases deletions may be much larger.

[0126] Substitutions, deletions, insertions or any combination thereof may be used to arrive at a final derivative. Generally these changes are done on a few amino acids to minimize the alteration of the molecule. However, larger changes may be tolerated in certain circumstances. When small alterations in the characteristics of the cancer-associated polypeptide are desired, substitutions are generally made in accordance with the following table:

TABLE 1

| Original Residue | Exemplary Substitutions |
|---|---|
| Ala | Ser |
| Arg | Lys |
| Asn | Gln, His |
| Asp | Glu |
| Cys | Ser |
| Gln | Asn |
| Glu | Asp |
| Gly | Pro |
| His | Asn, Gln |
| Ile | Leu, Val |
| Leu | Ile, Val |
| Lys | Arg, Gln, Glu |
| Met | Leu, Ile |
| Phe | Met, Leu, Tyr |
| Ser | Thr |
| Thr | Ser |
| Trp | Tyr |
| Tyr | Trp, Phe |
| Val | Ile, Leu |

[0127] Substantial changes in function or immunological identity occur when substitutions are less conservative than those shown in Table 1. For example, substitutions may be made full length to more significantly affect one or more of the following: the structure of the polypeptide backbone in the area of the alteration (e.g., the alpha-helical or beta-sheet structure); the charge or hydrophobicity of the molecule at the target site; and the bulk of the side chain. The substitutions which in general are expected to produce the greatest changes in the polypeptide's properties are those in which (a) a hydrophilic residue, e.g. seryl or threonyl is substituted for (or by) a hydrophobic residue, e.g. leucyl, isoleucyl, phenylalanyl, valyl or alanyl; (b) a cysteine or proline is substituted for (or by) any other residue; (c) a residue having an electropositive side chain, e.g. lysyl, arginyl, or histidyl, is substituted for (or by) an electronegative residue, e.g. glutamyl or aspartyl; or (d) a residue having a bulky side chain, e.g. phenylalanine, is substituted for (or by) one not having a side chain, e.g. glycine.

[0128] The variants typically exhibit the same qualitative biological activity and will elicit the same immune response as the naturally-occurring analogue, although variants may also have modified characteristics.

[0129] The cancer-associated polypeptides may be themselves expressed and used in methods of detection and treatment. They may be further modified in order to assist with their use in such methods.

[0130] Covalent modifications of cancer-associated polypeptides may be utilised, for example in screening. One type of covalent modification includes reacting targeted amino acid residues of a cancer-associated polypeptide with an organic derivatizing agent that is capable of reacting with selected side chains or the N-or C-terminal residues of a cancer-associated polypeptide. Derivatization with bifunctional agents is useful, for instance, for crosslinking cancer-associated polypeptides to a water-insoluble support matrix or surface for use in the method for purifying anti- cancer-associated antibodies or screening assays, as is more fully described below. Commonly used crosslinking agents include, e.g., 1,1-bis(diazoacetyl)-2-phenylethane, glutaraldehyde, N-hydroxysuccinimide esters, for example, esters with 4-azidosalicylic acid, homobifunctional imidoesters, including disuccinimidyl esters such as 3,3′-dithiobis(succinimidylpropionate), bifunctional maleimides such as bis-N-maleimido-1,8-octane and agents such as methyl-3-[(p-azidophenyl)dithio]propioimidate.

[0131] Other modifications include deamidation of glutaminyl and asparaginyl residues to the corresponding glutamyl and aspartyl residues, respectively, hydroxylation of proline and lysine, phosphorylation of hydroxyl groups of seryl, threonyl or tyrosyl residues, methylation of the a-amino groups of lysine, arginine, and histidine side chains (T. E. Creighton, Proteins: Structure and Molecular Properties, W. H. Freeman & Co., San Francisco, pp. 79-86 (1983)), acetylation of the N-terminal amine, and amidation of any C-terminal carboxyl group.

[0132] Another type of covalent modification of the cancer-associated polypeptide included within the scope of this invention comprises altering the native glycosylation pattern of the polypeptide. “Altering the native glycosylation pattern” is intended for purposes herein to mean deleting one or more carbohydrate moieties found in native sequence cancer-associated polypeptide, and/or adding one or more glycosylation sites that are not present in the native sequence cancer-associated polypeptide.

[0133] Addition of glycosylation sites to cancer-associated polypeptides may be accomplished by altering the amino acid sequence thereof. The alteration may be made, for example, by the addition of, or substitution by, one or more serine or threonine residues to the native sequence cancer-associated polypeptide (for O-linked glycosylation sites). The cancer-associated amino acid sequence may optionally be altered through changes at the DNA level, particularly by mutating the DNA encoding the cancer-associated polypeptide at preselected bases such that codons are generated that will translate into the desired amino acids.

[0134] Another means of increasing the number of carbohydrate moieties on the cancer-associated polypeptide is by chemical or enzymatic coupling of glycosides to the polypeptide. Such methods are described in the art, e.g., in WO 87/05330 published 11 Sep. 1987, and in Aplin and Wriston, LA Crit. Rev. Biochem., pp. 259-306 (1981).

[0135] Removal of carbohydrate moieties present on the cancer-associated polypeptide may be accomplished chemically or enzymatically or by mutational substitution of codons encoding for amino acid residues that serve as targets for glycosylation. Chemical deglycosylation techniques are known in the art and described, for instance, by Hakimuddin, et al., Arch. Biochem. Biophys., 259:52 (1987) and by Edge et al., Anal. Biochem., 118:131 (1981). Enzymatic cleavage of carbohydrate moieties on polypeptides can be achieved by the use of a variety of endo-and exo-glycosidases as described by Thotakura et al., Meth. Enzymol., 138:350 (1987).

[0136] Another type of covalent modification of cancer-associated comprises linking the cancer-associated polypeptide to one of a variety of nonproteinaceous polymers, e.g., polyethylene glycol, polypropylene glycol, or polyoxyalkylenes, in the manner set forth in U.S. Pat. Nos. 4,640,835; 4,496,689; 4,301,144; 4,670,417; 4,791,192 or 4,179,337.

[0137] Cancer-associated polypeptides may also be modified in a way to form chimeric molecules comprising a cancer-associated polypeptide fused to another, heterologous polypeptide or amino acid sequence. In some embodiments, such a chimeric molecule comprises a fusion of a cancer-associated polypeptide with a tag polypeptide that provides an epitope to which an anti-tag antibody can selectively bind. The epitope tag is generally placed at the amino- or carboxyl-terminus of the cancer-associated polypeptide, although internal fusions may also be tolerated in some instances. The presence of such epitope-tagged forms of a cancer-associated polypeptide can be detected using an antibody against the tag polypeptide. Also, provision of the epitope tag enables the cancer-associated polypeptide to be readily purified by affinity purification using an anti-tag antibody or another type of affinity matrix that binds to the epitope tag. In an alternative embodiment, the chimeric molecule may comprise a fusion of a cancer-associated polypeptide with an immunoglobulin or a particular region of an immunoglobulin. For a bivalent form of the chimeric molecule, such a fusion could be to the Fc region of an IgG molecule.

[0138] Various tag polypeptides and their respective antibodies are well known in the art. Examples include poly-histidine (poly-his) or poly-histidine-glycine (poly-his-gly) tags; the flu HA tag polypeptide and its antibody 12CA5 (Field et al., Mol. Cell. Biol., 8:2159-2165 (1988)); the c-myc tag and the 8F9, 3C7, 6E10, G4, B7 and 9E10 antibodies thereto (Evan et al., Molecular and Cellular Biology, 5:3610-3616 (1985)); and the Herpes Simplex virus glycoprotein D (gD) tag and its antibody (Paborsky et al., Protein Engineering, 3(6):547-553 (1990)). Other tag polypeptides include the Flag-peptide (Hopp et al., BioTechnology, 6:1204-1210 (1988)); the KT3 epitope peptide (Martin et al., Science, 255:192-194 (1992)); tubulin epitope peptide (Skinner et al., J. Biol. Chem., 266:15163-15166 (1991)); and the T7 gene 10 protein peptide tag (Lutz-Freyermuth et al., Proc. Natl. Acad. Sci. USA, 87:6393-6397 (1990)).

[0139] Alternatively, other cancer-associated proteins of the cancer-associated protein family, and cancer-associated proteins from other organisms, may be cloned and expressed as outlined below. Thus, probe or degenerate polymerase chain reaction (PCR) primer sequences may be used to find other related cancer-associated proteins from humans or other organisms. As will be appreciated by those in the art, particularly useful probe and/or PCR primer sequences include the unique areas of the cancer-associated nucleic acid sequence. As is generally known in the art, PCR primers may be from about 15 to about 35 or from about 20 to about 30 nucleotides in length, and may contain inosine as needed. The conditions for the PCR reaction are well known in the art.

[0140] In addition, as is outlined herein, cancer-associated proteins can be made that are longer than those encoded by cancer-associated genes, for example, by the elucidation of additional sequences, the addition of epitope or purification tags, the addition of other fusion sequences, etc.

[0141] Cancer-associated proteins may also be identified as being encoded by cancer-associated nucleic acids. Thus, cancer-associated proteins are encoded by nucleic acids that will hybridize to the cancer-associated genes listed above, or their complements, as outlined herein.

### Expression of Cancer Associated Polypeptides

[0142] Nucleic acids derieved from cancer-associated genes encoding cancer-associated proteins may be used to make a variety of expression vectors to express cancer-associated proteins which can then be used in screening assays, as mentioned above. The expression vectors may be either self-replicating extrachromosomal vectors or vectors which integrate into a host genome. Generally, these expression vectors include transcriptional and translational regulatory nucleic acid operably linked to the nucleic acid encoding the cancer-associated protein. The term “control sequences” refers to DNA sequences necessary for the expression of an operably linked coding sequence in a particular host organism. The control sequences that are suitable for prokaryotes, for example, include a promoter, optionally an operator sequence, and a ribosome binding site. Eukaryotic cells are known to utilize promoters, polyadenylation signals, and enhancers.

[0143] Nucleic acid is “operably linked” when it is placed into a functional relationship with another nucleic acid sequence. For example, DNA for a presequence or secretory leader is operably linked to DNA for a polypeptide if it is expressed as a preprotein that participates in the secretion of the polypeptide; a promoter or enhancer is operably linked to a coding sequence if it affects the transcription of the sequence; or a ribosome binding site is operably linked to a coding sequence if it is positioned so as to facilitate translation. Generally, “operably linked” means that the DNA sequences being linked are contiguous, and, in the case of a secretory leader, contiguous and in reading phase. However, enhancers do not have to be contiguous. Linking is accomplished by ligation at convenient restriction sites. If such sites do not exist, synthetic oligonucleotide adaptors or linkers are used in accordance with conventional practice. The transcriptional and translational regulatory nucleic acid will generally be appropriate to the host cell used to express the cancer-associated protein; for example, transcriptional and translational regulatory nucleic acid sequences from Bacillus are preferably used to express the cancer-associated protein in Bacillus. Numerous types of appropriate expression vectors, and suitable regulatory sequences are known in the art for a variety of host cells.

[0144] In general, the transcriptional and translational regulatory sequences may include, but are not limited to, promoter sequences, ribosomal binding sites, transcriptional start and stop sequences, translational start and stop sequences, and enhancer or activator sequences. In some embodiments, the regulatory sequences include a promoter and transcriptional start and stop sequences.

[0145] Promoter sequences encode either constitutive or inducible promoters. The promoters may be either naturally occurring promoters or hybrid promoters. Hybrid promoters, which combine elements of more than one promoter, are also known in the art, and are useful in the present invention.

[0146] In addition, the expression vector may comprise additional elements. For example, the expression vector may have two replication systems, thus allowing it to be maintained in two organisms, for example in mammalian or insect cells for expression and in a prokaryotic host for cloning and amplification. Furthermore, for integrating expression vectors, the expression vector contains at least one sequence homologous to the host cell genome, and preferably two homologous sequences that flank the expression construct. The integrating vector may be directed to a specific locus in the host cell by selecting the appropriate homologous sequence for inclusion in the vector. Constructs for integrating vectors are well known in the art.

[0147] In some embodiments, the expression vector contains a selectable marker gene to allow the selection of transformed host cells. Selection genes, including antibiotic resistance genes are well known in the art and will vary depending on the host cell used.

[0148] The cancer-associated proteins may be produced by culturing a host cell transformed with an expression vector containing nucleic acid encoding a cancer-associated protein, under the appropriate conditions to induce or cause expression of the cancer-associated protein. The conditions appropriate for cancer-associated protein expression will vary with the choice of the expression vector and the host cell, and will be easily ascertained by one skilled in the art through routine experimentation. For example, the use of constitutive promoters in the expression vector will require optimizing the growth and proliferation of the host cell, while the use of an inducible promoter requires the appropriate growth conditions for induction. In addition, in some embodiments, the timing of the harvest is important. For example, the baculoviral systems used in insect cell expression are lytic viruses, and thus harvest time selection can be crucial for product yield.

[0149] Appropriate host cells include yeast, bacteria, archaebacteria, fungi, and insect, plant and animal cells, including mammalian cells. Of particular interest are Drosophila melanogaster cells, Saccharomyces cerevisiae and other yeasts, E. coli, Bacillus subtilis, Sf9 cells, C129 cells, 293 cells, Neurospora, BHK, CHO, COS, HeLa cells, THP1 cell line (a macrophage cell line) and human cells and cell lines.

[0150] In some embodiments cancer-associated proteins are expressed in mammalian cells. Mammalian expression systems are also known in the art, and include retroviral systems. A preferred expression vector system is a retroviral vector system such as is generally described in WO97/27212 (PCT/US97/01019) and WO97/27213 (PCT/US97/01048), both of which are hereby expressly incorporated by reference. Of particular use as mammalian promoters are the promoters from mammalian viral genes, since the viral genes are often highly expressed and have a broad host range. Examples include the SV40 early promoter, mouse mammary tumor virus LTR promoter, adenovirus major late promoter, herpes simplex virus promoter, and the CMV promoter. Typically, transcription termination and polyadenylation sequences recognized by mammalian cells are regulatory regions located 3′ to the translation stop codon and thus, together with the promoter elements, flank the coding sequence. Examples of transcription terminator and polyadenylation signals include those derived form SV40.

[0151] The methods of introducing exogenous nucleic acid into mammalian hosts, as well as other hosts, are well known in the art, and will vary with the host cell used. Techniques include dextran-mediated transfection, calcium phosphate precipitation, polybrene mediated transfection, protoplast fusion, electroporation, viral infection, encapsulation of the polynucleotide(s) in liposomes, and direct microinjection of the DNA into nuclei.

[0152] In some embodiments, cancer-associated proteins are expressed in bacterial systems. Bacterial expression systems are well known in the art. Promoters from bacteriophage may also be used and are known in the art. In addition, synthetic promoters and hybrid promoters are also useful; for example, the tac promoter is a hybrid of the trp and lac promoter sequences. Furthermore, a bacterial promoter can include naturally occurring promoters of non-bacterial origin that have the ability to bind bacterial RNA polymerase and initiate transcription. In addition to a functioning promoter sequence, an efficient ribosome binding site is desirable. The expression vector may also include a signal peptide sequence that provides for secretion of the cancer-associated protein in bacteria. The protein is either secreted into the growth media (Gram-positive bacteria) or into the periplasmic space, located between the inner and outer membrane of the cell (Gram-negative bacteria). The bacterial expression vector may also include a selectable marker gene to allow for the selection of bacterial strains that have been transformed. Suitable selection genes include genes that render the bacteria resistant to drugs such as ampicillin, chloramphenicol, erythromycin, kanamycin, neomycin and tetracycline. Selectable markers also include biosynthetic genes, such as those in the histidine, tryptophan and leucine biosynthetic pathways. These components are assembled into expression vectors. Expression vectors for bacteria are well known in the art, and include vectors for Bacillus subtilis, E. coli, Streptococcus cremoris, and Streptococcus lividans, among others. The bacterial expression vectors are transformed into bacterial host cells using techniques well known in the art, such as calcium chloride treatment, electroporation, and others.

[0153] Cancer-associated proteins may be produced in insect cells. Expression vectors for the transformation of insect cells, and in particular, baculovirus-based expression vectors, are well known in the art.

[0154] In some embodiments, cancer-associated proteins may be produced in yeast cells. Yeast expression systems are well known in the art, and include expression vectors for Saccharomyces cerevisiae, Candida albicans and C. maltosa, Hansenula polymorpha, Kluyveromyces fragilis and K. lactis, Pichia guillerimondii and P. pastoris, Schizosaccharomyces pombe, and Yarrowia lipolytica.

[0155] The cancer-associated protein may also be made as a fusion protein, using techniques well known in the art. Thus, for example, for the creation of monoclonal antibodies. If the desired epitope is small, the cancer-associated protein may be fused to a carrier protein to form an immunogen. Alternatively, the cancer-associated protein may be made as a fusion protein to increase expression, or for other reasons. For example, when the cancer-associated protein is a cancer-associated peptide, the nucleic acid encoding the peptide may be linked to other nucleic acid for expression purposes.

### Cancer

[0156] In some embodiments, a cancer detected, diagnosed or treated by the methods of the invention is melanoma, breast cancer, lymphoma, leukemia, colon cancer, kidney cancer, liver cancer, lung cancer, ovary cancer, pancreatic cancer, prostate cancer, uterine cancer, cervical cancer, bladder cancer, stomach cancer or skin cancer. In some embodiments the cancer is carcinoma, breast cancer, lymphoma or leukemia.

### Antibodies

[0157] In some embodiments the invention uses antibodies that specifically bind to cancer-associated polypeptides expressed by the cancer-associated genes. The term “specifically binds” means that the antibodies have substantially greater affinity for their target cancer-associated polypeptide than their affinity for other related polypeptides. As used herein, the term “antibody” refers to intact molecules as well as to fragments thereof, such as Fab, F(ab′)2 and Fv, which are capable of binding to the antigenic determinant in question. By “substantially greater affinity” we mean that there is a measurable increase in the affinity for the target cancer-associated polypeptide of the invention as compared with the affinity for other related polypeptide. In some embodiments, the affinity is at least 1.5-fold, 2-fold, 5-fold 10-fold, 100-fold, 10³-fold, 10⁴-fold, 10⁵-fold, 10⁶-fold or greater for the target cancer-associated polypeptide.

[0158] In some embodiments, the antibodies bind with high affinity with a dissociation constant of 10⁻⁴M or less, 10⁻⁷M or less, 10⁻⁹M or less or with subnanomolar affinity (0.9, 0.8, 0.7, 0.6, 0.5, 0.4, 0.3, 0.2, 0.1 nM or even less).

[0159] When the cancer-associated polypeptides are to be used to generate antibodies, for example for immunotherapy, in some embodiments the cancer-associated polypeptide should share at least one epitope or determinant with the full-length protein. By “epitope” or “determinant” herein is meant a portion of a protein that will generate and/or bind an antibody or T-cell receptor in the context of MHC. Thus, in some instances, antibodies made to a smaller cancer-associated polypeptide will be able to bind to the full-length protein. In some embodiments, the epitope is unique; that is, antibodies generated to a unique epitope show little or no cross-reactivity.

[0160] Polypeptide sequence encoded by the cancer-associated genes may be analyzed to determine certain preferred regions of the polypeptide. Regions of high antigenicity are determined from data by DNASTAR analysis by choosing values that represent regions of the polypeptide that are likely to be exposed on the surface of the polypeptide in an environment in which antigen recognition may occur in the process of initiation of an immune response. For example, the amino acid sequence of a polypeptide encoded by a cancer-associated gene sequence may be analyzed using the default parameters of the DNASTAR computer algorithm (DNASTAR, Inc., Madison, Wis.; see the worldwideweb site at dnastar.com).

[0161] In some embodiments, the antibodies of the present invention bind to orthologs, homologs, paralogs or variants, or combinations and subcombinations thereof, of cancer-associated polypeptides. In some embodiments, the antibodies of the present invention bind to orthologs of cancer-associated polypeptides. In some embodiments, the antibodies of the present invention bind to homologs of cancer-associated polypeptides. In some embodiments, the antibodies of the present invention bind to paralogs of cancer-associated polypeptides. In some embodiments, the antibodies of the present invention bind to variants of cancer-associated polypeptides. In some embodiments, the antibodies of the present invention do not bind to orthologs, homologs, paralogs or variants, or combinations and subcombinations thereof, of cancer-associated polypeptides.

[0162] Polypeptide features that may be routinely obtained using the DNASTAR computer algorithm include, but are not limited to, Garnier-Robson alpha-regions, beta-regions, turn-regions, and coil-regions (Garnier et al. J. Mol. Biol., 120: 97 (1978)); Chou-Fasman alpha-regions, beta-regions, and turn-regions (Adv. in Enzymol., 47:45-148 (1978)); Kyte-Doolittle hydrophilic regions and hydrophobic regions (J. Mol. Biol., 157:105-132 (1982)); Eisenberg alpha- and beta-amphipathic regions; Karplus-Schulz flexible regions; Emini surface-forming regions (J. Virol., 55(3):836-839 (1985)); and Jameson-Wolf regions of high antigenic index (CABIOS, 4(1):181-186 (1988)). Kyte-Doolittle hydrophilic regions and hydrophobic regions, Emini surface-forming regions, and Jameson-Wolf regions of high antigenic index (i.e., containing four or more contiguous amino acids having an antigenic index of greater than or equal to 1.5, as identified using the default parameters of the Jameson-Wolf program) can routinely be used to determine polypeptide regions that exhibit a high degree of potential for antigenicity. One approach for preparing antibodies to a protein is the selection and preparation of an amino acid sequence of all or part of the protein, chemically synthesizing the sequence and injecting it into an appropriate animal, typically a rabbit, hamster or a mouse. Oligopeptides can be selected as candidates for the production of an antibody to the cancer-associated protein based upon the oligopeptides lying in hydrophilic regions, which are thus likely to be exposed in the mature protein. Additional oligopeptides can be determined using, for example, the Antigenicity Index, Welling, G. W. et al., FEBS Lett. 188:215-218 (1985), incorporated herein by reference.

[0163] The term “antibody” as used herein includes antibody fragments, as are known in the art, including Fab, Fab2, single chain antibodies (Fv for example), chimeric antibodies, etc., either produced by the modification of whole antibodies or those synthesized de novo using recombinant DNA technologies.

[0164] The invention also provides antibodies that are SMIPs or binding domain immunoglobulin fusion proteins specific for target protein. These constructs are single-chain polypeptides comprising antigen binding domains fused to immunoglobulin domains necessary to carry out antibody effector functions. See e.g., WO03/041600, U.S. Patent publication 20030133939 and US Patent Publication 20030118592.

[0165] Methods of preparing polyclonal antibodies are known to the skilled artisan. Polyclonal antibodies can be raised in a mammal, for example, by one or more injections of an immunizing agent and, if desired, an adjuvant. Typically, the immunizing agent and/or adjuvant will be injected in the mammal by multiple subcutaneous or intraperitoneal injections. The immunizing agent may include a protein encoded by a nucleic acid of the figures or fragment thereof or a fusion protein thereof. It may be useful to conjugate the immunizing agent to a protein known to be immunogenic in the mammal being immunized. Examples of such immunogenic proteins include but are not limited to keyhole limpet hemocyanin, serum albumin, bovine thyroglobulin, and soybean trypsin inhibitor. Examples of adjuvants that may be employed include Freund's complete adjuvant and MPL-TDM adjuvant (monophosphoryl Lipid A, synthetic trehalose dicorynomycolate). The immunization protocol may be selected by one skilled in the art without undue experimentation.

[0166] In some embodiments the antibodies are monoclonal antibodies. Monoclonal antibodies may be prepared using hybridoma methods, such as those described by- Kohler and Milstein, Nature, 256:495 (1975). In a hybridoma method, a mouse, hamster, or other appropriate host animal, is typically immunized with an immunizing agent to elicit lymphocytes that produce or are capable of producing antibodies that will specifically bind to the immunizing agent. Alternatively, the lymphocytes may be immunized in vitro. The immunizing agent will typically include a cancer-associated polypeptide, -or fragment thereof or a fusion protein thereof. Generally, either peripheral blood lymphocytes (“PBLs”) are used if cells of human origin are desired, or spleen cells or lymph node cells are used if non-human mammalian sources are desired. The lymphocytes are then fused with an immortalized cell line using a suitable fusing agent, such as polyethylene glycol, to form a hybridoma cell (Goding, Monoclonal Antibodies: Principles and Practice, Academic Press, (1986) pp. 59-103). Immortalized cell lines are usually transformed mammalian cells, particularly myeloma cells of rodent, bovine and human origin. Usually, rat or mouse myeloma cell lines are employed. The hybridoma cells may be cultured in a suitable culture medium that preferably contains one or more substances that inhibit the growth or survival of the unfused, immortalized cells. For example, if the parental cells lack the enzyme hypoxanthine guanine phosphoribosyl transferase (HGPRT or HPRT), the culture medium for the hybridomas typically will include hypoxanthine, aminopterin, and thymidine (“HAT medium”), which substances prevent the growth of HGPRT-deficient cells.

[0167] Monoclonal antibody technology is used in implementing research, diagnosis and therapy. Monoclonal antibodies are used in radioimmunoassays, enzyme-linked immunosorbent assays, immunocytopathology, and flow cytometry for in vitro diagnosis, and in vivo for diagnosis and immunotherapy of human disease. Waldmann, T. A. (1991) Science 252:1657-1662. In particular, monoclonal antibodies have been widely applied to the diagnosis and therapy of cancer, wherein it is desirable to target malignant lesions while avoiding normal tissue. See, e.g., U.S. Pat. No. 4,753,894 to Frankel, et al.; U.S. Pat. No. 4,938,948 to Ring et al.; and U.S. Pat. No. 4,956,453 to Bjorn et al.

[0168] The antibodies may be bispecific antibodies. In some embodiments, one of the binding specificities is for a cancer-associated polypeptide, or a fragment thereof, the other one is for any other antigen, and preferably for a cell-surface protein or receptor or receptor subunit, preferably one that is tumor specific.

[0169] In some embodiments, the antibodies to cancer-associated polypeptides are capable of reducing or eliminating the biological function of cancer-associated polypeptides, as is described below. That is, the addition of anti-cancer-associated polypeptide antibodies (either polyclonal or preferably monoclonal) to cancer-associated polypeptides (or cells containing cancer-associated polypeptides) may reduce or eliminate the cancer-associated polypeptide activity. In some embodiments the antibodies of the present invention cause a decrease in activity of at least 25%, at least about 50%, or at least about 95-100%.

[0170] In some embodiments the antibodies to the cancer-associated polypeptides are humanized antibodies. “Humanized” antibodies refer to a molecule having an antigen binding site that is substantially derived from an immunoglobulin from a non-human species and the remaining immunoglobulin structure of the molecule based upon the structure and/or sequence of a human immunoglobulin. The antigen binding site may comprise either complete variable domains fused onto constant domains or only the complementarity determining regions (CDRs) grafted onto appropriate framework regions in the variable domains. Antigen binding sites may be wild type or modified by-one or more amino acid substitutions, e.g., modified to resemble human immunoglobulin more closely. Alternatively, a humanized antibody may be derived from a chimeric antibody that retains or substantially retains the antigen-binding properties of the parental, non-human, antibody but which exhibits diminished immunogenicity as compared to the parental antibody when administered to humans. The phrase “chimeric antibody,” as used herein, refers to an antibody containing sequence derived from two different antibodies (see, e.g., U.S. Pat. No. 4,816,567) that typically originate from different species. Typically, in these chimeric antibodies, the variable region of both light and heavy chains mimics the variable regions of antibodies derived from one species of mammals, while the constant portions are homologous to the sequences in antibodies derived from another. Most typically, chimeric antibodies comprise human and murine antibody fragments, generally human constant and mouse variable regions. Humanized antibodies are made by replacing the complementarity determining regions (CDRs) of a human antibody (acceptor antibody) with those from a non-human antibody (donor antibody) such as mouse, rat or rabbit having the desired specificity, affinity and capacity. In some instances, Fv framework residues of the human “acceptor” antibody are replaced by corresponding non-human residues from the “donor” antibody. Humanized antibodies may also comprise residues that are found neither in the recipient antibody nor in the imported CDR or framework sequences. In general, the humanized antibody will comprise substantially all of at least one, and typically two, variable domains, in which all or substantially all of the CDR regions correspond to those of a non-human immunoglobulin and all or substantially all of the framework residues (FR) regions are those of a human immunoglobulin consensus sequence. The humanized antibody optimally also will comprise at least a portion of an immunoglobulin constant region (Fc), typically that of a human immunoglobulin (Jones et al., Nature, 321:522-525 (1986); Riechmann et al., Nature, 332:323-329 (1988); and Presta, Curr. Op. Struct. Biol., 2:593-596 (1992)). One clear advantage to such chimeric forms is that, for example, the variable regions can conveniently be derived from presently known sources using readily available hybridomas or B cells from non human host organisms in combination with constant regions derived from, for example, human cell preparations. While the variable region has the advantage of ease of preparation, and the specificity is not affected by its source, the constant region being human, is less likely to elicit an immune response from a human subject when the antibodies are injected than would the constant region from a non-human source. However, the definition is not limited to this particular example.

[0171] Because humanized antibodies are far less immunogenic in humans than the parental mouse monoclonal antibodies, they can be used for the treatment of humans with far less risk of anaphylaxis. Thus, these antibodies may be preferred in therapeutic applications that involve in vivo administration to a human such as, e.g., use as radiation sensitizers for the treatment of neoplastic disease or use in methods to reduce the side effects of, e.g., cancer therapy. Methods for humanizing non-human antibodies are well known in the art. Generally, a humanized antibody has one or more amino acid residues introduced into it from a source that is non-human. These non-human amino acid residues are often referred to as import residues, which are typically taken from an import variable domain. Humanization can be essentially performed following the method of Winter and co-workers (Jones et al., Nature 321:522-525 (1986); Riechmann et al., Nature 332:323-327 (1988); Verhoeyen et al., Science 239:1534-1536 (1988)), by substituting rodent CDRs or CDR sequences for the corresponding sequences of a human antibody. Accordingly, such humanized antibodies are chimeric antibodies (U.S. Pat. No.4,816,567), wherein substantially less than an intact human variable domain has been substituted by the corresponding sequence from a non-human species. In practice, humanized antibodies are typically human antibodies in which some CDR residues and possibly some FR residues are substituted by residues from analogous sites in rodent antibodies.

[0172] A number of “humanized” antibody molecules comprising an antigen-binding site derived from a non-human immunoglobulin have been described, including chimeric antibodies having rodent V regions and their associated CDRs fused to human constant domains (Winter et al. (1991) Nature 349:293-299; Lobuglio et al. (1989) Proc. Nat. Acad. Sci. USA 86:4220-4224; Shaw et al. (1987) J Immunol. 138:4534-4538; and Brown et al. (1987) Cancer Res. 47:3577-3583), rodent CDRs grafted into a human supporting FR prior to fusion with an appropriate human antibody constant domain (Riechmann et al. (1988) Nature 332:323-327; Verhoeyen et al. (1988) Science 239:1534-1536; and Jones et al. (1986) Nature 321:522-525), and rodent CDRs supported by recombinantly veneered rodent FRs (European Patent Publication No.519,596, published Dec.23, 1992).

[0173] Human antibodies can also be produced using various techniques known in the art, including phage display libraries [Hoogenboom and Winter, J. Mol. Biol., 227:381 (1991); Marks et al., J. Mol. Biol., 222:581 (1991)]. The techniques of Cole et al. and Boemer et al. are also available for the preparation of human monoclonal antibodies (Cole et al., Monoclonal Antibodies and Cancer Therapy, Alan R. Liss, p. 77 (1985) and Boerner et al., J. Immunol., 147(1):86-95 (1991)). Humanized antibodies may be achieved by a variety of methods including, for example: (1) grafting the non-human complementarity determining regions (CDRs) onto a human framework and constant region (a process referred to in the art as “humanizing”), or, alternatively, (2) transplanting the entire non-human variable domains, but “cloaking” them with a human-like surface by replacement of surface residues (a process referred to in the art as “veneering”). In the present invention, humanized antibodies will include both “humanized” and “veneered” antibodies. Similarly, human antibodies can be made by introducing human immunoglobulin loci into transgenic animals, e.g., mice in which the endogenous immunoglobulin genes have been partially or completely inactivated. Upon challenge, human antibody production is observed, which closely resembles that seen in humans in all respects, including gene rearrangement, assembly, and antibody repertoire. This approach is described, for example, in U.S. Pat. Nos. 5,545,807; 5,545,806; 5,569,825; 5,625,126; 5,633,425; 5,661,016, and in the following scientific publications: Marks et al., Bio/Technology 10, 779-783 (1992); Lonberg et al., Nature 368 856-859 (1994); Morrison, Nature 368, 812-13 (1994); Fishwild et al., Nature Biotechnology 14, 845-51 (1996); Neuberger, Nature Biotechnology 14, 826 (1996); Lonberg and Huszar, Intern. Rev. Immunol. 1365-93 (1995); Jones et al., Nature 321:522-525 (1986); Morrison et al., Proc. Natl. Acad. Sci, US.A., 81:6851-6855 (1984); Morrison and Oi, Adv. Immunol., 44:65-92 (1988); Verhoeyer et al., Science 239:1534-1536 (1988); Padlan, Molec. Immun. 28:489-498 (1991); Padlan, Molec. Immunol. 31(3):169-217 (1994); and Kettleborough, C. A. et al., Protein Eng. 4(7):773-83 (1991) each of which is incorporated herein by reference. Antibodies of the present invention can also be produced using human engineering techniques as discussed in U.S. Pat. 5,766,886, which is incorporated herein by reference.

[0174] The phrase “complementarity determining region” refers to amino acid sequences which together define the binding affinity and specificity of the natural Fv region of a native immunoglobulin binding site. See, e.g., Chothia et al., J. Mol. Biol. 196:901-917 (1987); Kabat et al., U.S. Dept. of Health and Human Services NIH Publication No. 91-3242 (1991). The phrase “constant region” refers to the portion of the antibody molecule that confers effector functions. In the present invention, mouse constant regions are substituted by human constant regions. The constant regions of the subject humanized antibodies are derived from human immunoglobulins. The heavy chain constant region can be selected from any of the five isotypes: alpha, delta, epsilon, gamma or mu. One method of humanizing antibodies comprises aligning the non-human heavy and light chain sequences to human heavy and light chain sequences, selecting and replacing the non-human framework with a human framework based on such alignment, molecular modeling to predict the conformation of the humanized sequence and comparing to the conformation of the parent antibody. This process is followed by repeated back mutation of residues in the CDR region that disturb the structure of the CDRs until the predicted conformation of the humanized sequence model closely approximates the conformation of the non-human CDRs of the parent non-human antibody. Such humanized antibodies may be further derivatized to facilitate uptake and clearance, e.g, via Ashwell receptors. See, e.g., U.S. Patent Nos. 5,530,101 and 5,585,089 which are incorporated herein by reference.

[0175] Humanized antibodies to cancer-associated polypeptides can also be produced using transgenic animals that are engineered to contain human immunoglobulin loci. For example, WO 98/24893 discloses transgenic animals having a human Ig locus wherein the animals do not produce functional endogenous immunoglobulins due to the inactivation of endogenous heavy and light chain loci. WO 91/10741 also discloses transgenic non-primate mammalian hosts capable of-mounting an immune response to an immunogen, wherein the antibodies have primate constant and/or variable regions, and wherein the endogenous immunoglobulin-encoding loci are substituted or inactivated. WO 96/30498 discloses the use of the Cre/Lox system to modify the immunoglobulin locus in a mammal, such as to replace all or a portion of the constant or variable region to form a modified antibody molecule. WO 94/02602 discloses non-human mammalian hosts having inactivated endogenous Ig loci and functional human Ig loci. U.S. Patent No.5,939,598 discloses methods of making transgenic mice in which the mice lack endogenous heavy chains, and express an exogenous immunoglobulin locus comprising one or more xenogeneic constant regions.

[0176] Using a transgenic animal described above, an immune response can be produced to a selected antigenic molecule, and antibody-producing cells can be removed from the animal and used to produce hybridomas that secrete human monoclonal antibodies. Immunization protocols, adjuvants, and the like are known in the art, and are used in immunization of, for example, a transgenic mouse as described in WO 96/33735. The monoclonal antibodies can be tested for the ability to inhibit or neutralize the biological activity or physiological effect of the corresponding protein.

[0177] In some embodiments, cancer-associated polypeptides as recited above and variants thereof may be used to immunize a transgenic animal as described above. Monoclonal antibodies are made using methods known in the art, and the specificity of the antibodies is tested using isolated cancer-associated polypeptides. Methods for preparation of the human or primate cancer-associated or an epitope thereof include, but are not limited to chemical synthesis, recombinant DNA techniques or isolation from biological samples. Chemical synthesis of a peptide can be performed, for example, by the classical Merrifeld method of solid phase peptide synthesis (Merrifeld, J. Am. Chem. Soc. 85:2149, 1963 which is incorporated by reference) or the FMOC strategy on a Rapid Automated Multiple Peptide Synthesis system (E. I. du Pont de Nemours Company, Wilmington, Del.) (Caprino and Han,. J. Org. Chem. 37:3404, 1972 which is incorporated by reference).

[0178] Polyclonal antibodies can be prepared by immunizing rabbits or other animals by injecting antigen followed by subsequent boosts at appropriate intervals. Alternative animals include mice, rats, chickens, guinea pigs, sheep, horses, monkeys, camels and sharks. The animals are bled and sera assayed against purified cancer-associated proteins usually by ELISA or by bioassay based upon the ability to block the action of cancer-associated proteins. When using avian species, e.g., chicken, turkey and the like, the antibody can be isolated from the yolk of the egg. Monoclonal antibodies can be prepared after the method of Milstein and Kohler by fusing splenocytes from immunized mice with continuously replicating tumor cells such as myeloma or lymphoma cells. (Milstein and Kohler, Nature 256:495-497, 1975; Gulfre and Milstein, Methods in Enzymology: Immunochemical Techniques 73:1-46, Langone and Banatis eds., Academic Press, 1981 which are incorporated by reference). The hybridoma cells so formed are then cloned by limiting dilution methods and supernates assayed for antibody production by ELISA, RIA or bioassay.

[0179] The unique ability of antibodies to recognize and specifically bind to target proteins provides an approach for treating an overexpression of the protein. Thus, in some embodiments the present invention provides methods for preventing or treating diseases involving overexpression of a cancer-associated polypeptide by treatment of a patient with specific antibodies to the cancer-associated protein.

[0180] Specific antibodies, either polyclonal or monoclonal, to the cancer-associated proteins can be produced by any suitable method known in the art as discussed above. For example, murine or human monoclonal antibodies can be produced by hybridoma technology or, alternatively, the cancer-associated proteins, or an immunologically active fragment thereof, or an anti-idiotypic antibody, or fragment thereof can be administered to an animal to elicit the production of antibodies capable of recognizing and binding to the cancer-associated proteins. Such antibodies can be from any class of antibodies including, but not limited to IgG, IgA, IgM, IgD, and IgE or in the case of avian species, IgY and from any subclass of antibodies.

[0181] In some embodiments the antibodies of the present invention are neutralizing antibodies. In some embodiments the antibodies are targeting antibodies. In some embodiments, the antibodies are internalized upon binding a target. In some embodiments the antibodies do not become internalized upon binding a target and instead remain on the surface.

[0182] The antibodies of the present invention can be screened for the ability to either be rapidly internalized upon binding to the tumor-cell antigen in question, or for the ability to remain on the cell surface following binding. In some embodiments, for example in the construction of some types of immunoconjugates, the ability of an antibody to be internalized may be desired if internalization is required to release the toxin moiety. Alternatively, if the antibody is being used to promote ADCC or CDC, it may be more desirable for the antibody to remain on the cell surface. A screening method can be used to differentiate these type behaviors. For example, a tumor cell antigen bearing cell may be used where the cells are incubated with human IgG I (control antibody) or one of the antibodies of the invention at a concentration of approximately 1 μg/mL on ice (with 0.1% sodium azide to block internalization) or 37° C. (without sodium azide) for 3 hours. The cells are then washed with cold staining buffer (PBS+1%BSA+0.1% sodium azide), and are stained with goat anti-human IgG-FITC for 30 minutes on ice. Geometric mean fluorescent intensity (MFI) is recorded by FACS Calibur. If no difference in MFI is observed between cells incubated with the antibody of the invention on ice in the presence of sodium azide and cells observed at 37° C. in the absence of sodium azide, the antibody will be suspected to be one that remains bound to the cell surface, rather than being internalized. If however, a decrease in surface stainable antibody is found when the cells are incubated at 37° C. in the absence of sodium azide, the antibody will be suspected to be one which is capable of internalization.

Antibody Conjugates

[0183] In some embodiments, the antibodies of the invention are conjugated. In some embodiments, the conjugated antibodies are useful for cancer therapeutics, cancer diagnosis, or imaging of cancerous cells.

[0184] For diagnostic applications, the antibody typically will be labeled with a detectable moiety. Numerous labels are available which can be generally grouped into the following categories:
[0185] (a) Radionuclides such as those discussed infra. The antibody can be labeled, for example, with the radioisotope using the techniques described in Current Protocols in Immunology, Volumes 1 and 2, Coligen et al., Ed. Wiley-Interscience, New York, N.Y., Pubs. (1991) for example and radioactivity can be measured using scintillation counting.
[0186] (b) Fluorescent labels such as rare earth chelates (europium chelates) or fluorescein and its derivatives, rhodamine and its derivatives, dansyl, Lissamine, phycoerythrin and Texas Red are available. The fluorescent labels can be conjugated to the antibody using the techniques disclosed in Current Protocols in Immunology, supra, for example. Fluorescence can be quantified using a fluorimeter.
[0187] (c) Various enzyme-substrate labels are available and U.S. Pat. No. 4,275,149 provides a review of some of these. The enzyme generally catalyzes a chemical alteration of the chromogenic substrate which can be measured using various techniques. For example, the enzyme may catalyze a color change in a substrate, which can be measured spectrophotometrically. Alternatively, the enzyme may alter the fluorescence or chemiluminescence of the substrate. Techniques for quantifying a change in fluorescence are described above. The chemiluminescent substrate becomes electronically excited by a chemical reaction and may then emit light which can be measured (using a chemiluminometer, for example) or donates energy to a fluorescent acceptor. Examples of enzymatic labels include luciferases (e.g., firefly luciferase and bacterial luciferase; U.S. Pat. No. 4,737,456), luciferin, 2,3-dihydrophthalazinediones, malate dehydrogenase, urease, peroxidase such as horseradish peroxidase (HRPO), alkaline phosphatase, beta.-galactosidase, glucoamylase, lysozyme, saccharide oxidases (e.g., glucose oxidase, galactose oxidase, and glucose-6-phosphate dehydrogenase), heterocyclic oxidases (such as uricase and xanthine oxidase), lactoperoxidase, microperoxidase, and the like. Techniques for conjugating enzymes to antibodies are described in O'Sullivan et al., Methods for the Preparation of Enzyme-Antibody Conjugates for use in Enzyme Immunoassay, in Methods in Enzym. (ed J. Langone & H. Van Vunakis), Academic press, New York, 73:147-166 (1981).

[0188] The antibodies may also be used for in vivo diagnostic assays. In some embodiments, the antibody is labeled with a radionuclide so that the tumor can be localized using immunoscintiography. As a matter of convenience, the antibodies of the present invention can be provided in a kit, i. e., a packaged combination of reagents in predetermined amounts with instructions for performing the diagnostic assay. Where the antibody is labeled with an enzyme, the kit may include substrates and cofactors required by the enzyme (e.g., a substrate precursor which provides the detectable chromophore or fluorophore). In addition, other additives may be included such as stabilizers, buffers (e.g., a block buffer or lysis buffer) and the like. The relative amounts of the various reagents may be varied widely to provide for concentrations in solution of the reagents which substantially optimize the sensitivity of the assay. Particularly, the reagents may be provided as dry powders, usually lyophilized, including excipients which on dissolution will provide a reagent solution having the appropriate concentration.

[0189] In some embodiments, antibodies are conjugated to one or more maytansine molecules (e.g. about 1 to about 10 maytansine molecules per antibody molecule). Maytansine may, for example, be converted to May-SS-Me which may be reduced to May-SH3 and reacted with modified antibody (Chari et al. Cancer Research 52: 127-131 (1992)) to generate a maytansinoid-antibody immunoconjugate. In some embodiments, the conjugate may be the highly potent maytansine derivative DM1 (N2′-deacetyl-N2′-(3-mercapto-1-oxopropyl)-maytansine) (see for example WO02/098883 published Dec. 12, 2002) which has an IC50 of approximately 10-11 M (review, see Payne (2003) Cancer Cell 3:207-212) or DM4 (N2′-deacetyl-N2′(4-methyl-4-mercapto-1-oxopentyl)-maytansine) (see for example WO2004/103272 published Dec. 2, 2004).

[0190] In some embodiments the antibody conjugate comprises an anti-tumor cell antigen antibody conjugated to one or more calicheamicin molecules. The calicheamicin family of antibiotics is capable of producing double-stranded DNA breaks at sub-picomolar concentrations. Structural analogues of calicheamicin which may be used include, but are not limited to, gamma₁I, alpha₂I, alpha₃I, N-acetyl-gamma₁I, PSAG and thetaI₁ (Hinman et al. Cancer Research 53: 3336-3342 (1993) and Lode et al. Cancer Research 58: 2925-2928 (1998)). See, also, U.S. Pat. Nos. 5,714,586; 5,712,374; 5,264,586; and 5,773,001, each of which is expressly incorporated herein by reference.

[0191] In some embodiments the antibody is conjugated to a prodrug capable of being release in its active form by enzymes overproduced in many cancers. For example, antibody conjugates can be made with a prodrug form of doxorubicin wherein the active component is released from the conjugate by plasmin. Plasmin is known to be over produced in many cancerous tissues (see Decy et al, (2004) FASEB Journal 18(3): 565-567).

[0192] In some embodiments the antibodies are conjugated to enzymatically active toxins and fragments thereof. In some embodiments the toxins include, without limitation, diphtheria A chain, nonbinding active fragments of diphtheria toxin, exotoxin A chain (from Pseudomonas aeruginosa), Pseudomonas endotoxin, ricin A chain, abrin A chain, modeccin A chain, alpha-sarcin, Aleurites fordii proteins, dianthin proteins, Phytolaca americana proteins (PAPI, PAPII, and PAP-S), Ribonuclease (Rnase), Deoxyribonuclease (Dnase), pokeweed antiviral protein, momordica charantia inhibitor, curcin, crotin, sapaonaria officinalis inhibitor, gelonin, mitogellin, restrictocin; phenomycin, neomycin and the tricothecenes. See, for example, WO 93/21232 published Oct.28, 1993. In some embodiments the toxins have low intrinsic immunogenicity and a mechanism of action (e.g. a cytotoxic mechanism versus a cytostatic mechanism) that reduces the opportunity for the cancerous cells to become resistant to the toxin.

[0193] In some embodiments conjugates made between the antibodies of the invention and immunomodulators. For example, in some embodiments immunostimulatory oligonucleotides can be used. These molecules are potent immunogens that can elicit antigen-specific antibody responses (see Datta et al, (2003) Ann N.Y. Acad. Sci 1002: 105-111). Additional immunomodulatory compounds can include stem cell growth factor such as “S1 factor”, lymphotoxins such as tumor necrosis factor (TNF), hernatopoietic factor such as an interleukin, colony stimulating factor (CSF) such as granulocyte-colony stimulating factor (G-CSF) or granulocyte macrophage-stimulating factor (GM-CSF), interferon (IFN) such as interferon alpha, beta or gamma, erythropoietin, and thrombopoietin.

[0194] In some embodiments radioconjugated antibodies are provided. In some embodiments such antibodies can be made using ³²P, ³³P, ⁴⁷Sc, ⁵⁹Fe, ⁶⁴Cu, ⁶⁷Cu, ⁷⁵Se, ⁷⁷As, ⁸⁹Sr, ⁹⁰Y, ⁹⁹Mo, ¹⁰⁵Rh, ¹⁰⁹Pd, ¹²⁵I, ¹³¹I, ¹⁴²Pr, ¹⁴³Pr, ¹⁴⁹Pm, ¹⁵³Sm, ¹⁶¹Th, ¹⁶⁶Ho, ¹⁶⁹Er, ¹⁷⁷Lu, ¹⁸⁶Re, ¹⁸⁸Re, ¹⁸⁹Re, ¹⁹⁴Ir, ¹⁹⁸Au, ¹⁹⁹Au, ²¹¹Pb, ²¹²Pb, ²¹³Bi, ⁵⁸Co, ⁶⁷Ga, ^{80m}Br, ^{99m}Tc ^{103m}Rh ¹⁰⁹Pt, ¹⁶¹Ho, ^{189m}Os, ¹⁹²Ir, ¹⁵²Dy, ²¹²At, ²¹²Bi, ²²³Ra, ²¹⁹Rn ²¹⁵Po, ²¹¹Bi, ²²⁵Ac, ²²¹Fr, ²¹⁷At, ²¹³Bi, ²⁵⁵Fm and combinations and subcombinations thereof. In some embodiments, boron, gadolinium or uranium atoms are conjugated to the antibodies. In some embodiments the boron atom is ¹⁰B, the gadolinium atom is ¹⁵⁷Gd and the uranium atom is ²³⁵U.

[0195] In some embodiments the radionuclide conjugate has a radionuclide with an energy between 20 and 10,000 keV. The radionuclide can be an Auger emitter, with an energy of less than 1000 keV, a P emitter with an energy between 20 and 5000 keV, or an alpha or ‘a’ emitter with an energy between 2000 and 10,000 keV.

[0196] In some embodiments diagnostic radioconjugates are provided which comprise a radionuclide that is a gamma- beta- or positron-emitting isotope. In some embodiments the radionuclide has an energy between 20 and 10,000 keV. In some embodiments the radionuclide is selected from the group of ¹⁸F, ⁵¹Mn, ^{52m}Mn, ⁵²Fe, ⁵⁵Co, ⁶²Cu, ⁶⁴Cu, ⁶⁸Ga, ⁷²Br, ⁷⁵Br, ⁷⁶Br, ^{82m}Rb, ⁸³Sr, ⁸⁶y, ⁸⁹Zr, ^{94m}Tc, ⁵¹Cr, ⁵⁷Co, ⁵⁸Co, ⁵⁹Fe, ⁶⁷CU, ⁶⁷Ga, ⁷⁵Se, ⁹⁷Ru, ^{99m}Tc, ^{14m}In, ¹²³I ¹²⁵I, ¹³Li and ¹⁹⁷Hg.

[0197] In some embodiments the antibodies of the invention are conjugated to diagnostic agents that are photoactive or contrast agents. Photoactive compounds can comprise compounds such as chromagens or dyes. Contrast agents may be, for example a paramagnetic ion, wherein the ion comprises a metal selected from the group of chromium (III), manganese (II), iron (III), iron (II), cobalt (II), nickel (II), copper (II), neodymium (III), samarium (III), ytterbium (III), gadolinium (III), vanadium (II), terbium (III), dysprosium (III), holmium (III) and erbium (III). The contrast agent may also be a radio-opaque compound used in X-ray techniques or computed tomography, such as an iodine, iridium, barium, gallium and thallium compound. Radio-opaque compounds may be selected from the group of barium, diatrizoate, ethiodized oil, gallium citrate, iocarmic acid, iocetamic acid, iodamide, iodipamide, iodoxamic acid, iogulamide, iohexol, iopamidol, iopanoic acid, ioprocemic acid, iosefamic acid, ioseric acid, iosulamide meglumine, iosemetic acid, iotasul, iotetric acid, iothalamic acid, iotroxic acid, ioxaglic acid, ioxotrizoic acid, ipodate, meglumine, metrizamide, metrizoate, propyliodone, and thallous chloride. In some embodiments, the diagnostic immunoconjugates may contain ultrasound-enhancing agents such as a gas filled liposome that is conjugated to an antibody of the invention. Diagnostic immunoconjugates may be used for a variety of procedures including, but not limited to, intraoperative, endoscopic or intravascular methods of tumor or cancer diagnosis and detection.

[0198] In some embodiments antibody conjugates are made using a variety of bifunctional protein coupling agents such as N-succinimidyl-3-(2-pyridyldithiol) propionate (SPDP), succinimidyl-4-(N-maleimidomethyl) cyclohexane-l-carboxylate, iminothiolane (IT), bifunctional derivatives of imidoesters (such as dimethyl adipimidate HCL), active esters (such as disuccinimidyl suberate), aldehydes (such as glutareldehyde), bis-azido compounds (such as bis (p-azidobenzoyl) hexanediamine), bis-diazonium derivatives (such as bis-(p-diazoniumbenzoyl)-ethylenediamine), diisocyanates (such as tolyene 2,6-diisocyanate), and bis-active fluorine compounds (such as 1,5-difluoro-2,4-dinitrobenzene). For example, a ricin immunotoxin can be prepared as described in Vitetta et al. Science 238: 1098 (1987). Carbon-14-labeled 1-isothiocyanatobenzyl-3-methyldiethylene triaminepentaacetic acid (MX-DTPA) is an exemplary chelating agent for conjugation of radionucleotide to the antibody. See WO94/11026. The linker may be a “cleavable linker” facilitating release of the cytotoxic drug in the cell. For example, an acid-labile linker, peptidase-sensitive linker, dimethyl linker or disulfide-containing linker (Chari et al. Cancer Research 52: 127-131 (1992)) may be used. Agents may be additionally be linked to the antibodies of the invention through a carbohydrate moiety.

[0199] In some embodiments fusion proteins comprising the antibodies of the invention and cytotoxic agents may be made, e.g. by recombinant techniques or peptide synthesis. In some embodiments such immunoconjugates comprising the anti-tumor antigen antibody conjugated with a cytotoxic agent are administered to the patient. In some embodiments the immunoconjugate and/or tumor cell antigen protein to which it is bound is/are internalized by the cell, resulting in increased therapeutic efficacy of the immunoconjugate in killing the cancer cell to which it binds. In some embodiments, the cytotoxic agent targets or interferes with nucleic acid in the cancer cell. Examples of such cytotoxic agents include maytansinoids, calicheamicins, ribonucleases and DNA endonucleases.

[0200] In some embodiments the antibodies are conjugated to a “receptor” (such as streptavidin) for utilization in tumor pretargeting wherein the antibody-receptor conjugate is administered to the patient, followed by removal of unbound conjugate from the circulation using a clearing agent and then administration of a “ligand” (e.g. avidin) which is conjugated to a cytotoxic agent (e.g. a radionucleotide).

[0201] In some embodiments the antibodies are conjugated conjugated to a cytotoxic molecule which is released inside a target cell lysozome. For example, the drug monomethyl auristatin E (MMAE) can be conjugated via a valine-citrulline linkage which will be cleaved by the proteolytic lysozomal enzyme cathepsin B following internalization of the antibody conjugate (see for example WO03/026577 published Apr. 3, 2003). In some embodiments, the MMAE can be attached to the antibody using an acid-labile linker containing a hydrazone functionality as the cleavable moiety (see for example WO02/088172 published Nov. 11, 2002).

Antibody Dependent Enzyme Mediated Prodrug Therapy (ADEPT)

[0202] In some embodiments the antibodies of the present invention may also be used in ADEPT by conjugating the antibody to a prodrug-activating enzyme which converts a prodrug (e.g. a peptidyl chemotherapeutic agent, see WO81/01145) to an active anti-cancer drug. See, for example, WO 88/07378 and U.S. Pat. No.4,975,278.

[0203] In some embodiments the enzyme component of the immunoconjugate useful for ADEPT includes any enzyme capable of acting on a prodrug in such a way so as to covert it into its more active, cytotoxic form.

[0204] Enzymes that are useful in ADEPT include, but are not limited to, alkaline phosphatase useful for converting phosphate-containing prodrugs into free drugs; arylsulfatase useful for converting sulfate-containing prodrugs into free drugs; cytosine deaminase useful for converting non-toxic 5-fluorocytosine into the anti-cancer drug, 5-fluorouracil; proteases, such as serratia protease, thermolysin, subtilisin, carboxypeptidases and cathepsins (such as cathepsins B and L), that are useful for converting peptide-containing prodrugs into free drugs; D-alanylcarboxypeptidases, useful for converting prodrugs that contain D-amino acid substituents; carbohydrate-cleaving enzymes such as .beta.-galactosidase and neuraminidase useful for converting glycosylated prodrugs into free drugs; .beta.-lactamase useful for converting drugs derivatized with .beta.-lactams into free drugs; and penicillin amidases, such as penicillin V amidase or penicillin G amidase, useful for converting drugs derivatized at their amine nitrogens with phenoxyacetyl or phenylacetyl groups, respectively, into free drugs. In some embodiments antibodies with enzymatic activity, also known in the art as “abzymes”, can be used to convert the prodrugs of the invention into free active drugs (see, e.g., Massey, Nature 328: 457-458 (1987)). Antibody-abzyme conjugates can be prepared as described herein for delivery of the abzyme to a tumor cell population.

[0205] In some embodiments the ADEPT enzymes can be covalently bound to the antibodies by techniques well known in the art such as the use of the heterobifunctional crosslinking reagents discussed above. In some embodiments, fusion proteins comprising at least the antigen binding region of an antibody of the invention linked to at least a functionally active portion of an enzyme of the invention can be constructed using recombinant DNA techniques well known in the art (see, e.g., Neuberger et al., Nature, 312: 604-608 (1984).

[0206] In some embodiments identification of an antibody that acts in a cytostatic manner rather than an cytotoxic manner can be accomplished by measuring viability of a treated target cell culture in comparison with a non-treated control culture. Viability can be detected using methods known in the art such as the CellTiter-Blue® Cell Viability Assay or the CellTiter-Glo® Luminescent Cell Viability Assay (Promega, catalog numbers G8080 and G5750 respectively). In some embodiments an antibody is considered as potentially cytostatic if treatment causes a decrease in cell number in comparison to the control culture without any evidence of cell death as measured by the means described above.

[0207] In some embodiments an in vitro screening assay can be performed to identify an antibody that promotes ADCC using assays known in the art. One exemplary assay is the In Vitro ADCC Assay. To prepare chromium 51-labeled target cells, tumor cell lines are grown in tissue culture plates and harvested using sterile 10 mM EDTA in PBS. The detached cells are washed twice with cell culture medium. Cells (5×10⁶) are labeled with 200 μCi of chromium 51 (New England Nuclear/DuPont) at 37° C. for one hour with occasional mixing. Labeled cells were washed three times with cell culture medium, then are resuspended to a concentration of 1×10⁵ cells/mL. Cells are used either without opsonization, or are opsonized prior to the assay by incubation with test antibody at 100 ng/mL and 1.25 ng/mL in PBMC assay or 20 ng/mL and 1 ng/mL in NK assay. Peripheral blood mononuclear cells are prepared by collecting blood on heparin from normal healthy donors and diluted with an equal volume of phosphate buffered saline (PBS). The blood is then layered over LYMPHOCYTE SEPARATION MEDIUM(& (LSM: Organon Teknika) and centrifuged according to the manufacturer's instructions. Mononuclear cells are collected from the LSM-plasma interface and are washed three times with PBS. Effector cells are suspended in cell culture medium to a final concentration of 1×10⁷ cells/mL. After purification through LSM, natural killer (NK) cells are isolated from PBMCs by negative selection using an NK cell isolation kit and a magnetic column (Miltenyi Biotech) according to the manufacturer's instructions. Isolated NK cells are collected, washed and resuspended in cell culture medium to a concentration of 2×10⁶ cells/mL. The identity of the NK cells is confirmed by flow cytometric analysis. Varying effector:target ratios are prepared by serially diluting the effector (either PBMC or NK) cells two-fold along the rows of a microtiter plate (100μL final volume) in cell culture medium. The concentration of effector cells ranges from 1.0×10⁷/mL to 2.0×10⁴/mL for PBMC and from 2.0×10⁶/mL to 3.9×10³/mL for NK. After titration of effector cells, 100 μL of ⁵¹Cr-labeled target cells (opsonized or nonoponsonized) at 1×10⁵ cells/mL are added to each well of the plate. This results in an initial effector:target ratio of 100:1 for PBMC and 20:1 for NK cells. All assays are run in duplicate, and each plate contains controls for both spontaneous lysis (no effector cells) and total lysis (target cells plus 100 μL 1% sodium dodecyl sulfate, 1 N sodium hydroxide). The plates are incubated at 37° C. for 18 hours, after which the cell culture supernatants are harvested using a supernatant collection system (Skatron Instrument, Inc.) and counted in a Minaxi auto-gamma 5000 series gamma counter (Packard) for one minute. Results are then expressed as percent cytotoxicity using the formula: % Cytotoxicity=(sample cpm-spontaneous lysis)/(total lysis-spontaneous lysis)×100.

[0208] To identify an antibody that promotes CDC, the skilled artisan may perform an assay known in the art. One exemplary assay is the In Vitro CDC assay. In vitro, CDC activity can be measured by incubating tumor cell antigen expressing cells with human (or alternate source) complement-containing serum in the absence or presence of different concentrations of test antibody. Cytotoxicity is then measured by quantifying live cells using ALAMAR BLUE® (Gazzano-Santoro et al., J. Immunol. Methods 202 163-171 (1997)). Control assays are performed without antibody, and with antibody, but using heat inactivated serum and/or using cells which do not express the tumor cell antigen in question. Alternatively, red blood cells can be coated with tumor antigen or peptides derived from tumor antigen, and then CDC may be assayed by observing red cell lysis (see for example Karjalainen and Mantyjarvi, Acta Pathol Microbiol Scand [C]. 1981 Oct; 89(5):315-9).

[0209] To select for antibodies that induce cell death, loss of membrane integrity as indicated by, e.g., PI, trypan blue or 7AAD uptake may be assessed relative to control. One exemplary assay is the PI uptake assay using tumor antigen expressing cells. According to this assay, tumor cell antigen expressing cells are cultured in Dulbecco's Modified Eagle Medium (D-MEM):Ham's F-12 (50:50) supplemented with 10% heat-inactivated FBS (Hyclone) and 2 mM L-glutarnine. (Thus, the assay is performed in the absence of complement and immune effector cells). The tumor cells are seeded at a density of 3×10⁶ per dish in 100×20 mm dishes and allowed to attach overnight. The medium is then removed and replaced with fresh medium alone or medium containing 10 μg/mL of the appropriate monoclonal antibody. The cells are incubated for a 3 day time period. Following each treatment, monolayers are washed with PBS and detached by trypsinization. Cells are then centrifuged at 1200 rpm for 5 minutes at 4.degree. C., the pellet resuspended in 3 mL ice cold Ca²⁺ binding buffer (10 mM Hepes, pH 7.4, 140 mM NaCl, 2.5 mM CaCl₂) and aliquoted into 35 mm strainer-capped 12×75 tubes (1 mL per tube, 3 tubes per treatment group) for removal of cell clumps. Tubes then receive PI (10 μg/mL). Samples may be analyzed using a FACSCAN™ flow cytometer and FACSCONVER™. CellQuest software (Becton Dickinson). Those antibodies that induce statistically significant levels of cell death as determined by PI uptake may be selected as cell death-inducing antibodies.

[0210] Antibodies can also be screened in vivo for apoptotic activity using ¹⁸F-annexin as a PET imaging agent. In this procedure, Annexin V is radiolabeled with ¹⁸F and given to the test animal following dosage with the antibody under investigation. One of the earliest events to occur in the apoptotic process in the eversion of phosphatidylserine from the inner side of the cell membrane to the outer cell surface, where it is accessible to annexin. The animals are then subjected to PET imaging (see Yagle et al, J Nucl Med. 2005 Apr;46(4):658-66). Animals can also be sacrificed and individual organs or tumors removed and analyzed for apoptotic markers following standard protocols.

[0211] While in some embodiments cancer may be characterized by overexpression of a gene expression product, the present application further provides methods for treating cancer which is not considered to be a tumor antigen-overexpressing cancer. To determine tumor antigen expression in the cancer, various diagnostic/prognostic assays are available. In some embodiments, gene expression product overexpression can be analyzed by IHC. Paraffin embedded tissue sections from a tumor biopsy may be subjected to the IHC assay and accorded a tumor antigen protein staining intensity criteria as follows:
[0212] Score 0: no staining is observed or membrane staining is observed in less than 10% of tumor cells.
[0213] Score 1+: a faint/barely perceptible membrane staining is detected in more than 10% of the tumor cells. The cells are only stained in part of their membrane.
[0214] Score 2+: a weak to moderate complete membrane staining is observed in more than 10% of the tumor cells.
[0215] Score 3+: a moderate to strong complete membrane staining is observed in more than 10% of the tumor cells.

[0216] Those tumors with 0 or 1+ scores for tumor antigen overexpression assessment may be characterized as not overexpressing the tumor antigen, whereas those tumors with 2+ or 3+ scores may be characterized as overexpressing the tumor antigen.

[0217] Alternatively, or additionally, FISH assays such as the INFORM™ (sold by Ventana, Ariz.) or PATHVISION™ (Vysis, Ill.) may be carried out on formalin-fixed, paraffin-embedded tumor tissue to determine the extent (if any) of tumor antigen overexpression in the tumor.

[0218] Additionally, antibodies can be chemically modified by covalent conjugation to a polymer to increase their circulating half-life, for example. Each antibody molecule may be attached to one or more (i.e. 1, 2, 3, 4, 5 or more) polymer molecules. Polymer molecules are preferably attached to antibodies by linker molecules. The polymer may, in general, be a synthetic or naturally occurring polymer, for example an optionally substituted straight or branched chain polyalkene, polyalkenylene or polyoxyalkylene polymer or a branched or unbranched polysaccharide, e.g. homo- or hetero-polysaccharide. In some embodiments the polymers are polyoxyethylene polyols and polyethylene glycol (PEG). PEG is soluble in water at room temperature and has the general formula: R(O—H₂—CH₂)ₙ O—R where R can be hydrogen, or a protective group such as an alkyl or alkanol group. In some embodiments, the protective group has between 1 and 8 carbons. In some embodiments the protective group is methyl. The symbol n is a positive integer, between 1 and 1,000, or 2 and 500. In some embodiments the PEG has an average molecular weight between 1000 and 40,000, between 2000 and 20,000, or between 3,000 and 12,000. In some embodiments, PEG has at least one hydroxy group. In some embodiments the hydroxy is a terminal hydroxy group. In some embodiments it is this hydroxy group which is activated to react with a free amino group on the inhibitor. However, it will be understood that the type and amount of the reactive groups may be varied to achieve a covalently conjugated PEG/antibody of the present invention. Polymers, and methods to attach them to peptides, are shown in U.S. Pat. No. 4,766, 106; 4,179, 337; 4,495, 285; and 4,609, 546 each of which is hereby incorporated by reference in its entirety.

### Labelling and Detection

[0219] In some embodiments, the cancer-associated nucleic acids, proteins and antibodies of the invention are labeled. It is noted that many of the examples of conjugates discussed supra are also relevant to non-antibodies. To the extent such examples and relevant they are incorporated herein.

[0220] By “labeled” herein is meant that a compound has at least one element, isotope or chemical compound attached to enable the detection of the compound. In general, labels fall into three classes: a) isotopic labels, which may be radioactive or heavy isotopes; b) immune labels, which may be antibodies or antigens; and c) coloured or fluorescent dyes. The labels may be incorporated into the cancer-associated nucleic acids, proteins and antibodies at any position. For example, the label should be capable of producing, either directly or indirectly, a detectable signal. The detectable moiety may be a radioisotope, such as ³H, ¹⁴C, ³²P, ³⁵S, or ¹²⁵, a fluorescent or chemiluminescent compound, such as fluorescein isothiocyanate, rhodamine, or luciferin, or an enzyme, such as alkaline phosphatase, beta-galactosidase or horseradish peroxidase. Any method known in the art for conjugating the antibody to the label may be employed, including those methods described by Hunter et al., Nature, 144:945 (1962); David et al., Biochemistry, 13:1014 (1974); Pain et al., J. Immunol. Meth., 40:219 (1981); and Nygren, J. Histochem. and Cytochem., 30:407 (1982).

[0221] Detection of the expression product of interest can be accomplished using any detection method known to those of skill in the art. “Detecting expression” or “detecting the level of” is intended to mean determining the quantity or presence of a biomarker protein or gene in the biological sample. Thus, “detecting expression” encompasses instances where a biomarker is determined not to be expressed, not to be detectably expressed, expressed at a low level, expressed at a normal level, or overexpressed. In some embodiments, in order to determine the effect of an anti-tumor cell antigen therapeutic, a test biological sample comprising tumor cell antigen-expressing neoplastic cells is contacted with the anti-tumor cell antigen therapeutic agent for a sufficient time to allow the therapeutic agent to exert a cellular response, and then expression level of one or more biomarkers of interest in that test biological sample is compared to the expression level in the control biological sample in the absence of the anti-tumor cell antigen therapeutic agent. In some embodiments, the control biological sample of neoplastic cells is contacted with a neutral substance or negative control. For example, in some embodiments, a non-specific immunoglobulin, for example IgG1, which does not bind to tumor cell antigen serves as the negative control. Detection can occur over a time course to allow for monitoring of changes in expression products over time. Detection can also occur with exposure to different concentrations of the anti-tumor cell antigen therapeutic agent to generate a “dose-response” curve for any given biomarker of interest.

Detection of Cancer Phenotype

[0222] Once expressed and, if necessary, purified, the cancer-associated proteins and nucleic acids are useful in a number of applications. In some embodiments, the expression levels of genes are determined for different cellular states in the cancer phenotype; that is, the expression levels of genes in normal tissue and in cancer tissue (and in some cases, for varying severities of lymphoma that relate to prognosis, as outlined below) are evaluated to provide expression profiles. An expression profile of a particular cell state or point of development is essentially a “fingerprint” of the state; while two states may have any particular gene similarly expressed, the evaluation of a number of genes simultaneously allows the generation of a gene expression profile that is unique to the state of the cell. By comparing expression profiles of cells in different states, information regarding which genes are important (including both up- and down-regulation of genes) in each of these states is obtained. Then, diagnosis may be done or confirmed: does tissue from a particular patient have the gene expression profile of normal or cancer tissue.

[0223] “Differential expression,” or equivalents used herein, refers to both qualitative as well as quantitative differences in the temporal and/or cellular expression patterns of genes, within and among the cells. Thus, a differentially expressed gene can qualitatively have its expression altered, including an activation or inactivation, in, for example, normal versus cancer tissue. That is, genes may be turned on or turned off in a particular state, relative to another state. As is apparent to the skilled artisan, any comparison of two or more states can be made. Such a qualitatively regulated gene will exhibit an expression pattern within a state or cell type which is detectable by standard techniques in one such state or cell type, but is not detectable in both. Alternatively, the determination is quantitative in that expression is increased or decreased; that is, the expression of the gene is either up-regulated, resulting in an increased amount of transcript, or down-regulated, resulting in a decreased amount of transcript. The degree to which expression differs need only be large enough to quantify via standard characterization techniques as outlined below, such as by use of Affymetrix GeneChip® expression arrays, Lockhart, Nature Biotechnology, 14:1675-1680 (1996), hereby expressly incorporated by reference. Other techniques include, but are not limited to, quantitative reverse transcriptase PCR, Northern analysis and RNase protection. As outlined above, the change in expression (i.e. upregulation or downregulation) is at least about 2-fold, 3-fold, 5-fold, 10-fold, 20-fold, 50-fold, or even 100 fold or more.

[0224] As will be appreciated by those in the art, this may be done by evaluation at either the gene transcript, or the protein level; that is, the amount of gene expression may be monitored using nucleic acid probes to the DNA or RNA equivalent of the gene transcript, and the quantification of gene expression levels, or, alternatively, the final gene product itself (protein) can be monitored, for example through the use of antibodies to the cancer-associated protein and standard immunoassays (ELISAs, etc.) or other techniques, including mass spectroscopy assays, 2D gel electrophoresis assays, etc. Thus, the proteins corresponding to cancer-associated genes, i.e. those identified as being important in a particular cancer phenotype, i.e., lymphoma, can be evaluated in a diagnostic test specific for that cancer.

[0225] In some embodiments, gene expression monitoring is performed and a number of genes are monitored simultaneously. However, multiple protein expression monitoring can be done as well to prepare an expression profile. Alternatively, these assays may be done on an individual basis.

[0226] In some embodiments, the cancer-associated nucleic acid probes may be attached to biochips as outlined herein for the detection and quantification of cancer-associated sequences in a particular cell. The assays are done as is known in the art. As will be appreciated by those in the art, any number of different cancer-associated sequences may be used as probes, with single sequence assays being used in some cases, and a plurality of the sequences described herein being used in other embodiments. In addition, while solid-phase assays are described, any number of solution based assays may be done as well.

[0227] In some embodiments, both solid and solution based assays may be used to detect cancer-associated sequences that are up-regulated or down-regulated in cancers as compared to normal tissue. In instances where the cancer-associated sequence has been altered but shows the same expression profile or an altered expression profile, the protein will be detected as outlined herein.

[0228] In some embodiments nucleic acids encoding the cancer-associated protein are detected. Although DNA or RNA encoding the cancer-associated protein may be detected, of particular interest are methods wherein the mRNA encoding a cancer-associated protein is detected. The presence of mRNA in a sample is an indication that the cancer-associated gene has been transcribed to form the mRNA, and suggests that the protein is expressed. Probes to detect the mRNA can be any nucleotide/deoxynucleotide probe that is complementary to and base pairs with the mRNA and includes but is not limited to oligonucleotides, cDNA or RNA. Probes also should contain a detectable label, as defined herein. In one method the mRNA is detected after immobilizing the nucleic acid to be examined on a solid support such as nylon membranes and hybridizing the probe with the sample. Following washing to remove the non-specifically bound probe, the label is detected. In another method detection of the mRNA is performed in situ. In this method permeabilized cells or tissue samples are contacted with a detectably labeled nucleic acid probe for sufficient time to allow the probe to hybridize with the target mRNA. Following washing to remove the non-specifically bound probe, the label is detected. For example a digoxygenin labeled riboprobe (RNA probe) that is complementary to the mRNA encoding a cancer-associated protein is detected by binding the digoxygenin with an anti-digoxygenin secondary antibody and developed with nitro blue tetrazolium and 5-bromo-4-chloro-3-indoyl phosphate.

[0229] Any of the three classes of proteins as described herein (secreted, transmembrane or intracellular proteins) may be used in diagnostic assays. The cancer-associated proteins, antibodies, nucleic acids, modified proteins and cells containing cancer-associated sequences are used in diagnostic assays. This can be done on an individual gene or corresponding polypeptide level, or as- sets of assays.

[0230] As described and defined herein, cancer-associated proteins find use as markers of cancers, including leukemia, breast cancer, colon cancer, kidney cancer, liver cancer, lung cancer, ovary cancer, pancreatic cancer, prostate cancer, uterine cancer, cervical cancer, skin cancer and lymphomas such as, but not limited to, Hodgkin's and non-Hodgkin's lymphoma. Detection of these proteins in putative cancer tissue or patients allows for a determination or diagnosis of the type of cancer. Numerous methods known to those of ordinary skill in the art find use in detecting cancers.

[0231] Antibodies may be used to detect cancer-associated proteins. One method separates proteins from a sample or patient by electrophoresis on a gel (typically a denaturing and reducing protein gel, but may be any other type of gel including isoelectric focusing gels and the like). Following separation of proteins, the cancer-associated protein is detected by immunoblotting with antibodies raised against the cancer-associated protein. Methods of immunoblotting are well known to those of ordinary skill in the art. The antibodies used in such methods may be labeled as described above.

[0232] In some methods, antibodies to the cancer-associated protein find use in in situ imaging techniques. In this method cells are contacted with from one to many antibodies to the cancer-associated protein(s). Following washing to remove non-specific antibody binding, the presence of the antibody or antibodies is detected. In some embodiments the antibody is detected by incubating with a secondary antibody that contains a detectable label. In another method the primary antibody to the cancer-associated protein(s) contains a detectable label. In another method, each one of multiple primary antibodies contains a distinct and detectable label. This method finds particular use in simultaneous screening for a plurality of cancer-associated proteins. As will be appreciated by one of ordinary skill in the art, numerous other histological imaging techniques are useful in the invention.

[0233] The label may be detected in a fluorometer that has the ability to detect and distinguish emissions of different wavelengths. In addition, a fluorescence activated cell sorter (FACS) can be used in the method.

[0234] Antibodies may be used in diagnosing cancers from blood samples. As previously described, certain cancer-associated proteins are secreted/circulating molecules. Blood samples, therefore, are useful as samples to be probed or tested for the presence of secreted cancer-associated proteins. Antibodies can be used to detect the cancer-associated proteins by any of the previously described immunoassay techniques including ELISA, immunoblotting (Western blotting), immunoprecipitation, BIACORE technology and the like, as will be appreciated by one of ordinary skill in the art.

[0235] In situ hybridization of labeled cancer-associated nucleic acid probes to tissue arrays may be carried out. For example, arrays of tissue samples, including cancer-associated tissue and/or normal tissue, are made. In situ hybridization as is known in the art can then be done.

[0236] It is understood that when comparing the expression fingerprints between an individual and a standard, the skilled artisan can make a diagnosis as well as a prognosis. It is further understood that the genes that indicate diagnosis may differ from those that indicate prognosis.

[0237] As noted above, the cancer-associated proteins, antibodies, nucleic acids, modified proteins and cells containing cancer-associated sequences can be used in prognosis assays. As above, gene expression profiles can be generated that correlate to cancerseverity, in terms of long term prognosis. Again, this may be done on either a protein or gene level. As above, the cancer-associated probes may be attached to biochips for the detection and quantification of cancer-associated sequences in a tissue or patient. The assays proceed as outlined for diagnosis.

Screening Assays

[0238] Any of the cancer-associated gene sequences as described herein may be used in drug screening assays. The cancer-associated proteins, antibodies, nucleic acids, modified proteins and cells containing cancer-associated gene sequences are used in drug screening assays or by evaluating the effect of drug candidates on a “gene expression profile” or expression profile of polypeptides. In one method, the expression profiles are used, preferably in conjunction with high throughput screening techniques to allow monitoring for expression profile genes after treatment with a candidate agent, Zlokarnik, et al., Science 279, 84-8 (1998), Heid, et al., Genome Res., 6:986-994 (1996).

[0239] In some embodiments, the cancer associated proteins, antibodies, nucleic acids, modified proteins and cells containing the native or modified cancer associated proteins are used in screening assays. That is, the present invention provides novel methods for screening for compositions that modulate the cancer phenotype. As above, this can be done by screening for modulators of gene expression or for modulators of protein activity. Similarly, this may be done on an individual gene or protein level or by evaluating the effect of drug candidates on a “gene expression profile”. In an embodimentsome embodiments, the expression profiles are used, sometimes in conjunction with high throughput screening techniques, to allow monitoring for expression profile genes after treatment with a candidate agent, see Zlokarnik, supra.

[0240] A variety of assays to evaluate the effects of agents on gene expression may be performed. In some embodiments, assays may be run on an individual gene or protein level. That is, candidate bioactive agents may be screened to modulate the gene's regulation. “Modulation” thus includes both an increase and a decrease in gene expression or activity. The amount of modulation will depend on the original change of the gene expression in normal versus tumor tissue, with changes of at least 10%, at least 50%, at least 100-300%, and at least 300-1000% or greater. Thus, if a gene exhibits a 4-fold increase in tumor compared to normal tissue, a decrease of about four fold may be desired; a 10-fold decrease in tumor compared to normal tissue gives a 10-fold increase in expression for a candidate agent is desired, etc. Alternatively, where the cancer-associated sequence has been altered but shows the same expression profile or an altered expression profile, the protein will be detected as outlined herein.

[0241] As will be appreciated by those in the art, this may be done by evaluation at either the gene or the protein level; that is, the amount of gene expression may be monitored using nucleic acid probes and the quantification of gene expression levels, or, alternatively, the level of the gene product itself can be monitored, for example through the use of antibodies to the cancer-associated protein and-standard immunoassays. Alternatively, binding and bioactivity assays with the protein may be done as outlined below.

[0242] In some embodiments, a number of genes are monitored simultaneously, i.e. an expression profile is prepared, although multiple protein expression monitoring can be done as well.

[0243] In some embodiments, the cancer-associated nucleic acid probes are attached to biochips as outlined herein for the detection and quantification of cancer-associated sequences in a particular cell. The assays are further described below.

[0244] In some embodiments a candidate bioactive agent is added to the cells prior to analysis. Moreover, screens are provided to identify a candidate bioactive agent that modulates a particular type of cancer, modulates cancer-associated proteins, binds to a cancer-associated protein, or interferes between the binding of a cancer-associated protein and an antibody.

[0245] The term “candidate bioactive agent” or “drug candidate” or grammatical equivalents as used herein describes any molecule, e.g., protein, oligopeptide, small organic or inorganic molecule, polysaccharide, polynucleotide, etc., to be tested for bioactive agents that are capable of directly or indirectly altering either the cancer phenotype, binding to and/or modulating the bioactivity of a cancer-associated protein, or the expression of a cancer-associated sequence, including both nucleic acid sequences and protein sequences. In some embodiments, the candidate agent suppresses a cancer-associated phenotype, for example to a normal tissue fingerprint. Similarly, the candidate agent preferably suppresses a severe cancer-associated phenotype. Generally a plurality of assay mixtures are run in parallel with different agent concentrations to obtain a differential response to the various concentrations. Typically, one of these concentrations serves as a negative control, i.e., at zero concentration or below the level of detection.

[0246] In some embodiments a candidate agent will neutralize the effect of a cancer-associated protein. By “neutralize” is meant that activity of a protein is either inhibited or counter acted against so as to have substantially no effect on a cell and hence reduce the severity of cancer, or prevent the incidence of cancer.

[0247] Candidate agents encompass numerous chemical classes, though typically they are organic or inorganic molecules, preferably small organic compounds having a molecular weight of more than 100 and less than about 2,500 Daltons. In some embodiments small molecules are less than 2000, less than 1500, less than 1000, or less than 500 Da. Candidate agents comprise functional groups necessary for structural interaction with proteins, particularly hydrogen bonding, and typically include at least an amine, carbonyl, hydroxyl or carboxyl group, preferably at least two of the functional chemical groups. The candidate agents often comprise cyclical carbon or heterocyclic structures and/or aromatic or polyaromatic structures substituted with one or more of the above functional groups. Candidate agents are also found among biomolecules including peptides, saccharides, fatty acids, steroids, purines, pyrimidines, derivatives, structural analogs or combinations thereof.

[0248] Candidate agents are obtained from a wide variety of sources including libraries of synthetic or natural compounds. For example, numerous means are available for random and directed synthesis of a wide variety of organic compounds and biomolecules, including expression of randomized oligonucleotides. In some embodiments libraries of natural compounds in the form of bacterial, fungal, plant and animal extracts are available or readily produced. Additionally, natural or synthetically produced libraries and compounds are readily modified through conventional chemical, physical and biochemical means. Known pharmacological agents may be subjected to directed or random chemical modifications, such as acylation, alkylation, esterification, or amidification to produce structural analogs.

[0249] In some embodiments, the candidate bioactive agents are proteins. By “protein” herein is meant at least two covalently attached amino acids, which includes proteins, polypeptides, oligopeptides and peptides. The protein may be made up of naturally occurring amino acids and peptide bonds, or synthetic peptidomimetic structures. Thus “amino acid”, or “peptide residue”, as used herein means both naturally occurring and synthetic amino acids. For example, homo-phenylalanine, citrulline and norleucine are considered amino acids for the purposes of the invention. “Amino acid” also includes imino acid residues such as proline and hydroxyproline. The side chains may be in either the (R) or the (S) configuration. In some embodiments, the amino acids are in the (S) or L-configuration. If non-naturally occurring side chains are used, non-amino acid substituents may be used, for example to prevent or retard in vivo degradations.

[0250] In some embodiments, the candidate bioactive agents are naturally occurring proteins or fragments of naturally occurring proteins. Thus, for example, cellular extracts containing proteins, or random or directed digests of proteinaceous cellular extracts, may be used. In this way libraries of prokaryotic and eukaryotic proteins may be made for screening in the methods of the invention. In some embodiments the libraries are of bacterial, fungal, viral, and mammalian proteins. In some embodiments the library is a human proteinlibrary.

[0251] In some embodiments, the candidate bioactive agents are peptides of from about 5 to about 30 amino acids, from about 5 to about 20 amino acids, or from about 7 to about 15 amino acids. The peptides may be digests of naturally occurring proteins as is outlined above, random peptides, or “biased” random peptides. By “randomized” or grammatical equivalents herein is meant that each nucleic acid and peptide consists of essentially random nucleotides and amino acids, respectively. Since generally these random peptides (or nucleic acids, discussed below) are chemically synthesized, they may incorporate any nucleotide or amino acid at any position. The synthetic process can be designed to generate randomized proteins or nucleic acids, to allow the formation of all or most of the possible combinations over the length of the sequence, thus forming a library of randomized candidate bioactive proteinaceous agents.

[0252] In some embodiments, the library is fully randomized, with no sequence preferences or constants at any position. In some embodiments, the library is biased. That is, some positions within the sequence are either held constant, or are selected from a limited number of possibilities. For example, in some embodiments, the nucleotides or amino acid residues are randomized within a defined class, for example, of hydrophobic amino acids, hydrophilic residues, sterically biased (either small or large) residues, towards the creation of nucleic acid binding domains, the creation of cysteines, for cross-linking, prolines for SH-3 domains, serines, threonines, tyrosines or histidines for phosphorylation sites, etc., or to purines, etc.

[0253] In some embodiments, the candidate bioactive agents are nucleic acids. As described generally for proteins, nucleic acid candidate bioactive agents may be naturally occurring nucleic acids, random nucleic acids, or “biased” random nucleic acids. In another embodiment, the candidate bioactive agents are organic chemical moieties, a wide variety of which are available in the literature.

[0254] In assays for testing alteration of the expression profile of one or more cancer-associated genes, after the candidate agent has been added and the cells incubated for some period of time, a nucleic acid sample containing the target sequences to be analyzed is prepared. The target sequence is prepared using known techniques (e.g., converted from RNA to labeled cDNA, as described above) and added to a suitable microarray. For example, an in vitro reverse transcription with labels covalently attached to the nucleosides is performed. In some embodiments the nucleic acids are labeled with a label as defined herein, especially with biotin-FITC or PE, Cy3 and Cy5.

[0255] As will be appreciated by those in the art, these assays can be direct hybridization assays or can comprise “sandwich assays”, which include the use of multiple probes, as is generally outlined in U.S. Pat. Nos. 5,681,702, 5,597,909, 5,545,730, 5,594,117, 5,591,584, 5,571,670, 5,580,731, 5,571,670, 5,591,584, 5,624,802, 5,635,352, 5,594,118, 5,359,100, 5,124,246 and 5,681,697, all of which are hereby incorporated by reference. In some embodiments, the target nucleic acid is prepared as outlined above, and then added to the biochip comprising a plurality of nucleic acid probes, under conditions that allow the formation of a hybridization complex.

[0256] A variety of hybridization conditions may be used in the present invention, including high, moderate and low stringency conditions as outlined above. The assays are generally run under stringency conditions that allow formation of the label probe hybridization complex only in the presence of target. Stringency can be controlled by altering a step parameter that is a thermodynamic variable, including, but not limited to, temperature, formamide concentration, salt concentration, chaotropic salt concentration, pH, organic solvent concentration, etc. These parameters may also be used to control non-specific binding, as is generally outlined in U.S. Pat. No. 5,681,697. Thus, in some embodiments certain steps are performed at higher stringency conditions to reduce non-specific binding.

[0257] The reactions outlined herein may be accomplished in a variety of ways, as will be appreciated by those in the art. Components of the reaction may be added simultaneously, or sequentially, in any order, with suggested embodiments outlined below. In addition, the reaction may include a variety of other reagents in the assays. These include reagents like salts, buffers, neutral proteins, e.g. albumin, detergents, etc which may be used to facilitate optimal hybridization and detection, and/or reduce non-specific or background interactions. Also reagents that otherwise improve the efficiency of the assay, such as protease inhibitors, nuclease inhibitors, anti-microbial agents, etc., may be used, depending on the sample preparation methods and purity of the target. In addition, either solid phase or solution based (i.e., kinetic PCR) assays may be used.

[0258] Once the assay is run, the data are analyzed to determine the expression levels, and changes in expression levels as between states, of individual genes, forming a gene expression profile.

[0259] In some embodiments, as for the diagnosis and prognosis applications, having identified the differentially expressed gene(s) or mutated gene(s) important in any one state, screens can be run to test for alteration of the expression of the cancer-associated genes individually. That is, screening for modulation of regulation of expression of a single gene can be done. Thus, for example, in the case of target genes whose presence or absence is unique between two states, screening is done for modulators of the target gene expression.

[0260] In addition, screens can be done for novel genes that are induced in response to a candidate agent. After identifying a candidate agent based upon its ability to suppress a cancer-associated expression pattern leading to a normal expression pattern, or modulate a single cancer-associated gene expression profile so as to mimic the expression of the gene from normal tissue, a screen as described above can be performed to identify genes that are specifically modulated in response to the agent. Comparing expression profiles between normal tissue and agent treated cancer-associated tissue reveals genes that are not expressed in normal tissue or cancer-associated tissue, but are expressed in agent treated tissue. These agent specific sequences can be identified and used by any of the methods described herein for cancer-associated genes or proteins. In some embodiments these sequences and the proteins they encode find use in marking or identifying agent-treated cells. In addition, antibodies can be raised against the agent-induced proteins and used to target novel therapeutics to the treated cancer-associated tissue sample.

[0261] Thus, in some embodiments, a candidate agent is administered to a population of cancer-associated cells that thus have an associated cancer-associated expression profile. By “administration” or “contacting” herein is meant that the candidate agent is added to the cells in such a manner as to allow the agent to act upon the cell, whether by uptake and intracellular action, or by action at the cell surface. In some embodiments, nucleic acid encoding a proteinaceous candidate agent (i.e. a peptide) may be put into a viral construct such as a retroviral construct and added to the cell, such that expression of the peptide agent is accomplished; see PCT US97/01019, hereby expressly incorporated by reference.

[0262] Once the candidate agent has been administered to the cells, the cells can be washed if desired and are allowed to incubate under preferably physiological conditions for some period of time. The cells are then harvested and a new gene expression profile is generated, as outlined herein.

[0263] Thus, for example, cancer-associated tissue may be screened for agents that reduce or suppress the cancer-associated phenotype. A change in at least one gene of the expression profile indicates that the agent has an effect on cancer-associated activity. By defining such a signature for the cancer-associated phenotype, screens for new drugs that alter the phenotype can be devised. With this approach, the drug target need not be known and need not be represented in the original expression screening platform, nor does the level of transcript for the target protein need to change.

[0264] In some embodiments, as outlined above, screens may be done on individual genes and gene products (proteins). That is, having identified a particular differentially expressed gene as important in a particular state, screening of modulators of either the expression of the gene or the gene product itself can be done. The cancer-associated protein may be a fragment, or alternatively, be the full-length protein to the fragment encoded by the cancer-associated genes recited above. In some embodiments, the sequences are sequence variants as further described above.

[0265] In some embodiments the cancer-associated protein is a fragment approximately 14 to 24 amino acids in length. In some embodiments the fragment is a soluble fragment. In some embodiments, the fragment includes a non-transmembrane region. In some embodiments, the fragment has an N-terminal Cys to aid in solubility. In some embodiments, the C-terminus of the fragment is kept as a free acid and the N-terminus is a free amine to aid in coupling, e.g., to a cysteine.

[0266] In some embodiments the cancer-associated proteins are conjugated to an immunogenic agent as discussed herein. In some embodiments the cancer-associated protein is conjugated to BSA.

[0267] In some embodiments, screening is done to alter the biological function of the expression product of the cancer-associated gene. Again, having identified the importance of a gene in a particular state, screening for agents that bind and/or modulate the biological activity of the gene product can be run as is more fully outlined below.

[0268] In some embodiments, screens are designed to first find candidate agents that can bind to cancer-associated proteins, and then these agents may be used in assays that evaluate the ability of the candidate agent to modulate the cancer-associated protein activity and the cancer phenotype. Thus, as will be appreciated by those in the art, there are a number of different assays that may be run; binding assays and activity assays.

[0269] In some embodiments, binding assays are performed. In general, purified or isolated gene product is used; that is, the gene products of one or more cancer-associated nucleic acids are made. In general, this is done as is known in the art. For example, antibodies are generated to the protein gene products, and standard immunoassays are run to determine the amount of protein present. In some embodiments, cells comprising the cancer-associated proteins can be used in the assays.

[0270] Thus, in some embodiments, the methods comprise combining a cancer-associated protein and a candidate bioactive agent, and determining the binding of the candidate agent to the cancer-associated protein. Some embodiments utilize the human or mouse cancer-associated protein, although other mammalian proteins may also be used, for example for the development of animal models of human disease. In some embodiments, as outlined herein, variant or derivative cancer-associated proteins may be used.

[0271] In some embodiments of the methods herein, the cancer-associated protein or the candidate agent is non-diffusably bound to an insoluble support having isolated sample receiving areas (e.g. a microtiter plate, an array, etc.). The insoluble support may be made of any composition to which the compositions can be bound, is readily separated from soluble material, and is otherwise compatible with the overall method of screening. The surface of such supports may be solid or porous and of any convenient shape. Examples of suitable insoluble supports include microtiter plates, arrays, membranes and beads. These are typically made of glass, plastic (e.g., polystyrene), polysaccharides, nylon or nitrocellulose, Teflon®, etc. Microtiter plates and arrays are especially convenient because a large number of assays can be carried out simultaneously, using small amounts of reagents and samples.

[0272] The particular manner of binding of the composition is not crucial so long as it is compatible with the reagents and overall methods of the invention, maintains the activity of the composition and is nondiffusable. Some methods of binding include the use of antibodies (which do not sterically block either the ligand binding site or activation sequence when the protein is bound to the support), direct binding to “sticky” or ionic supports, chemical crosslinking, the synthesis of the protein or agent on the surface, etc. Following binding of the protein or agent, excess unbound material is removed by washing. The sample receiving areas may then be blocked through incubation with bovine serum albumin (BSA), casein or other innocuous protein or other moiety.

[0273] In some embodiments, the cancer-associated protein is bound to the support, and a candidate bioactive agent is added to the assay. In some embodiments, the candidate agent is bound to the support and the cancer-associated protein is added. Novel binding agents include specific antibodies, non-natural binding agents identified in screens of chemical libraries or peptide analogs. Of particular interest are screening assays for agents that have a low toxicity for human cells. A wide variety of assays may be used for this purpose, including labeled in vitro protein-protein binding assays, electrophoretic mobility shift assays, immunoassays for protein binding, functional assays (phosphorylation assays, etc.) and the like.

[0274] The determination of the binding of the candidate bioactive agent to the cancer-associated protein may be done in a number of ways. In some embodiments, the candidate bioactive agent is labeled, and binding determined directly. For example, this may be done by attaching all or a portion of the cancer-associated protein to a solid support, adding a labeled candidate agent (for example a fluorescent label), washing off excess reagent, and determining whether the label is present on the solid support. Various blocking and washing steps may be utilized as is known in the art.

[0275] In some embodiments, only one of the components is labeled. For example, the proteins (or proteinaceous candidate agents) may be labeled at tyrosine positions using ¹²⁵I, or with fluorophores. Alternatively, more than one component may be labeled with different labels; using ¹²⁵I for the proteins, for example, and a fluorophore for the candidate agents.

[0276] In some embodiments, the binding of the candidate bioactive agent is determined through the use of competitive binding assays. In some embodiments, the competitor is a binding moiety known to bind to the target molecule (i.e. cancer-associated protein), such as an antibody, peptide, binding partner, ligand, etc. Under certain circumstances, there may be competitive binding as between the bioactive agent and the binding moiety, with the binding moiety displacing the bioactive agent.

[0277] In some embodiments, the candidate bioactive agent is labeled. Either the candidate bioactive agent, or the competitor, or both, is added first to the protein for a time sufficient to allow binding, if present. Incubations may be performed at any temperature which facilitates optimal activity, typically between 4 and 40° C. Incubation periods are selected for optimum activity, but may also be optimized to facilitate rapid high throughput screening. Typically between 0.1 and 1 hour will be sufficient. Excess reagent is generally removed or washed away. The second component is then added, and the presence or absence of the labeled component is followed, to indicate binding.

[0278] In some embodiments, the competitor is added first, followed by the candidate bioactive agent. Displacement of the competitor is an indication that the candidate bioactive agent is binding to the cancer-associated protein and thus is capable of binding to, and potentially modulating, the activity of the cancer-associated protein. In some embodiments, either component can be labeled. Thus, for example, if the competitor is labeled, the presence of label in the wash solution indicates displacement by the agent. In some embodiments, if the candidate bioactive agent is labeled, the presence of the label on the support indicates displacement.

[0279] In some embodiments, the candidate bioactive agent is added first, with incubation and washing, followed by the competitor. The absence of binding by the competitor may indicate that the bioactive agent is bound to the cancer-associated protein with a higher affinity. Thus, if the candidate bioactive agent is labeled, the presence of the label on the support, coupled with a lack of competitor binding, may indicate that the candidate agent is capable of binding to the cancer-associated protein.

[0280] In some embodiments, the methods comprise differential screening to identity bioactive agents that are capable of modulating the activity of the cancer-associated proteins. In this embodiment, the methods comprise combining a cancer-associated protein and a competitor in a first sample. A second sample comprises a candidate bioactive agent, a cancer-associated protein and a competitor. The binding of the competitor is determined for both samples, and a change, or difference in binding between the two samples indicates the presence of an agent capable of binding to the cancer-associated protein and potentially modulating its activity. That is, if the binding of the competitor is different in the second sample relative to the first sample, the agent is capable of binding to the cancer-associated protein.

[0281] In some embodiments utilizes differential screening to identify drug candidates that bind to the native cancer-associated protein, but cannot bind to modified cancer-associated proteins. The structure of the cancer-associated protein may be modeled, and used in rational drug design to synthesize agents that interact with that site. Drug candidates that affect cancer-associated bioactivity are also identified by screening drugs for the ability to either enhance or reduce the activity of the protein.

[0282] Positive controls and negative controls may be used in the assays. In some embodiments all control and test samples are performed in at least triplicate to obtain statistically significant results. Incubation of all samples is for a time sufficient for the binding of the agent to the protein. Following incubation, all samples are washed free of non-specifically bound material and the amount of bound, generally labeled agent determined. For example, where a radiolabel is employed, the samples may be counted in a scintillation counter to determine the amount of bound compound.

[0283] A variety of other reagents may be included in the screening assays. These include reagents like salts, neutral proteins, e.g. albumin, detergents, etc which may be used to facilitate optimal protein-protein binding and/or reduce non-specific or background interactions. Also reagents that otherwise improve the efficiency of the assay, such as protease inhibitors, nuclease inhibitors, anti-microbial agents, etc., may be used. The mixture of components may be added in any order that provides for the requisite binding.

[0284] Screening for agents that modulate the activity of cancer-associated proteins may also be done. In some embodiments, methods for screening for a bioactive agent capable of modulating the activity of cancer-associated proteins comprise adding a candidate bioactive agent to a sample of cancer-associated proteins, as above, and determining an alteration in the biological activity of cancer-associated proteins. “Modulating the activity of a cancer-associated protein” includes an increase in activity, a decrease in activity, or a change in the type or kind of activity present. Thus, in some embodiments, the candidate agent should both bind to cancer-associated proteins (although this may not be necessary), and alter its biological or biochemical activity as defined herein. The methods include both in vitro screening methods, as are generally outlined above, and in vivo screening of cells for alterations in the presence, distribution, activity or amount of cancer-associated proteins.

[0285] Thus, in some embodiments, the methods comprise combining a cancer-associated sample and a candidate bioactive agent, and evaluating the effect on cancer-associated activity. By “cancer-associated activity” or grammatical equivalents herein is meant one of the cancer-associated protein's biological activities, including, but not limited to, its role in tumorigenesis, including cell division, cell proliferation, tumor growth, cancer cell survival and transformation of cells. In some embodiments, cancer-associated activity includes activation of or by a protein encoded by a nucleic acid derived from a cancer-associated gene as identified above. An inhibitor of cancer-associated activity is the inhibitor of any one or more cancer-associated activities.

[0286] In some embodiments, the activity of the cancer-associated protein is increased; in some embodiments, the activity of the cancer-associated protein is decreased. Thus, bioactive agents are antagonists in some embodiments, and bioactive agents are agonists in some embodiments.

[0287] In some embodiments, the invention provides methods for screening for bioactive agents capable of modulating the activity of a cancer-associated protein. The methods comprise adding a candidate bioactive agent, as defined above, to a cell comprising cancer-associated proteins. Preferred cell types include almost any cell. The cells contain a recombinant nucleic acid that encodes a cancer-associated protein. In some embodiments, a library of candidate agents is tested on a plurality of cells.

[0288] In some embodiments, the assays are evaluated in the presence or absence or previous or subsequent exposure of physiological signals, for example hormones, antibodies, peptides, antigens, cytokines, growth factors, action potentials, pharmacological agents including chemotherapeutics, radiation, carcinogenics, or other cells (i.e. cell-cell contacts). In some embodiments, the determinations are determined at different stages of the cell cycle process.

[0289] In this way, bioactive agents are identified. Compounds with pharmacological activity are able to enhance or interfere with the activity of the cancer-associated protein.

Diagnosis and Treatment of Cancer

[0290] Methods of inhibiting cancer cell division are provided by the invention. In some embodiments, methods of inhibiting tumor growth are provided. In some embodiments, methods of treating cells or individuals with cancer are provided.

[0291] The methods may comprise the administration of a cancer inhibitor. In some embodiments, the cancer inhibitor is an antisense molecule, a pharmaceutical composition, a therapeutic agent or small molecule, or a monoclonal, polyclonal, chimeric or humanized antibody. In some embodiments, a therapeutic agent is coupled with an antibody. In some embodiments the therapeutic agent is coupled with a monoclonal antibody.

[0292] Methods for detection or diagnosis of cancer cells in an individual are also provided. In some embodiments, the diagnostic/detection agent is a small molecule that preferentially binds to a cancer-associated protein according to the invention. In some embodiments, the diagnostic/detection agent is an antibody

[0293] In some embodiments of the invention, animal models and transgenic animals are provided, which find use in generating animal models of cancers wherein the cancer is carcinoma, melanoma, breast cancer, lymphoma, leukemia, colon cancer, kidney cancer, liver cancer, lung cancer, ovary cancer, pancreatic cancer, prostate cancer, uterine cancer, cervical cancer, bladder cancer, stomach cancer or skin cancer. In some embodiments the cancer is carcinoma, breast cancer, lymphoma or leukemia.

(a) Antisense Molecules

[0294] The cancer inhibitor used may be an antisense molecule. Antisense molecules as used herein include antisense or sense oligonucleotides comprising a single-stranded nucleic acid sequence (either RNA or DNA) capable of binding to target mRNA (sense) or DNA (antisense) sequences for cancer molecules. Antisense or sense oligonucleotides, according to the present invention, comprise a fragment generally of from about 14 to about 30 nucleotides. The ability to derive an antisense or a sense oligonucleotide, based upon a cDNA sequence encoding a given protein is described in, for example, Stein and Cohen, Cancer Res. 48:2659, (1988) and van der Krol et al., BioTechniques 6:958, (1988).

[0295] Antisense molecules can be modified or unmodified RNA, DNA, or mixed polymer oligonucleotides. These molecules function by specifically binding to matching sequences resulting in inhibition of peptide synthesis (Wu-Pong, Nov 1994, BioPharm, 20-33) either by steric blocking or by activating an RNase H enzyme. Antisense molecules can also alter protein synthesis by interfering with RNA processing or transport from the nucleus into the cytoplasm (Mukhopadhyay & Roth, 1996, Crit. Rev. in Oncogenesis 7, 151-190). In addition, binding of single stranded DNA to RNA can result in nuclease-mediated degradation of the heteroduplex (Wu-Pong, supra). Backbone modified DNA chemistry which have thus far been shown to act as substrates for RNase H are phosphorothioates, phosphorodithioates, borontrifluoridates, and 2′-arabino and 2′-fluoro arabino-containing oligonucleotides.

[0296] Antisense molecules may be introduced into a cell containing the target nucleotide sequence by formation of a conjugate with a ligand binding molecule, as described in WO 91/04753. Suitable ligand binding molecules include, but are not limited to, cell surface receptors, growth factors, other cytokines, or other ligands that bind to cell surface receptors. Preferably, conjugation of the ligand binding molecule does not substantially interfere with the ability of the ligand binding molecule to bind to its corresponding molecule or receptor, or block entry of the sense or antisense oligonucleotide or its conjugated version into the cell. In some embodiments, a sense or an antisense oligonucleotide may be introduced into a cell containing the target nucleic acid sequence by formation of an oligonucleotide-lipid complex, as described in WO 90/10448. It is understood that the use of antisense molecules or knock out and knock in models may also be used in screening assays as discussed above, in addition to methods of treatment.

(b) RNA Interference

[0297] RNA interference refers to the process of sequence-specific post transcriptional gene silencing in animals mediated by short interfering RNAs (siRNA) (Fire et al., Nature, 391, 806 (1998)). The corresponding process in plants is referred to as post transcriptional gene silencing or RNA silencing and is also referred to as quelling in fungi. The presence of dsRNA in cells triggers the RNAi response though a mechanism that has yet to be fully characterized. This mechanism appears to be different from the interferon response that results from dsRNA mediated activation of protein kinase PKR and 2′,5′-oligoadenylate synthetase resulting in non-specific cleavage of mRNA by ribonuclease L. (reviewed in Sharp, P. A., RNA interference—2001, Genes & Development 15:485-490 (2001)).

[0298] Small interfering RNAs (siRNAs) are powerful sequence-specific reagents designed to suppress the expression of genes in cultured mammalian cells through a process known as RNA interference (RNAi). Elbashir, S. M. et al. Nature 411:494-498 (2001); Caplen, N. J. et al. Proc. Natl. Acad. Sci. USA 98:9742-9747 (2001); Harborth, J. et al. J. Cell Sci. 114:4557-4565 (2001). The term “short interfering RNA” or “siRNA” refers to a double stranded nucleic acid molecule capable of RNA interference “RNAi”, (see Kreutzer et al., WO 00/44895; Zernicka-Goetz et al. WO 01/36646; Fire, WO 99/32619; Mello and Fire, WO 01/29058). As used herein, siRNA molecules are limited to RNA molecules but further encompasses chemically modified nucleotides and non-nucleotides. siRNA gene-targeting experiments have been carried out by transient siRNA transfer into cells (achieved by such classic methods as liposome-mediated transfection, electroporation, or microinjection).

[0299] Molecules of siRNA are 15- to 30-, 18- to 25-, or 21- to 23-nucleotide RNAs, with characteristic 2- to 3-nucleotide 3′-overhanging ends resembling the RNase III processing products of long double-stranded RNAs (dsRNAs) that normally initiate RNAi. When introduced into a cell, they assemble with yet-to-be-identified proteins of an endonuclease complex (RNA-induced silencing complex), which then guides target mRNA cleavage. As a consequence of degradation of the targeted mRNA, cells with a specific phenotype characteristic of suppression of the corresponding protein product are obtained. The small size of siRNAs, compared with traditional antisense molecules, prevents activation of the dsRNA-inducible interferon system present in mammalian cells. This avoids the nonspecific phenotypes normally produced by dsRNA larger than 30 base pairs in somatic cells.

[0300] Intracellular transcription of small RNA molecules is achieved by cloning the siRNA templates into RNA polymerase III (Pol III) transcription units, which normally encode the small nuclear RNA (snRNA) U6 or the human RNase P RNA H1. Two approaches have been developed for expressing siRNAs: in the first, sense and antisense strands constituting the siRNA duplex are transcribed by individual promoters (Lee, N. S. et al. Nat. Biotechnol. 20, 500-505 (2002); Miyagishi, M. & Taira, K. Nat. Biotechnol. 20, 497-500 (2002).); in the second, siRNAs are expressed as fold-back stem-loop structures that give rise to siRNAs after intracellular processing (Paul, C. P. et al. Nat. Biotechnol. 20:505-508 (2002)). The endogenous expression of siRNAs from introduced DNA templates is thought to overcome some limitations of exogenous siRNA delivery, in particular the transient loss of phenotype. U6 and H1 RNA promoters are members of the type III class of Pol III promoters. (Paule, M. R. & White, R. J. Nucleic Acids Res. 28, 1283-1298 (2000)).

[0301] Co-expression of sense and antisense siRNAs mediate silencing of target genes, whereas expression of sense or antisense siRNA alone do not greatly affect target gene expression. Transfection of plasmid DNA, rather than synthetic siRNAs, may appear advantageous, considering the danger of RNase contamination and the costs of chemically synthesized siRNAs or siRNA transcription kits. Stable expression of siRNAs allows new gene therapy applications, such as treatment of persistent viral infections. Considering the high specificity of siRNAs, the approach also allows the targeting of disease-derived transcripts with point mutations, such as RAS or TP53 oncogene transcripts, without alteration of the remaining wild-type allele. Finally, by high-throughput sequence analysis of the various genomes, the DNA-based methodology may also be a cost-effective alternative for automated genome-wide loss-of-function phenotypic analysis, especially when combined with miniaturized array-based phenotypic screens. (Ziauddin, J. & Sabatini, D. M. Nature 411:107-110 (2001)).

[0302] The presence of long dsRNAs in cells stimulates the activity of a ribonuclease III enzyme referred to as dicer. Dicer is involved in the processing of the dsRNA into short pieces of dsRNA known as short interfering RNAs (siRNA) (Berstein et al., 2001, Nature, 409:363 (2001)). Short interfering RNAs derived from dicer activity are typically about 21-23 nucleotides in length and comprise about 19 base pair duplexes. Dicer has also been implicated in the excision of 21 and 22 nucleotide small temporal RNAs (stRNA) from precursor RNA of conserved structure that are implicated in translational control (Hutvagner et al., Science, 293, 834 (2001)). The RNAi response also features an endonuclease complex containing a siRNA, commonly referred to as an RNA-induced silencing complex (RISC), which mediates cleavage of single stranded RNA having sequence homologous to the siRNA. Cleavage of the target RNA takes place in the middle of the region complementary to the guide sequence of the siRNA duplex (Elbashir et al., Genes Dev., 15, 188 (2001)).

[0303] The present invention provides expression systems comprising an isolated nucleic acid molecule comprising a sequence capable of specifically hybridizing to the cancer-associated sequences. In some embodiments, the nucleic acid molecule is capable of inhibiting the expression of the cancer-associated protein. A method of inhibiting expression of cancer-associated gene expression inside a cell by a vector-directed expression of a short RNA which short RNA can fold in itself and create a double strand RNA having cancer-associated mRNA sequence identity and able to trigger posttranscriptional gene silencing, or RNA interference (RNAi), of the cancer-associated gene inside the cell. In some embodiments a short double strand RNA having a cancer-associated mRNA sequence identity is delivered inside the cell to trigger posttranscriptional gene silencing, or RNA1, of the cancer-associated gene. In various embodiments, the nucleic acid molecule is at least a 7 mer, at least a 10 mer, or at least a 20 mer. In some embodiments, the sequence is unique.

(c) Pharmaceutical Compositions

[0304] Pharmaceutical compositions encompassed by the present invention include as active agent, the polypeptides, polynucleotides, antisense oligonucleotides, or antibodies of the invention disclosed herein in a therapeutically effective amount. An “effective amount” is an amount sufficient to effect beneficial or desired results, including clinical results. An effective amount can be administered in one or more administrations. For purposes of this invention, an effective amount of an adenoviral vector is an amount that is sufficient to palliate, ameliorate, stabilize, reverse, slow or delay the progression of the disease state.

[0305] The compositions can be used to treat cancer as well as metastases of primary cancer. In addition, the pharmaceutical compositions can be used in conjunction with conventional methods of cancer treatment, e.g., to sensitize tumors to radiation or conventional chemotherapy. The terms “treatment”, “treating”, “treat” and the like are used herein to generally refer to obtaining a desired pharmacologic and/or physiologic effect. The effect may be prophylactic in terms of completely or partially preventing a disease or symptom thereof and/or may be therapeutic in terms of a partial or complete stabilization or cure for a disease and/or adverse effect attributable to the disease. “Treatment” as used herein covers any treatment of a disease in a mammal, particularly a human, and includes: (a) preventing the disease or symptom from occurring in a subject which may be predisposed to the disease or symptom but has not yet been diagnosed as having it; (b) inhibiting the disease symptom, i.e., arresting its development; or (c) relieving the disease symptom, i.e., causing regression of the disease or symptom.

[0306] Where the pharmaceutical composition comprises an antibody that specifically binds to a gene product encoded by a differentially expressed polynucleotide, the antibody can be coupled to a drug for delivery to a treatment site or coupled to a detectable label to facilitate imaging of a site comprising cancer cells, such as prostate cancer cells. Methods for coupling antibodies to drugs and detectable labels are well known in the art, as are methods for imaging using detectable labels.

[0307] In some embodiments pharmaceutical compositions are provided comprising an antibody according to the present invention and a pharmaceutically suitable carrier, excipient or diluent. In some embodiments, the pharmaceutical composition further comprises a second therapeutic agent. In still another embodiment, the second therapeutic agent is a cancer chemotherapeutic agent.

[0308] A “patient” for the purposes of the present invention includes both humans and other animals, particularly mammals, and organisms. Thus the methods are applicable to both human therapy and veterinary applications. In some embodiments the patient is a mammal, and preferably the patient is human. One target patient population includes all patients currently undergoing treatment for cancer, particularly the specific cancer types mentioned herein. Subsets of these patient populations include those who have experienced a relapse of a previously treated cancer of this type in the previous six months and patients with disease progression in the past six months.

[0309] The term “therapeutically effective amount” as used herein refers to an amount of a therapeutic agent to treat, ameliorate, or prevent a desired disease or condition, or to exhibit a detectable therapeutic or preventative effect. The effect can be detected by, for example, chemical markers or antigen levels. Therapeutic effects also include reduction in physical symptoms, such as decreased body temperature. The precise effective amount for a subject will depend upon the subject's size and health, the nature and extent of the condition, and the therapeutics or combination of therapeutics selected for administration. The effective amount for a given situation is determined by routine experimentation and is within the judgment of the clinician. For purposes of the present invention, an effective dose will generally be from about 0.01 mg/kg to about 5 mg/kg, from about 0.01 mg/kg to about 50 mg/kg, or about 0.05 mg/kg to about 10 mg/kg of the compositions of the present invention in the individual to which it is administered.

[0310] A pharmaceutical composition can also contain a pharmaceutically acceptable carrier. The term “pharmaceutically acceptable carrier” refers to a carrier for administration of a therapeutic agent, such as antibodies or a polypeptide, genes, and other therapeutic agents. The term refers to any pharmaceutical carrier that does not itself induce the production of antibodies harmful to the individual receiving the composition, and which can be administered without undue toxicity. Suitable carriers can be large, slowly metabolized macromolecules such as proteins, polysaccharides, polylactic acids, polyglycolic acids, polymeric amino acids, amino acid copolymers, and inactive virus particles. Such carriers are well known to those of ordinary skill in the art. Pharmaceutically acceptable carriers in therapeutic compositions can include liquids such as water, saline, glycerol and ethanol. Auxiliary substances, such as wetting or emulsifying agents, pH buffering substances, and the like, can also be present in such vehicles. In some embodiments, the therapeutic compositions are prepared as injectables, either as liquid solutions or suspensions; solid forms suitable for solution in, or suspension in, liquid vehicles prior to injection can also be prepared. Liposomes are included within the definition of a pharmaceutically acceptable carrier. Pharmaceutically acceptable salts can also be present in the pharmaceutical composition, e.g., mineral acid salts such as hydrochlorides, hydrobromides, phosphates, sulfates, and the like; and the salts of organic acids such as acetates, propionates, malonates, benzoates, and the like. A thorough discussion of pharmaceutically acceptable excipients is available in Remington: The Science and Practice of Pharmacy (1995) Alfonso Gennaro, Lippincott, Williams, & Wilkins.

[0311] The pharmaceutical compositions can be prepared in various forms, such as granules, tablets, pills, suppositories, capsules, suspensions, salves, lotions and the like. Pharmaceutical grade organic or inorganic carriers and/or diluents suitable for oral and topical use can be used to make up compositions containing the therapeutically-active compounds. Diluents known to the art include aqueous media, vegetable and animal oils and fats. Stabilizing agents, wetting and emulsifying agents, salts for varying the osmotic pressure or buffers for securing an adequate pH value, and skin penetration enhancers can be used as auxiliary agents.

[0312] The pharmaceutical compositions of the present invention comprise a cancer-associated protein in a form suitable for administration to a patient. In some embodiments, the pharmaceutical compositions are in a water soluble form, such as being present as pharmaceutically acceptable salts, which is meant to include both acid and base addition salts. “Pharmaceutically acceptable acid addition salt” refers to those salts that retain the biological effectiveness of the free bases and that are not biologically or otherwise undesirable, formed with inorganic acids such as hydrochloric acid, hydrobromic acid, sulfuric acid, nitric acid, phosphoric acid and the like, and organic acids such as acetic acid, propionic acid, glycolic acid, pyruvic acid, oxalic acid, maleic acid, malonic acid, succinic acid, fumaric acid, tartaric acid, citric acid, benzoic acid, cinnamic acid, mandelic acid, methanesulfonic acid, ethanesulfonic acid, p-toluenesulfonic acid, salicylic acid and the like. “Pharmaceutically acceptable base addition salts” include those derived from inorganic bases such as sodium, potassium, lithium, ammonium, calcium, magnesium, iron, zinc, copper, manganese, aluminum salts and the like. Particularly preferred are the ammonium, potassium, sodium, calcium, and magnesium salts. Salts derived from pharmaceutically acceptable organic non-toxic bases include salts of primary, secondary, and tertiary amines, substituted amines including naturally occurring substituted amines, cyclic amines and basic ion exchange resins, such as isopropylamine, trimethylamine, diethylamine, triethylamine, tripropylamine, and ethanolamine.

[0313] The pharmaceutical compositions may also include one or more of the following: carrier proteins such as serum albumin; buffers; fillers such as microcrystalline cellulose, lactose, corn and other starches; binding agents; sweeteners and other flavoring agents; coloring agents; and polyethylene glycol. Additives are well known in the art, and are used in a variety of formulations.

[0314] The compounds having the desired pharmacological activity may be administered in a physiologically acceptable carrier to a host, as previously described. The pharmaceutical compositions may be administered in a variety of routes including, but not limited to, intravenous, intramuscular, intra-arterial, intramedullary, intrathecal, intraventricular, transdermal or transcutaneous applications (for example, see WO98/20734), subcutaneous, intraperitoneal, intranasal, enteral, topical, sublingual, intravaginal or rectal means. Depending upon the manner of introduction, the compounds may be formulated in a variety of ways. The concentration of therapeutically active compound in the formulation may vary from about 0.1-100% wgt/vol. Once formulated, the compositions contemplated by the invention can be (1) administered directly to the subject (e.g., as polynucleotide, polypeptides, small molecule agonists or antagonists, and the like); or (2) delivered ex vivo, to cells derived from the subject (e.g., as in ex vivo gene therapy). Direct delivery of the compositions will generally be accomplished by parenteral injection, e.g., subcutaneously, intraperitoneally, intravenously or intramuscularly, intratumoral or to the interstitial space of a tissue. Other modes of administration include oral and pulmonary administration, suppositories, and transdermal applications, needles, and gene guns (see the worldwideweb site at powderject.com) or hyposprays. Dosage treatment can be a single dose schedule or a multiple dose schedule.

[0315] Methods for the ex vivo delivery and reimplantation of transformed cells into a subject are known in the art and described in e.g., WO 93/14778. Examples of cells useful in ex vivo applications include, for example, stem cells, particularly hematopoetic, lymph cells, macrophages, dendritic cells, or tumor cells. Generally, delivery of nucleic acids for both ex vivo and in vitro applications can be accomplished by, for example, dextran-mediated transfection, calcium phosphate precipitation, polybrene mediated transfection, protoplast fusion, electroporation, encapsulation of the polynucleotide(s) in liposomes, and direct microinjection of the DNA into nuclei, all well known in the art.

[0316] Once differential expression of a gene corresponding to a cancer-associated polynucleotide described herein has been found to correlate with a proliferative disorder, such as neoplasia, dysplasia, and hyperplasia, the disorder can be amenable to treatment by administration of a therapeutic agent based on the provided polynucleotide, corresponding polypeptide or other corresponding molecule (e.g., antisense, ribozyme, etc.). In other embodiments, the disorder can be amenable to treatment by administration of a small molecule drug that, for example, serves as an inhibitor (antagonist) of the function of the encoded gene product of a gene having increased expression in cancerous cells relative to normal cells or as an agonist for gene products that are decreased in expression in cancerous cells (e.g., to promote the activity of gene products that act as tumor suppressors).

[0317] The dose and the means of administration of the inventive pharmaceutical compositions are determined based on the specific qualities of the therapeutic composition, the condition, age, and weight of the patient, the progression of the disease, and other relevant factors. For example, administration of polynucleotide therapeutic compositions agents includes local or systemic administration, including injection, oral administration, particle gun or catheterized administration, and topical administration. Preferably, the therapeutic polynucleotide composition contains an expression construct comprising a promoter operably linked to a polynucleotide of at least 12, 22, 25, 30, or 35 contiguous nt of the polynucleotide disclosed herein. Various methods can be used to administer the therapeutic composition directly to a specific site in the body. For example, a small metastatic lesion is located and the therapeutic composition injected several times in several different locations within the body of tumor. Alternatively, arteries that serve a tumor are identified, and the therapeutic composition injected into such an artery, in order to deliver the composition directly into the tumor. A tumor that has a necrotic center is aspirated and the composition injected directly into the now empty center of the tumor. An antisense composition is directly administered to the surface of the tumor, for example, by topical application of the composition. X-ray imaging is used to assist in certain of the above delivery methods.

[0318] Targeted delivery of therapeutic compositions containing an antisense polynucleotide, subgenomic polynucleotides, or antibodies to specific tissues can also be used. Receptor-mediated DNA delivery techniques are described in, for example, Findeis et al., Trends Biotechnol. (1993) 11:202; Chiou et al., Gene Therapeutics: Methods And Applications Of Direct Gene Transfer (J. A. Wolff, ed.) (1994); Wu et al., J. Biol. Chem. (1988) 263:621; Wu et al., J. Biol. Chem. (1994) 269:542; Zenke et al., Proc. Natl. Acad. Sci. (USA) (1990) 87:3655; Wu et al., J. Biol. Chem. (1991) 266:338. Therapeutic compositions containing a polynucleotide are administered in a range of about 100 ng to about 200 mg of DNA for local administration in a gene therapy protocol. Concentration ranges of about 500 ng to about 50 mg, about 1 μg to about 2 μg, about 5 μg to about 500 μg, and about 20 μg to about 100 μg of DNA can also be used during a gene therapy protocol. Factors such as method of action (e.g., for enhancing or inhibiting levels of the encoded gene product) and efficacy of transformation and expression are considerations that will affect the dosage required for ultimate efficacy of the antisense subgenomic polynucleotides. Where greater expression is desired over a larger area of tissue, larger amounts of antisense subgenomic polynucleotides or the same amounts re-administered in a successive protocol of administrations, or several administrations to different adjacent or close tissue portions of, for example, a tumor site, may be required to effect a positive therapeutic outcome. In all cases, routine experimentation in clinical trials will determine specific ranges for optimal therapeutic effect.

[0319] The therapeutic polynucleotides and polypeptides of the present invention can be delivered using gene delivery vehicles. The gene delivery vehicle can be of viral or non-viral origin (see generally, Jolly, Cancer Gene Therapy (1994) 1:51; Kimura, Human Gene Therapy (1994) 5:845; Connelly, Human Gene Therapy (1995) 1:185; and Kaplitt, Nature Genetics (1994) 6:148). Expression of such coding sequences can be induced using endogenous mammalian or heterologous promoters. Expression of the coding sequence can be either constitutive or regulated.

[0320] Viral-based vectors for delivery of a desired polynucleotide and expression in a desired cell are well known in the art. Exemplary viral-based vehicles include, but are not limited to, recombinant retroviruses (see, e.g., WO 90/07936; WO 94/03622; WO 93/25698; WO 93/25234; U.S. Pat. No. 5,219,740; WO 93/11230; WO 93/10218; U.S. Pat. No. 4,777,127; GB Patent No. 2,200,651; EP 0 345 242; and WO 91/02805), alphavirus-based vectors (e.g., Sindbis virus vectors, Semliki forest virus (ATCC VR-67; ATCC VR-1247), Ross River virus (ATCC VR-373; ATCC VR-1246) and Venezuelan equine encephalitis virus (ATCC VR-923; ATCC VR-1250; ATCC VR 1249; ATCC VR-532)), and adeno-associated virus (AAV) vectors (see, e.g., WO 94/12649, WO 93/03769; WO 93/19191; WO 94/28938; WO 95/11984 and WO 95/00655). Administration of DNA linked to killed adenovirus as described in Curiel, Hum. Gene Ther. (1992) 3:147 can also be employed.

[0321] Non-viral delivery vehicles and methods can also be employed, including, but not limited to, polycationic condensed DNA linked or unlinked to killed adenovirus alone (see, e.g., Curiel, Hum. Gene Ther. (1992) 3:147); ligand-linked DNA (see, e.g., Wu, J. Biol. Chem. (1989) 264:16985); eukaryotic cell delivery vehicles cells (see, e.g., U.S. Pat. No. 5,814,482; WO 95/07994; WO 96/17072; WO 95/30763; and WO 97/42338) and nucleic charge neutralization or fusion with cell membranes. Naked DNA can also be employed. Exemplary naked DNA introduction methods are described in WO 90/11092 and U.S. Pat. No. 5,580,859. Liposomes that can act as gene delivery vehicles are described in U.S. Pat. No. 5,422,120; WO 95/13796; WO 94/23697; WO 91/14445; and EP 0524968. Additional approaches are described in Philip, Mol. Cell Biol. (1994) 14:2411, and in Woffendin, Proc. Natl. Acad. Sci. (1994) 91:1581.

[0322] Further non-viral delivery suitable for use includes mechanical delivery systems such as the approach described in Woffendin et al., Proc. Natl. Acad. Sci. USA (1994) 91(24):11581. Moreover, the coding sequence and the product of expression of such can be delivered through deposition of photopolymerized hydrogel materials or use of ionizing radiation (see, e.g., U.S. Pat. No. 5,206,152 and WO 92/11033). Other conventional methods for gene delivery that can be used for delivery of the coding sequence include, for example, use of hand-held gene transfer particle gun (see, e.g., U.S. Pat. No. 5,149,655); use of ionizing radiation for activating transferred gene (see, e.g., U.S. Pat. No. 5,206,152 and WO 92/11033).

[0323] In some embodiments, cancer-associated proteins and modulators are administered as therapeutic agents, and can be formulated as outlined above. Similarly, cancer-associated genes (including the full-length sequence, partial sequences, or regulatory sequences of the cancer-associated coding regions) can be administered in gene therapy applications, as is known in the art. These cancer-associated genes can include antisense applications, either as gene therapy (i.e. for incorporation into the genome) or as antisense compositions, as will be appreciated by those in the art.

[0324] Thus, in some embodiments, methods of modulating cancer-associated gene activity in cells or organisms are provided. In some embodiments, the methods comprise administering to a cell an anti-cancer-associated antibody that reduces or eliminates the biological activity of an endogenous cancer-associated protein. In some embodiments, the methods comprise administering to a cell or organism a recombinant nucleic acid encoding a cancer-associated protein. As will be appreciated by those in the art, this may be accomplished in any number of ways. In some embodiments, for example when the cancer-associated sequence is down-regulated in cancer, the activity of the cancer-associated expression product is increased by increasing the amount of cancer-associated expression in the cell, for example by overexpressing the endogenous cancer-associated gene or by administering a gene encoding the cancer-associated sequence, using known gene-therapy techniques. In some embodiments, the gene therapy techniques include the incorporation of the exogenous gene using enhanced homologous recombination (EHR), for example as described in PCT/US93/03868, hereby incorporated by reference in its entirety. In some embodiments, for example when the cancer-associated sequence is up-regulated in cancer, the activity of the endogenous cancer-associated gene is decreased, for example by the administration of a cancer-associated antisense nucleic acid. (d) Vaccines

[0325] In some embodiments, cancer-associated genes are administered as DNA vaccines, either single genes or combinations of cancer-associated genes. Naked DNA vaccines are generally known in the art. Brower, Nature Biotechnology, 16:1304-1305 (1998).

[0326] In some embodiments, cancer-associated genes of the present invention are used as DNA vaccines. Methods for the use of genes as DNA vaccines are well known to one of ordinary skill in the art, and include placing a cancer-associated gene or portion of a cancer-associated gene under the control of a promoter for expression in a patient with cancer. The cancer-associated gene used for DNA vaccines can encode full-length cancer-associated proteins, but more preferably encodes portions of the cancer-associated proteins including peptides derived from the cancer-associated protein. In some embodiments a patient is immunized with a DNA vaccine comprising a plurality of nucleotide sequences derived from a cancer-associated gene. Similarly, it is possible to immunize a patient with a plurality of cancer-associated genes or portions thereof. Without being bound by theory, expression of the polypeptide encoded by the DNA vaccine, cytotoxic T-cells, helper T-cells and antibodies are induced that recognize and destroy or eliminate cells expressing cancer-associated proteins.

[0327] In some embodiments, the DNA vaccines include a gene encoding an adjuvant molecule with the DNA vaccine; Such adjuvant molecules include cytokines that increase the immunogenic response to the cancer-associated polypeptide encoded by the DNA vaccine. Additional or alternative adjuvants are known to those of ordinary skill in the art and find use in the invention.

(e) Antibodies

[0328] The cancer-associated antibodies described above find use in a number of applications. For example, the cancer-associated antibodies may be coupled to standard affinity chromatography columns and used to purify cancer-associated proteins. The antibodies may also be used therapeutically as blocking polypeptides, as outlined above, since they will specifically bind to the cancer-associated protein.

[0329] The present invention further provides methods for detecting the presence of and/or measuring a level of a polypeptide in a biological sample, which cancer-associated polypeptide is encoded by a cancer-associated polynucleotide that is differentially expressed in a cancer cell, using an antibody specific for the encoded polypeptide. The methods generally comprise: a) contacting the sample with an antibody specific for a polypeptide encoded by a cancer-associated polynucleotide that is differentially expressed in a prostate cancer cell; and b) detecting binding between the antibody and molecules of the sample.

[0330] Detection of specific binding of the antibody specific for the encoded cancer-associated polypeptide, when compared to a suitable control is an indication that encoded polypeptide is present in the sample. Suitable controls include a sample known not to contain the encoded cancer-associated polypeptide or known not to contain elevated levels of the polypeptide; such as normal tissue, and a sample contacted with an antibody not specific for the encoded polypeptide, e.g., an anti-idiotype antibody. A variety of methods to detect specific antibody-antigen interactions are known in the art and can be used in the method, including, but not limited to, standard immunohistological methods, immunoprecipitation, an enzyme immunoassay, and a radioimmunoassay. In general, the specific antibody will be detectably labeled, either directly or indirectly. Direct labels include radioisotopes; enzymes whose products are detectable (e.g., luciferase, β-galactosidase, and the like); fluorescent labels (e.g., fluorescein isothiocyanate, rhodamine, phycoerythrin, and the like); fluorescence emitting metals, e.g., ¹⁵²Eu, or others of the lanthanide series, attached to the antibody through metal chelating groups such as EDTA; chemiluminescent compounds, e.g., luminol, isoluminol, acridinium salts, and the like; bioluminescent compounds, e.g., luciferin, aequorin (green fluorescent protein), and the like. The antibody may be attached (coupled) to an insoluble support, such as a polystyrene plate or a bead. Indirect labels include second antibodies specific for antibodies specific for the encoded polypeptide (“first specific antibody”), wherein the second antibody is labeled as described above; and members of specific binding pairs, e.g., biotin-avidin, and the like. The biological sample may be brought into contact with and immobilized on a solid support or carrier, such as nitrocellulose, that is capable of immobilizing cells, cell particles, or soluble proteins. The support may then be washed with suitable buffers, followed by contacting with a detectably-labeled first specific antibody. Detection methods are known in the art and will be chosen as appropriate to the signal emitted by the detectable label. Detection is generally accomplished in comparison to suitable controls, and to appropriate standards.

[0331] In some embodiments, the methods are adapted for use in vivo, e.g., to locate or identify sites where cancer cells are present. In some embodiments, a detectably-labeled moiety, e.g., an antibody, which is specific for a cancer-associated polypeptide is administered to an individual (e.g., by injection), and labeled cells are located using standard imaging techniques, including, but not limited to, magnetic resonance imaging, computed tomography scanning, and the like. In this manner, cancer cells are differentially labeled.

(f) Other methods for the Detection and Diagnosis of Cancers

[0332] Without being bound by theory, the various cancer-associated sequences disclosed herein appear to be important in cancers. Accordingly, disorders based on mutant or variant cancer-associated genes may be determined. In some embodiments, the invention provides methods for identifying cells containing variant cancer-associated genes comprising determining all or part of the sequence of at least one endogenous cancer-associated genes in a cell. As will be appreciated by those in the art, this may be done using any number of sequencing techniques. In some embodiments, the invention provides methods of identifying the cancer-associated genotype of an individual comprising determining all or part of the sequence of at least one cancer-associated gene of the individual. This is generally done-in at least one tissue of the individual, and may include the evaluation of a number of tissues or different samples of the same tissue. The method may include comparing the sequence of the sequenced cancer-associated gene to a known cancer-associated gene, i.e., a wild-type gene. As will be appreciated by those in the art, alterations in the sequence of some cancer-associated genes can be an indication of either the presence of the disease, or propensity to develop the disease, or prognosis evaluations.

[0333] The sequence of all or part of the cancer-associated gene can then be compared to the sequence of a known cancer-associated gene to determine if any differences exist. This can be done using any number of known homology programs, such as Bestfit, etc. In some embodiments, the presence of a difference in the sequence between the cancer-associated gene of the patient and the known cancer-associated gene is indicative of a disease state or a propensity for a disease state, as outlined herein.

[0334] In some embodiments, the cancer-associated genes are used as probes to determine the number of copies of the cancer-associated gene in the genome. For example, some cancers exhibit chromosomal deletions or insertions, resulting in an alteration in the copy number of a gene.

[0335] In some embodiments cancer-associated genes are used as probes to determine the chromosomal location of the cancer-associated genes. Information such as chromosomal location finds use in providing a diagnosis or prognosis in particular when chromosomal abnormalities such as translocations and the like are identified in cancer-associated gene loci.

[0336] The present invention provides methods of using the polynucleotides described herein for detecting cancer cells, facilitating diagnosis of cancer and the severity of a cancer (e.g., tumor grade, tumor burden, and the like) in a subject, facilitating a determination of the prognosis of a subject, and assessing the responsiveness of the subject to therapy (e.g., by providing a measure of therapeutic effect through, for example, assessing tumor burden during or following a chemotherapeutic regimen). Detection can be based on detection of a polynucleotide that is differentially expressed in a cancer cell, and/or detection of a polypeptide encoded by a polynucleotide that is differentially expressed in a cancer cell. The detection methods of the invention can be conducted in vitro or in vivo, on isolated cells, or in whole tissues or a bodily fluid e.g., blood, plasma, serum, urine, and the like).

[0337] In some embodiments, methods are provided for detecting a cancer cell by detecting expression in the cell of a transcript that is differentially expressed in a cancer cell. Any of a variety of known methods can be used for detection, including, but not limited to, detection of a transcript by hybridization with a polynucleotide that hybridizes to a polynucleotide that is differentially expressed in a cancer cell; detection of a transcript by a polymerase chain reaction using specific oligonucleotide primers; in situ hybridization of a cell using as a probe a polynucleotide that hybridizes to a gene that is differentially expressed in a prostate cancer cell. The methods can be used to detect and/or measure mRNA levels of a gene that is differentially expressed in a cancer cell. In some embodiments, the methods comprise: a) contacting a sample with a polynucleotide that corresponds to a differentially expressed gene described herein under conditions that allow hybridization; and b) detecting hybridization, if any.

[0338] Detection of differential hybridization, when compared to a suitable control, is an indication of the presence in the sample of a polynucleotide that is differentially expressed in a cancer cell. Appropriate controls include, for example, a sample that is known not to contain a polynucleotide that is differentially expressed in a cancer cell, and use of a labeled polynucleotide of the same “sense” as the polynucleotide that is differentially expressed in the cancer cell. Conditions that allow hybridization are known in the art, and have been described in more detail above. Detection can also be accomplished by any known method, including, but not limited to, in situ hybridization, PCR (polymerase chain reaction), RT-PCR (reverse transcription-PCR), TMA, bDNA, and Nasbau and “Northern” or RNA blotting, or combinations of such techniques, using a suitably labeled polynucleotide. A variety of labels and labeling methods for polynucleotides are known in the art and can be used in the assay methods of the invention. Specificity of hybridization can be determined by comparison to appropriate controls.

[0339] Polynucleotides generally comprising at least 10 nt, at least 12nt or at least 15 contiguous nucleotides of a polynucleotide provided herein, are used for a variety of purposes, such as probes for detection of and/or measurement of, transcription levels of a polynucleotide that is differentially expressed in a prostate cancer cell. As will be readily appreciated by the ordinarily skilled artisan, the probe can be detectably labeled and contacted with, for example, an array comprising immobilized polynucleotides obtained from a test sample (e.g., mRNA). Alternatively, the probe can be immobilized on an array and the test sample detectably labeled. These and other variations of the methods of the invention are well within the skill in the art and are within the scope of the invention.

[0340] Nucleotide probes are used to detect expression of a gene corresponding to the provided polynucleotide. In Northern blots, mRNA is separated electrophoretically and contacted with a probe. A probe is detected as hybridizing to an mRNA species of a particular size. The amount of hybridization can be quantitated to determine relative amounts of expression, for example under a particular condition. Probes are used for in situ hybridization to cells to detect expression. Probes can also be used in vivo for diagnostic detection of hybridizing sequences. Probes are typically labeled with a radioactive isotope. Other types of detectable labels can be used such as chromophores, fluorophores, and enzymes. Other examples of nucleotide hybridization assays are described in WO92/02526 and U.S. Pat. No. 5,124,246.

[0341] PCR is another means for detecting small amounts of target nucleic acids (see, e.g., Mullis et al., Meth. Enzymol. (1987) 155:335; U.S. Pat. Nos. 4,683,195; and 4,683,202). Two primer oligonucleotides that hybridize with the target nucleic acids are used to prime the reaction. The primers can be composed of sequence within or 3′ and 5′ to the cancer-associated polynucleotides disclosed herein. Alternatively, if the primers are 3′ and 5′ to these polynucleotides, they need not hybridize to them or the complements. After amplification of the target with a thermostable polymerase, the amplified target nucleic acids can be detected by methods known in the art, e.g., Southern blot. mRNA or cDNA can also be detected by traditional blotting techniques (e.g., Southern blot, Northern blot, etc.) described in Sambrook et al., “Molecular Cloning: A Laboratory Manual” (New York, Cold Spring Harbor Laboratory, 1989) (e.g., without PCR amplification). In general, mRNA or cDNA generated from mRNA using a polymerase enzyme can be purified and separated using gel electrophoresis, and transferred to a solid support, such as nitrocellulose. The solid support is exposed to a labeled probe, washed to remove any unhybridized probe, and duplexes containing the labeled probe are detected.

[0342] Methods using PCR amplification can be performed on the DNA from a single cell, although it is convenient to use at least about 105 cells. The use of the polymerase chain reaction is described in Saiki et al. (1985) Science 239:487, and a review of current techniques may be found in Sambrook, et al. Molecular Cloning: A Laboratory Manual, CSH Press 1989, pp. 14.2-14.33. A detectable label may be included in the amplification reaction. Suitable detectable labels include fluorochromes,(e.g. fluorescein isothiocyanate (FITC), rhodamine, Texas Red, phycoerythrin, allophycocyanin, 6-carboxyfluorescein (6-FAM), 2′,7′-dimethoxy-4′,5′-dichloro-6-carboxyfluorescein, 6-carboxy-X-rhodamine (ROX), 6-carboxy-2′,4′,7′,4,7-hexachlorofluorescein (HEX), 5-carboxyfluorescein (5-FAM) or N,N,N′,N′-tetramethyl-6-carboxyrhodamine (TAMRA)), radioactive labels, (e.g. 32P, 35S, 3H, etc.), and the like. The label may be a two stage system, where the polynucleotides is conjugated to biotin, haptens, etc. having a high affinity binding partner, e.g. avidin, specific antibodies, etc., where the binding partner is conjugated to a detectable label. The label may be conjugated to one or both of the primers. Alternatively, the pool of nucleotides used in the amplification is labeled, so as to incorporate the label into the amplification product.

[0343] The reagents used in detection methods can be provided as part of a kit. Thus, the invention further provides kits for detecting the presence and/or a level of a polynucleotide that is differentially expressed in a cancer cell (e.g., by detection of an mRNA encoded by the differentially expressed gene of interest), and/or a polypeptide encoded thereby, in a biological sample. Procedures using these kits can be performed by clinical laboratories, experimental laboratories, medical practitioners, or private individuals. The kits of the invention for detecting a polypeptide encoded by a polynucleotide that is differentially expressed in a cancer cell may comprise a moiety-that specifically binds the polypeptide, which may be an antibody that binds the polypeptide or fragment thereof. The kits of the invention used for detecting a polynucleotide that is differentially expressed in a prostate cancer cell may comprise a moiety that specifically hybridizes to such a polynucleotide. The kit may optionally provide additional components that are useful in the procedure, including, but not limited to, buffers, developing reagents, labels, reacting surfaces, means for detection, control samples, standards, instructions, and interpretive information.

[0344] The present invention further relates to methods of detecting/diagnosing a neoplastic or preneoplastic condition in a mammal (for example, a human). “Diagnosis” as used herein generally includes determination of a subject's susceptibility to a disease or disorder, determination as to whether a subject is presently affected by a disease or disorder, prognosis of a subject affected by a disease or disorder (e.g., identification of pre-metastatic or metastatic cancerous states, stages of cancer, or responsiveness of cancer to therapy), and therametrics (e.g., monitoring a subject's condition to provide information as to the effect or efficacy of therapy).

[0345] An “effective amount” is an amount sufficient to effect beneficial or desired results, including clinical results. An effective amount can be administered in one or more administrations.

[0346] A “cell sample” encompasses a variety of sample types obtained from an individual and can be used in a diagnostic or monitoring assay. The definition encompasses blood and other liquid samples of biological origin, solid tissue samples such as a biopsy specimen or tissue cultures or cells derived therefrom, and the progeny thereof. The definition also includes samples that have been manipulated in any way after their procurement, such as by treatment with reagents, solubilization, or enrichment for certain components, such as proteins or polynucleotides. The term “cell sample” encompasses a clinical sample, and also includes cells in culture, cell supernatants, cell lysates, serum, plasma, biological fluid, and tissue samples.

[0347] As used herein, the terms “neoplastic cells”, “neoplasia”, “tumor”, “tumor cells”, “cancer” and “cancer cells”, (used interchangeably) refer to cells which exhibit relatively autonomous growth, so that they exhibit an aberrant growth phenotype characterized by a significant loss of control of cell proliferation (i.e., de-regulated cell division). Neoplastic cells can be malignant or benign.

[0348] The terms “individual,” “subject,” “host,” and “patient,” are used interchangeably herein and refer to any mammalian subject for whom diagnosis, treatment, or therapy is desired, particularly humans. Other subjects may include cattle, dogs, cats, guinea pigs, rabbits, rats, mice, horses, and so on. Examples of conditions that can be detected/diagnosed in accordance with these methods include cancers. Polynucleotides corresponding to genes that exhibit the appropriate expression pattern can be used to detect cancer in a subject. For a review of markers of cancer, see, e.g., Hanahan et al. Cell 100:57-70 (2000).

[0349] In some embodiments detection/diagnostic methods comprise: (a) obtaining from a mammal (e.g., a human) a biological sample, (b) detecting the presence in the sample of a cancer-associated protein and (c) comparing the amount of product present with that in a control sample. In some embodiments, the presence in the sample of elevated levels of a cancer associated gene product indicates that the subject has a neoplastic or preneoplastic condition.

[0350] Biological samples suitable for use in this method include biological fluids such as serum, plasma, pleural effusions, urine and cerebro-spinal fluid, CSF, tissue samples (e.g., mammary tumor or prostate tissue slices) can also be used in the method of the invention, including samples derived from biopsies. Cell cultures or cell extracts derived, for example, from tissue biopsies can also be used.

[0351] In some embodiments the compound is a binding protein, e.g., an antibody, polyclonal or monoclonal, or antigen binding fragment thereof, which can be labeled with a detectable marker (e.g., fluorophore, chromophore or isotope, etc). Where appropriate, the compound can be attached to a solid support such as a bead, plate, filter, resin, etc. Determination of formation of the complex can be effected by contacting the complex with a further compound (e.g., an antibody) that specifically binds to the first compound (or complex). Like the first compound, the further compound can be attached to a solid support and/or can be labeled with a detectable marker.

[0352] The identification of elevated levels of cancer-associated protein in accordance with the present invention makes possible the identification of subjects (patients) that are likely to benefit from adjuvant therapy. For example, a biological sample from a post primary therapy subject (e.g., subject having undergone surgery) can be screened for the presence of circulating cancer-associated protein, the presence of elevated levels of the protein, determined by studies of normal populations, being indicative of residual tumor tissue. Similarly, tissue from the cut site of a surgically removed tumor can be examined (e.g., by immunofluorescence), the presence of elevated levels of product (relative to the surrounding tissue) being indicative of incomplete removal of the tumor. The ability to identify such subjects makes it possible to tailor therapy to the needs of the particular subject. Subjects undergoing non-surgical therapy, e.g., chemotherapy or radiation therapy, can also be monitored, the presence in samples from such subjects of elevated levels of cancer-associated protein being indicative of the need for continued treatment. Staging of the disease (for example, for purposes of optimizing treatment regimens) can also be effected, for example, by biopsy e.g. with antibody specific for a cancer-associated protein.

(g) Animal Models and Transgenics

[0353] The cancer-associated genes also find use in generating animal models of cancers wherein the cancer is carcinoma, melanoma, breast cancer, lymphoma, leukemia, colon cancer, kidney cancer, liver cancer, lung cancer, ovary cancer, pancreatic cancer, prostate cancer, uterine cancer, cervical cancer, bladder cancer, stomach cancer or skin cancer. In some embodiments the cancer is carcinoma, breast cancer, lymphoma or leukemia. As is appreciated by one of ordinary skill in the art, when the cancer-associated gene identified is repressed or diminished in cancer-associated tissue, gene therapy technology wherein antisense RNA directed to the cancer-associated gene will also diminish or repress expression of the gene. An animal generated as such serves as an animal model of cancer-associated that finds use in screening bioactive drug candidates. Similarly, gene knockout technology, for example as a result of homologous recombination with an appropriate gene targeting vector, will result in the absence of the cancer-associated protein. When desired, tissue-specific expression or knockout of the cancer-associated protein may be necessary.

[0354] It is also possible that the cancer-associated protein is overexpressed in cancer. As such, transgenic animals can be generated that overexpress the cancer-associated protein. Depending on the desired expression level, promoters of various strengths can be employed to express the transgene. Also, the number of copies of the integrated transgene can be determined and compared for a determination of the expression level of the transgene. Animals generated by such methods find use as animal models of cancer-associated and are additionally useful in screening for bioactive molecules to treat cancer.

Combination Therapy

[0355] In some embodiments the invention provides compositions comprising two or more cancer-associated gene antibodies to provide still improved efficacy against cancer. Compositions comprising two or more cancer-associated gene antibodies may be administered to persons or mammals suffering from, or predisposed to suffer from, cancer. One or more cancer-associated gene antibodies may also be administered with another therapeutic agent, such as a cytotoxic agent, or cancer chemotherapeutic. Concurrent administration of two or more therapeutic agents does not require that the agents be administered at the same time or by the same route, as long as there is an overlap in the time period during which the agents are exerting their therapeutic effect. Simultaneous or sequential administration is contemplated, as is administration on different days or weeks.

[0356] In some embodiments the methods provide of the invention contemplate the administration of combinations, or “cocktails”, of different antibodies. Such antibody cocktails may have certain advantages inasmuch as they contain antibodies which exploit different effector mechanisms or combine directly cytotoxic antibodies with antibodies that rely on immune effector functionality. Such antibodies in combination may exhibit synergistic therapeutic effects.

[0357] A cytotoxic agent refers to a substance that inhibits or prevents the function of cells and/or causes destruction of cells. The term is intended to include radioactive isotopes (e.g., ¹³¹I, ¹²⁵I, ⁹⁰Y and ¹⁸⁶Re), chemotherapeutic agents, and toxins such as enzymatically active toxins of bacterial, fungal, plant or animal origin or synthetic toxins, or fragments thereof. A non-cytotoxic agent refers to a substance that does not inhibit or prevent the function of cells and/or does not cause destruction of cells. A non-cytotoxic agent may include an agent that can be activated to be cytotoxic. A non-cytotoxic agent may include a bead, liposome, matrix or particle (see, e.g., U.S. Patent Publications 2003/0028071 and 2003/0032995 which are incorporated by reference herein). Such agents may be conjugated, coupled, linked or associated with an antibody according to the invention.

[0358] In some embodiments, conventional cancer medicaments are administered with the compositions of the present invention. Conventional cancer medicaments include:
[0359] a) cancer chemotherapeutic agents.
[0360] b) additional agents.
[0361] c) prodrugs.

[0362] Cancer chemotherapeutic agents include, without limitation, alkylating agents, such as carboplatin and cisplatin; nitrogen mustard alkylating agents; nitrosourea alkylating agents, such as carmustine (BCNU); antimetabolites, such as methotrexate; folinic acid; purine analog antimetabolites, mercaptopurine; pyrimidine analog antimetabolites, such as fluorouracil (5-FU) and gemcitabine (Gemzar®); hormonal antineoplastics, such as goserelin, leuprolide, and tamoxifen; natural antineoplastics, such as aldesleukin, interleukin-2, docetaxel, etoposide (VP-16), interferon alfa, paclitaxel (Taxol®), and tretinoin (ATRA); antibiotic natural antineoplastics, such as bleomycin, dactinomycin, daunorubicin, doxorubicin, daunomycin and mitomycins including mitomycin C; and vinca alkaloid natural antineoplastics, such as vinblastine, vincristine, vindesine; hydroxyurea; aceglatone, adriamycin, ifosfamide, enocitabine, epitiostanol, aclarubicin, ancitabine, nimustine, procarbazine hydrochloride, carboquone, carboplatin, carrnofur, chromomycin A3, antitumor polysaccharides, antitumor platelet factors, cyclophosphamide (Cytoxin®), Schizophyllan, cytarabine (cytosine arabinoside), dacarbazine, thioinosine, thiotepa, tegafur, dolastatins, dolastatin analogs such as auristatin, CPT-11 (irinotecan), mitozantrone, vinorelbine, teniposide, aminopterin, carminomycin, esperamicins (See, e.g., U.S. Pat. No. 4,675,187), neocarzinostatin, OK-432, bleomycin, furtulon, broxuridine, busulfan, honvan, peplomycin, bestatin (Ubenimex®), interferon-β, mepitiostane, mitobronitol, melphalan, laminin peptides, lentinan, Coriolus versicolor extract, tegafur/uracil, estramustine (estrogen/mechlorethamine).

[0363] Additonal agents which may be used as therapy for cancer patients include EPO, G-CSF, ganciclovir; antibiotics, leuprolide; meperidine; zidovudine (AZT); interleukins 1 through 18, including mutants and analogues; interferons or cytokines, such as interferons α, β, and γ hormones, such as luteinizing hormone releasing hormone (LHRH) and analogues and, gonadotropin releasing hormone (GnRH); growth factors, such as transforming growth factor-β (TGF-β), fibroblast growth factor (FGF), nerve growth factor (NGF), growth hormone releasing factor (GHRF), epidermal growth factor (EGF), fibroblast growth factor homologous factor (FGFHF), hepatocyte growth factor (HGF), and insulin growth factor (IGF); tumor necrosis factor-α& β (TNF-α& β); invasion inhibiting factor-2 (IIF-2); bone morphogenetic proteins 1-7 (BMP 1-7); somatostatin; thymosin- α-1; γ-globulin; superoxide dismutase (SOD); complement factors; anti-angiogenesis factors; antigenic materials; and pro-drugs.

[0364] Prodrug refers to a precursor or derivative form of a pharmaceutically active substance that is less cytotoxic or non-cytotoxic to tumor cells compared to the parent drug and is capable of being enzymatically activated or converted into an active or the more active parent form. See, e.g., Wilman, “Prodrugs in Cancer Chemotherapy” Biochemical Society Transactions, 14, pp. 375-382, 615th Meeting Belfast (1986) and Stella et al., “Prodrugs: A Chemical Approach to Targeted Drug Delivery,” Directed Drug Delivery, Borchardt et al., (ed.), pp. 247-267, Humana Press (1985). Prodrugs include, but are not limited to, phosphate-containing prodrugs, thiophosphate-containing prodrugs, sulfate-containing prodrugs, peptide-containing prodrugs, D-amino acid-modified prodrugs, glycosylated prodrugs, b-lactam-containing prodrugs, optionally substituted phenoxyacetamide-containing prodrugs or optionally substituted phenylacetamide-containing prodrugs, 5-fluorocytosine and other 5-fluorouridine prodrugs which can be converted into the more active cytotoxic free drug. Examples of cytotoxic drugs that can be derivatized into a prodrug form for use herein include, but are not limited to, those chemotherapeutic agents described above.

Methods for Delivering a Cytotoxic Agent or a Diagnostic Agent to a Cell

[0365] The present invention also provides methods for delivering a cytotoxic agent or a diagnostic agent to one or more cells that express a cancer-associated gene. In some embodiments the methods comprise contacting an antibody, polypeptide or nucleotide of the present invention conjugated to a cytotoxic agent or diagnostic agent with the cell. Such conjugates are discussed above.

Affinity Purification

[0366] In some embodiments the invention provides methods and compositions for affinity purification. In some embodiments, antibodies of the invention are immobilized on a solid phase such a Sephadex resin or filter paper, using methods well known in the art. The immobilized antibody is contacted with a sample containing the tumor cell antigen protein (or fragment thereof) to be purified, and thereafter the support is washed with a suitable solvent that will remove substantially all the material in the sample except the tumor cell antigen protein, which is bound to the immobilized antibody. Finally, the support is washed with another suitable solvent, such as glycine buffer, pH 5.0, that will release the tumor cell antigen protein from the antibody.

### EXAMPLES

[0367] The following examples are described so as to provide those of ordinary skill in the art with a complete disclosure and description of how to make and use the present invention, and are not intended to limit the scope of what the inventors regard as their invention nor are they intended to represent that the experiments below are all and only experiments performed. Efforts have been made to ensure accuracy with respect to numbers used (e.g. amounts, temperature, etc.) but some experimental errors and deviations should be accounted for. Unless indicated otherwise, parts are parts by weight, molecular weight is weight average molecular weight, temperature is in degrees Celsius, and pressure is at or near atmospheric.

### Example 1

### Insertion Site Analysis Following Tumor Induction in Mice

[0368] Tumors are induced in mice using either mouse mammary tumor virus (MMTV) or murine leukemia virus (MLV). MMTV causes mammary adenocarcinomas and MLV causes a variety of different hematopoetic malignancies (primarily T- or B-cell lymphomas).

[0369] Three routes of infection are used: (1) injection of neonates with purified virus preparations, (2) infection by milk-borne virus during nursing, and (3) genetic transmission of pathogenic proviruses via the germ-line (Akvrl and/or Mtv2). The type of malignancy present in each affected mouse is determined by histological analysis of H&E-stained thin sections of formalin-fixed, paraffin-embedded biopsy samples. Host DNA sequences flanking all clonally-integrated proviruses in each tumor are recovered by nested anchored-PCR using two virus-specific primers and two primers specific for a 40 bp double stranded DNA anchor ligated to restriction enzyme digested tumor DNA. Amplified bands representing host/virus junction fragments are cloned and sequenced. Then the host sequences (called “tags”) are used to BLAST analyze the mouse genomic sequence.

[0370] Extracted mouse genomic tag sequences are then mapped to the draft mouse genome assembly (NCBI m33 release) downloaded from www.ensembl.org. Tag sequences 45bp or longer are mapped to the genome using Timelogic's accelerated blast algorithm, terablast, with the following parameter setup: −t=10−X=le−10−v=20−b=20−R. Short tag sequences (<45bp) are mapped to the genome by NCBI blastall algorithm, with the following parameter setup: −e 1000−F F −W 9−v 20−b 20. The combined blast results are then filtered for the best matches for each tag sequence, which typically requires a minimum of 95% identity over at least 30% of the tag sequence length. Tags with uniq chromosome locations are passed on to the gene call process.

[0371] For each individual tag, three parameters are recorded: (1) the mouse chromosome assignment, (2) base pair coordinates at which the integration occurred, and (3) provirus orientation. Using this information, all available tags from all analyzed tumors are mapped to the mouse genome. To identify the protooncogene targets of provirus insertion mutation, the provirus integration pattern at each cluster of integrants is analyzed relative to the locations of all known genes in the transcriptome. The presence of provirus at the same locus in two or more independent tumors is prima facie evidence that a protooncogene is present at or very near the proviral integration sites. This is because the genome is too large for random integrations to result in observable clustering. Any clustering that is detected provides unequivocal evidence for biological selection during tumorigenesis. In order to identify the human orthologs of the protooncogene targets of provirus insertion mutation, a comparative analysis of syntenic regions of the mouse and human genomes is performed.

[0372] Ensembl mouse gene models and UCSC refseq and knowngene sets are used to represent the mouse transcriptome. As noted above, based on the tag chromosome positions and the proviral insertion orientation relative to the adjacent genes, each tag is assigned to its nearest neighboring gene. Proviral insertions linked to a gene are grouped in 2 categories, type I insertions or type II insertions. If the insertion is within the gene locus, either intron or exon, it is designated as a type II insertion. If not, the insertion is designated as a type I insertion provided the insertion fulfilled these additional criteria: 1) it is outside the gene locus but within 100 kilobases from the gene's start or end positions, 2) for upstream insertions, the proviral orientation is the opposite to that of the gene, and 3) for downstream insertion, the proviral orientation is the same as the gene. Genes or transcripts discovered in this process are assigned with locus IDs from NCBI Locus Link annotations. The uniq mouse locus IDs with at least 2 viral inserts make up the current Oncogenome™.

[0373] To assign human orthologs for the mouse genes in the Oncogenome™, the MGI's mouse to human ortholog annotation and NCBI's homologene annotation is used. When there are conflicts or lack of ortholog annotation, comparative analysis of syntenic regions of the mouse and human genomes are performed, using the UCSC or Ensembl genome browser. The orthologous human genes are assigned with Locus Id's from NCBI Locus Link, and these human genes are further evaluated as potential targets for cancer therapeutics as described herein.

### Example 2

### Analysis of Quantitative RT-PCR: Comparative C_{T} Method

[0374] The RT-PCR analysis is divided into 4 major steps: 1) RNA purification from primary normal and tumor tissues; 2) Generation of first strand cDNA from the purified tissue RNA for Real Time Quantitative PCR; 3) Setup RT-PCR for gene expression using ABI PRISM 7900HT Sequence Detection System tailored for 384-well reactions; 4) Analyze RT-PCR data by statistical methods to identify genes differentially expressed (up-regulated) in cancer.

[0375] These steps are set out in more detail below.

A) RNA Purification from Primary Normal and Tumor Tissues

[0376] This is performed using Qiagen RNeasy mini Kit CAT#74106. Tissue chucks typically yield approximately 30 μg of RNA resulting in a final concentration of approximately 200 ng/μl if 1501 μl of elution buffer is used.

[0377] After RNA is extracted using Qiagen's protocol, Ribogreen quantitation reagents from Molecular Probes is used to determine yield and concentration of RNA according to manufacturer's protocol.

[0378] Integrity of extracted RNA is assessed on EtBr stained agarose gel to determine if the 28S and 18S band have equal intensity. In addition, sample bands should be clear and visible. If bands are not visible or smeared down through the gel, the sample is discarded.

[0379] Integrity of extracted RNA is also assessed using Agilent 2100 according to manufacture protocol. The Agilent Bioanalyzer/“Lab-On-A-Chip” is a micro-fluidics system that generates an electropherogram of an RNA sample. By observing the ratio of the 18S and 28S bands and the smoothness of the baseline a determination of the level of RNA degradation is made. Samples that have 28S: 18S ratio below 1 are discarded.

[0380] RNA samples are also examined by RT-PCR to determine level of genomic DNA contamination during extraction. In general, RNA samples are assayed directly using validated Taqman primers and probes of gene of interest in the presence and absence of Reverse Transcriptase. 12.5 ng of RNA is used per reaction in quadruplicate in a 384 wells format in a volume of 5 ul per well. (2 ul of RNA+3 ul of RT+or RT-master mix). The following thermocycle parameters is used (2-step PCR):

[0381] Thermocycling Parameters

| | Step | | | |
|---|---|---|---|---|
| | Reverse | Amp. Gold | PCR | |
| | Transcription | Activation | 40 CYCLES | |
| | HOLD | HOLD | Denature | Anneal/Extend |
| Temperature | 48° C. | 95° C. | 95° C. | 60° C. |
| Time | 30 min. | 10 min. | 15 sec. | 1 min |

[0382] RNA samples require the following criteria to consider as pass QC.
[0383] a) Ct difference must be 7 Ct or greater for a pass. Anything less is a “fail” and should be re-purified.
[0384] b) Mean sample Ct must be within 2 STDEV (all samples) from Mean (all samples) to pass.
[0385] c) Use conditional formatting to find the outliers of the sample group. *Do not include the outliers on the RNA panels.
[0386] d) RT amplification or (Ct) must be >34 cycles or it is a “fail”.
[0387] e) Human genomic DNA must be between 23 and 27.6 Ct.

[0388] RNA is assembled into panel only if samples passed all QC steps (Gel run, Agilent and RT-PCR for genomic DNA). RNA is arrayed for cDNA synthesis. In general, a minimum of 10 normals and 20 tumors are required for each tumor type (i.e., if a tissue type can have a squamous cell carcinoma and an adenocarcinoma, 20 samples of each tumor type must be used (the same 10 normals will be used for each tumor type)). In general, 11 μg of RNA is required per panel. A fudge factor of at least 2 μg should be allowed; i.e., samples in database must have 13 μg, or they will be dropped during cDNA array. Sample numbers are arranged in ascending orders, starting at well Al and working down the column on 96 wells format. Four control samples will be placed at the end of the panel: hFB, hrRNA, hgDNA and Water (in that order). An additional NTC control (water) is placed in well A2. All lot numbers of controls are recorded. RNA samples are normalised to 100 ng/μl in Nuclease-free water. 11 μg of RNA is used, the total volume being 110 μg. NOTE: the concentration of RNA required can vary depending on the particular cDNA synthesis kit used. RNA samples that are below 100 ng/μl, are loaded pure. After normalization is complete, the block is sealed using the heat sealer with easy peel foil @ 175° C. for 2 seconds. The block is visually inspected to make sure foil is completely sealed. The manual sealer is then run over the foil. The block is stored in the −80° C. freezers, ready for cDNA synthesis.

B) Generation of First Strand cDNA from the Purified Tissue RNA for Real Time Quantitative PCR:

[0389] The following reaction mixture is setup in advance:

| Reagents | 1 RXN Volumes (μl) | RXN |
|---|---|---|
| 10X Taqman RT BUFFER | 1 | |
| 25 mM Magnesium chloride | 2.2 | |
| 10 mM deoxyNTPS mixture | 2 | |
| 50 uM Random Hexamer | 0.5 | |
| Rnase inhibitor | 0.2 | |
| 50 u/ul MultiScribe Rev. Transcriptase | 0.25 | |
| Water | 0.85 | |

[0390] Arrayed RNA in a 96 well block (11 μg) is distributed to daughter plates using Hydra to create 1 μg of cDNA synthesis per 96 well plate. Each of these daughter plates is used to setup RT reaction using the following thermocycle parameters:

Step

| | Incubation | RT | RT Inactivation |
|---|---|---|---|
| | Hold | Hold | Hold |
| Time | 10 min. | 30 min. | 5 min. |
| Temperature | 25° C. | 48° C. | 95° C. |

[0391] Upon completion of thermocyling, plates are removed from the cycler and using the Hydra pipet, 60 μl of 0.016 M EDTA solution is pippetted into every well of cDNA the plates. Each cDNA plate (no more than 10 plates) is pooled to a 2 ml-96 well block for storage.

RT-PCR for gene Expression Using ABI PRISM 7900HT Sequence Detection System Tailored for 384-well Reactions:

Create Cocktails

[0392] Cocktails are produced as follows: This protocol is designed to create cocktails for a panel with 96 samples; this is 470 rxns for the whole panel. FRT (Forward and Reverse primers and Target probe) mix is removed from −20° C. and placed in 4° C. fridge thaw. The first 10 FRT's to be made are taken out and placed in a cold metal rack or in a rack on ice. New 1.5 m1 cocktail tube caps are labelled with target number, side with the date of synthesis (found on FRT tube, if no date of synthesis label with today's date), and initials of scientist, one tube for each FRT being made.

[0393] FRT tubes and cocktails tubes are organised in rack so that they are in order and easy to keep track of. When pipeting a p200 was used at speed 6. Aspiration is carried out at the surface of the liquid, and dispensed near the top of the inside of the tube. Tips are changed after each aspirate/dispense step. All cocktail tubes are opened and 94 μl of Ambion water (poured fresh daily) is added, then tubes are closed. The FRT is Pulse vortexed 15 times, then centrifuged for 10 sec. One by one 141 μl of FRT is added to corresponding cocktail tubes. When done with first 10, FRT is put back to −20° C. immediately (if vol was less than 10 μl then they are thrown away). Cocktail is stored in 4° C. until ready to run. (−20° C. if it wait was longer than 1 day) Master mix is added to cocktails when ready to run cocktails (refer to step 2.7). Steps are repeated for the next 10 cocktails, and so on until all cocktails have been made.

| | 1 rxn | 470 | | |
|---|---|---|---|---|
| TaqMan Master Mix | volume | RXNS | | |
| TaqMan Universal Master Mix | 2.5 μl | 1175 μl | | |
| Lot# | | | | |
| Forward Primer working stock | 0.1 μl | 47 μl | | |
| Reverse Primer working stock | 0.1 μl | 47 μl | {open oversize brace} | 141 μl |
| Probe working stock | 0.1 μl | 47 μl | | |
| Water | 0.2 μl | 94 μl | | |
| Final Volume | 3.0 μl | 1410 μl | | |

[0394] 2 μl of cDNA from the arrayed 96-well plates is added to the 3111 of Taqman Master Mix to makeup a 5 μl QPCR reaction.

D) Analyze RT-PCR data by statistical methods to identify genes differentially expressed (up-regulated) in cancer:

[0395] The expression level of a target gene in both normal and tumor samples is determined using Quantitative RT-PCR using the ABI PRISM 7900HT Sequence Detection System (Applied Biosystems, California). The method is based on the quantitation of the initial copy number of target template in comparison to that of a reference (normalizer) housekeeper gene (Pre-Developed TaqMan® Assay Reagents Gene Expression Quantification Protocol, Applied Biosystems, 2001). Accumulation of DNA product with each PCR cycle is related to amplicon efficiency and the initial template concentration. Therefore the amplification efficiency of both the target and the normalizer must be similar. The threshold cycle (C_{T}), which is dependent on the starting template copy number and the DNA amplification efficiency, is a PCR cycle during which PCR product growth is exponential. Each assay is performed in quadruplicates; therefore, 4 C_{T} values are obtained for the target gene in a given sample. Simultaneously, the expression level of a group of housekeeper genes are also measured in the same fashion. The outlier within the 4 quadruplicates is detected and removed if the standard deviation of the remaining 3 triplicates is 30% or less compared to the standard deviation of the original 4 quadruplicates. The mean of the remaining C_{T} values (designated as Cₜ or Cₙ) is calculated and used in the following computation.

Data Normalization.

[0396] For normalization, a ‘universal normalizer’ is developed that is based on the set of housekeepers available for analysis (5 to 8 genes). Briefly, the housekeeper genes are weighted according to their variations in expression level across the whole panel of tissue samples. For n samples of the same tissue type, the weight (w) for the kth house keeper gene is calculated with the following formulas:

$${w}_{k} = \frac{\frac{1}{{S}_{k}^{2}}}{{\sum }_{k = 1}^{n} \frac{1}{{S}_{k}^{2}}} \qquad Equation 1$$

[0397] Where Sₖ stands for the standard deviation of the kth housekeeper gene across the all samples of same tissue type in the panel. The mean expression of all housekeeper genes in the ith sample (Mi) is estimated using the weighted least square method, and the difference between the Mi and the average of all Mi is computed as the normalization factor Ni for the ith sample (Equation 2). The mean Ct value of the target gene in the ith sample is then normalized by subtracting the normalization factor Ni. The performance of the above normalization method is validated by comparing the correlation between RT-PCR and microarray data that are generated from the same set of samples: increased correlation between RT-PCR data and microarray data is observed after applying the above normalization method.

$${N}_{i} = {M}_{i} - \frac{{\sum }_{i = 1}^{n} {M}_{i}}{n} \qquad Equation 2$$

Identification of Significantly Dysregulated Genes.

[0398] To determine if a gene is significantly up-regulated in the tumor versus normal samples, two statistics, t (Equation 3) and Receiver Operating Characteristic (ROC; Equation 4) are calculated:

$$\begin{matrix}t = \frac{{\overline{C}}_{i} - {\overline{C}}_{n}}{\sqrt{\frac{{S}_{t}^{2}}{{n}_{t}} + \frac{{S}_{n}^{2}}{{n}_{n}}}} & Equation 3 \\ ROC ( {t}_{0} ) = P [ {C}_{t} \leq {C}_{n} ( {t}_{0} ) ] & Equation 4\end{matrix}$$

where C̅ₜ is the average of Cₜ in the tumor sample group, C̅ₙ is the average of Cₙ in the normal sample group, Sₜ, Sₙ are standard deviations of the tumor and normal control groups, and nₜ, nₙ, are the number of the tumor and normal samples used in the analysis. The degree of freedom v′ of t is calculated as:

$${v}^{′} = \frac{{( \frac{{S}_{t}^{2}}{{n}_{t}} + \frac{{S}_{n}^{2}}{{n}_{n}} )}^{2}}{\frac{{( \frac{{s}_{t}^{2}}{{n}_{t}} )}^{2}}{{n}_{t} - 1} + \frac{{( \frac{{S}_{n}^{2}}{{n}_{n}} )}^{2}}{{n}_{n} - 1}} \qquad Equation 5$$

[0399] In the ROC equation, t₀ is the accepted false positive rate in the normal population, which is set to 0.1 in our study. Therefore, Cₙ(t₀) is the 10 percentile of Cₙ in the normal samples, and the ROC (0.1) is the percentage of tumor samples with Cₜ lower than the 10 percentile of the normal samples. The t statistic identifies genes that show higher average expression level in tumor samples compared to normal samples, while the ROC statistic is more suitable to identify genes that show elevated expression level only in a subset of tumors. The rationale of using ROC statistic is discussed in detail in Pepe, et al (2003) Biometrics 59, 133-142. The distribution of t under null hypothesis is empirically estimated by permutation to avoid normal distribution assumption, in which we randomly assign normal or tumor labels to the samples, and then calculate the t statistic (t^{P}) as above for 2000 times. The p value is then calculated as the number of t^{P} less than t from real samples divided by 2000. To access the variability of ROC, the samples are bootstrapped 2000 times, each time, a bootstrap ROC (ROC^{b}) is calculated as above. If 97.5% of 2000 ROC^{b} is above 0.1, the acceptable false positive rate we set for normal population, the ROC from the real samples is then considered as statistically significant. The threshold to determine significance is set at >20% incidence for ROC and <0.05 for the T-test P value.

[0400] Application of the above methodologies allows modeling of 3 hypothetical distributions between the normal and sample sets.

[0401] In scenario I, there is essentially complete separation between the two sample populations (control and disease). Both the ROC and T-Test score this scenario with high significance. In scenario II, the samples exhibit overlapping distributions and only a subset of the disease sample is distinct from the control (normal) population. Only the ROC method will score this scenario as significant. In scenario III, the disease sample population overlaps entirely with the control population. In contrast to scenario I and II, only the T-Test method will score this scenario as significant. In sum, the combination of both statistical methods allows one to accurately characterize the expression pattern of a target gene within a sample population.

### Example 3

### Detection of Cancer-associated-Sequences in Human Cancer Cells and Tissues

[0402] DNA from prostate and breast cancer tissues and other human cancer tissues, human colon, normal human tissues including non-cancerous prostate, and from other human cell lines are extracted following the procedure of Delli Bovi et al. (1986, Cancer Res. 46:6333-6338). The DNA is resuspended in a solution containing 0.05 M Tris HCl buffer, pH 7.8, and 0.1 mM EDTA, and the amount of DNA recovered is determined by microfluorometry using Hoechst 33258 dye. Cesarone, C. et al., Anal Biochem 100:188-197 (1979).

[0403] Polymerase chain reaction (PCR) is performed using Taq polymerase following the conditions recommended by the manufacturer (Perkin Elmer Cetus) with regard to buffer, Mg2+, and nucleotide concentrations. Thermocycling is performed in a DNA cycler by denaturation at 94° C. for 3 min. followed by either 35 or 50 cycles of 94° C. for 1.5 min., 50° C. for 2 min. and 72° C. for 3 min. The ability of the PCR to amplify the selected regions of the cancer-associated gene is tested by using a cloned cancer-associated polynucleotide(s) as a positive template(s). Optimal Mg²⁺, primer concentrations and requirements for the different cycling temperatures are determined with these templates. The master mix recommended by the manufacturer is used. To detect possible contamination of the master mix components, reactions without template are routinely tested.

[0404] Southern blotting and hybridization are performed as described by Southern, E. M., (J. Mol. Biol. 98:503-517, 1975), using the cloned sequences labeled by the random primer procedure (Feinberg, A. P., et al., 1983, Anal. Biochem. 132:6-13). Prehybridization and hybridization are performed in a solution containing 6×SSPE, 5% Denhardt's, 0.5% SDS, 50% formamide, 100 μg/ml denaturated salmon testis DNA, incubated for 18 hrs at 42° C., followed by washings with 2×SSC and 0.5% SDS at room temperature and at 37° C. and finally in 0.1×SSC with 0.5% SDS at 68° C. for 30 min (Sambrook et al., 1989, in “Molecular Cloning: A Laboratory Manual”, Cold Spring Harbor Lab. Press). For paraffin-embedded tissue sections the conditions described by Wright and Manos (1990, in “PCR Protocols”, Innis et al., eds., Academic Press, pp. 153-158) are followed using primers designed to detect a 250 bp sequence.

### Example 4

### Expression of Cloned Polynucleotides in Host Cells

[0405] To study the protein products of cancer-associated genes, restriction fragments from cancer-associated DNA are cloned into the expression vector pMT2 (Sambrook, et al., Molecular Cloning: A Laboratory Manual, Cold Spring Harbor Laboratory Press pp 16.17-16.22 (1989)) and transfected into COS cells grown in DMEM supplemented with 10% FCS. Transfections are performed employing calcium phosphate techniques (Sambrook, et al (1989) pp. 16.32-16.40, supra) and cell lysates are prepared forty-eight hours after transfection from both transfected and untransfected COS cells. Lysates are subjected to analysis by immunoblotting using anti-peptide antibody.

[0406] In immunoblotting experiments, preparation of cell lysates and electrophoresis are performed according to standard procedures. Protein concentration is determined using BioRad protein assay solutions. After semi-dry electrophoretic transfer to nitrocellulose, the membranes are blocked in 500 mM NaCl, 20 mM Tris, pH 7.5, 0.05% Tween-20 (TTBS) with 5% dry milk. After washing in TTBS and incubation with secondary antibodies (Amersham), enhanced chemiluminescence (ECL) protocols (Amersham) are performed as described by the manufacturer to facilitate detection.

### Example 5

### Generation of Antibodies Against Polypeptides

[0407] Polypeptides, unique to cancer-associated genes are synthesized or isolated from bacterial or other (e.g., yeast, baculovirus) expression systems and conjugated to rabbit serum albumin (RSA) with m-maleimido benzoic acid N-hydroxysuccinimide ester (MBS) (Pierce, Rockford, Ill.). Immunization protocols with these peptides are performed according to standard methods. Initially, a pre-bleed of the rabbits is performed prior to immunization. The first immunization includes Freund's complete adjuvant and 500 μg conjugated peptide or 100 μg purified peptide. All subsequent immunizations, performed four weeks after the previous injection, include Freund's incomplete adjuvant with the same amount of protein. Bleeds are conducted seven to ten days after the immunizations.

[0408] For affinity purification of the antibodies, the corresponding cancer-associated polypeptide is conjugated to RSA with MBS, and coupled to CNBr-activated Sepharose (Pharmacia, Uppsala, Sweden). Antiserum is diluted 10-fold in 10 mM Tris-HCl, pH 7.5, and incubated overnight with the affinity matrix. After washing, bound antibodies are eluted from the resin with 100 mM glycine, pH 2.5.

### Example 6

### Generation of Monoclonal Antibodies Against a Cancer-associated Polypeptide

[0409] A non-denaturing adjuvant (Ribi, R730, Corixa, Hamilton Mont.) is rehydrated to 4ml in phosphate buffered saline. 100 μl of this rehydrated adjuvant is then diluted with 400 μl of Hank's Balanced Salt Solution and this is then gently mixed with the cell pellet used for immunization. Approximately 500 μg conjugated peptide or 100 μg purified peptide and Freund's complete are injected into Balb/c mice via foot-pad, once a week. After 6 weeks of weekly injection, a drop of blood is drawn from the tail of each immunized animal to test the titer of antibodies against cancer-associated polypeptides using FACS analysis. When the titer reaches at least 1:2000, the mice are sacrificed in a CO₂ chamber followed by cervical dislocation. Lymph nodes are harvested for hybridoma preparation. Lymphocytes from mice with the highest titer are fused with the mouse myeloma line X63-Ag8.653 using 35% polyethylene glycol 4000. On day 10 following the fusion, the hybridoma supernatants are screened for the presence of CAP-specific monoclonal antibodies by fluorescence activated cell sorting (FACS). Conditioned medium from each hybridoma is incubated for 30 minutes with a combined aliquot of PC3, Colo-205, LnCap, or Panc-1 cells. After incubation, the cell samples are washed, resuspended in 0.1 ml diluent and incubated with 1 μg/ml of FITC conjugated F(ab′)2 fragment of goat anti-mouse IgG for 30 min at 4° C. The cells are washed, resuspended in 0.5 ml FACS diluent and analyzed using a FACScan cell analyzer (Becton Dickinson; San Jose, Calif.). Hybridoma clones are selected for further expansion, cloning, and characterization based on their binding to the surface of one or more of cell lines which express the cancer-associated polypeptide as assessed by FACS. A hybridoma making a monoclonal antibody designated mAbcancer-associated which binds an antigen designated Ag-CA.x and an epitope on that antigen designated Ag-CA.x.1 is selected.

### Example 7

### ELISA Assay for Detecting Cancer-associated Antigen Related Antigens

[0410] To test blood samples for antibodies that bind specifically to recombinantly produced cancer-associated antigens, the following procedure is employed. After a recombinant cancer-associated related protein is purified, the recombinant protein is diluted in PBS to a concentration of 5μg/ml (500 ng/100 μl). 100 microliters of the diluted antigen solution is added to each well of a 96-well Immulon 1 plate (Dynatech Laboratories, Chantilly, Va.), and the plate is then incubated for 1 hour at room temperature, or overnight at 4° C., and washed 3 times with 0.05% Tween 20 in PBS. Blocking to reduce nonspecific binding of antibodies is accomplished by adding to each well 200 μl of a 1% solution of bovine serum albumin in PBS/Tween 20 and incubation for 1 hour. After aspiration of the blocking solution, 100 μl of the primary antibody solution (anticoagulated whole blood, plasma, or serum),-diluted in the range of 1/16 to 1/2048 in blocking solution, is added and incubated for 1 hour at room temperature or overnight at 4° C. The wells are then washed 3 times, and 100 μl of goat anti-human IgG antibody conjugated to horseradish peroxidase (Organon Teknika, Durham, N. C.), diluted 1/500 or 1/1000 in PBS/Tween 20, 100 pl of o-phenylenediamine dihydrochloride (OPD, Sigma) solution is added to each well and incubated for 5-15 minutes. The OPD solution is prepared by dissolving a 5 mg OPD tablet in 50 ml 1% methanol in H₂O and adding 50 μl 30% H₂O₂ immediately before use. The reaction is stopped by adding 25 μl of 4M H₂SO₄. Absorbances are read at 490 nm in a microplate reader (Bio-Rad).

### Example 8

### Identification and Characterization of Cancer-associated Antigen on Cancer Cell Surface

[0411] A cell pellet of proximately 25 ul packed cell volume of a cancer cell preparation is lysed by first diluting the cells to 0.5 ml in water followed by freezing and thawing three times. The solution is centrifuged at 14,000 rpm. The resulting pellet, containing the cell membrane fragments, is resuspended in 50 μl of SDS sample buffer (Invitrogen, Carlsbad, Calif.). The sample is heated at 80° C. for 5 minutes and then centrifuged for 2 minutes at 14,000 rpm to remove any insoluble materials.

[0412] The samples are analyzed by Western blot using a 4 to 20% polyacrylamide gradient gel in Tris-Glycine SDS (Invitrogen; Carlsbad Calif.) following the manufacturer's directions. Ten microliters of membrane sample are applied to one lane on the polyacrylamide gel. A separate 10 μL sample is reduced first by the addition of 2 L of dithiothreitol (100 mM) with heating at 80° C. for 2 minutes and then loaded into another lane. Pre-stained molecular weight markers SeeBlue Plus2 (Invitrogen; Carlsbad, Calif.) are used to assess molecular weight on the gel. The gel proteins are transferred to a nitrocellulose membrane using a transfer buffer of 14.4 g/l glycine, 3 g/l of Tris Base, 10% methanol, and 0.05% SDS. The membranes are blocked, probed with a CAP-specific monoclonal antibody (at a concentration of 0.5 ug/ml), and developed using the Invitrogen WesternBreeze Chromogenic Kit-AntiMouse according to the manufacturer's directions. In the reduced sample of the tumor cell membrane samples, a prominent band is observed migrating at a molecular weight within about 10% of the predicted molecular weight of the corresponding cancer-associated protein.

### Example 9

### Preparation of Vaccines

[0413] The present invention also relates to a method of stimulating an immune response against cells that express cancer-associated polypeptides in a patient using cancer-associated polypeptides of the invention that act as an antigen produced by or associated with a malignant cell. This aspect of the invention provides a method of stimulating an immune response in a human against cancer cells or cells that express cancer-associated polynucleotides and polypeptides. The method comprises the step of administering to a human an immunogenic amount of a polypeptide comprising: (a) the amino acid sequence of a huma cancer-associated protein or (b) a mutein or variant of a polypeptide comprising the amino acid sequence of a human endogenous retrovirus cancer-associated protein.

### Example 10

### Generation of Transgenic Animals Expressing Polypeptides as a Means for Testing Therapeutics

[0414] Cancer-associated nucleic acids are used to generate genetically modified non-human animals, or site specific gene modifications thereof, in cell lines, for the study of function or regulation of prostate tumor-related genes, or to create animal models of diseases, including prostate cancer. The term “transgenic” is intended to encompass genetically modified animals having an exogenous cancer-associated gene(s) that is stably transmitted in the host cells where the gene(s) may be altered in sequence to produce a modified protein, or having an exogenous cancer-associated LTR promoter operably linked to a reporter gene. Transgenic animals may be made through a nucleic acid construct randomly integrated into the genome. Vectors for stable integration include plasmids, retroviruses and other animal viruses, YACs, and the like. Of interest are transgenic mammals, e.g. cows, pigs, goats, horses, etc., and particularly rodents, e.g. rats, mice, etc.

[0415] The modified cells or animals are useful in the study of cancer-associated gene function and regulation. For example, a series of small deletions and/or substitutions may be made in the cancer-associated genes to determine the role of different genes in tumorigenesis. Specific constructs of interest include, but are not limited to, antisense constructs to block cancer-associated gene expression, expression of dominant negative cancer-associated gene mutations, and over-expression of a cancer-associated gene. Expression of a cancer-associated gene or variants thereof in cells or tissues where it is not normally expressed or at abnormal times of development is provided. In addition, by providing expression of proteins derived from cancer-associated in cells in which it is otherwise not normally produced, changes in cellular behavior can be induced.

[0416] DNA constructs for random integration need not include regions of homology to mediate recombination. Conveniently, markers for positive and negative selection are included. For various techniques for transfecting mammalian cells, see Keown et al., Methods in Enzymology 185:527-537 (1990).

[0417] For embryonic stem (ES) cells, an ES cell line is employed, or embryonic cells are obtained freshly from a host, e.g. mouse, rat, guinea pig, etc. Such cells are grown on an appropriate fibroblast-feeder layer or grown in the presence of appropriate growth factors, such as leukemia inhibiting factor (LIF). When ES cells are transformed, they may be used to produce transgenic animals. After transformation, the cells are plated onto a feeder layer in an appropriate medium. Cells containing the construct may be detected by employing a selective medium. After sufficient time for colonies to grow, they are picked and analyzed for the occurrence of integration of the construct. Those colonies that are positive may then be used for embryo manipulation and blastocyst injection. Blastocysts are obtained from 4 to 6 week old superovulated females. The ES cells are trypsinized, and the modified cells are injected into the blastocoel of the blastocyst. After injection, the blastocysts are returned to each uterine horn of pseudopregnant females. Females are then allowed to go to term and the resulting chimeric animals screened for cells bearing the construct. By providing for a different phenotype of the blastocyst and the ES cells, chimeric progeny can be readily detected.

[0418] The chimeric animals are screened for the presence of the modified gene and males and females having the modification are mated to produce homozygous progeny. If the gene alterations cause lethality at some point in development, tissues or organs are maintained as allogeneic or congenic grafts or transplants, or in in vitro culture. The transgenic animals may be any non-human mammal, such as laboratory animals, domestic animals, etc. The transgenic animals are used in functional studies, drug screening, etc., e.g. to determine the effect of a candidate drug on prostate cancer, to test potential therapeutics or treatment regimens, etc.

### Example 11

### Diagnostic Imaging Using CA Specific Antibodies

[0419] The present invention encompasses the use of antibodies to cancer-associated polypeptides to accurately stage cancer patients at initial presentation and for early detection of metastatic spread of cancer. Radioimmunoscintigraphy using monoclonal antibodies specific for cancer-associated polypeptides can provide an additional cancer-specific diagnostic test. The monoclonal antibodies of the instant invention are used for histopathological diagnosis of carcinomas.

[0420] Subcutaneous human xenografts of cancer cells in nude mice are used to test whether a technetium-99m (^{99m}Tc)-labeled monoclonal antibody of the invention can successfully image the xenografted cancer by external gamma scintography as described for seminoma cells by Marks, et al., Brit. J. Urol. 75:225 (1995). Each monoclonal antibody specific for a cancer-associated polypeptide is purified from ascitic fluid of BALB/c mice bearing hybridoma tumors by affinity chromatography on protein A-Sepharose. Purified antibodies, including control monoclonal antibodies such as an avidin-specific monoclonal antibody (Skea, et al., J. Immunol. 151:3557 (1993)) are labeled with ^{99m}Tc following reduction, using the methods of Mather, et al., J. Nucl. Med. 31:692 (1990) and Zhang et al., Nucl. Med. Biol. 19:607 (1992). Nude mice bearing human cancer cells are injected intraperitoneally with 200-500 μCi of ^{99m}Tc-labeled antibody. Twenty-four hours after injection, images of the mice are obtained using a Siemens ZLC3700 gamma camera equipped with a 6 mm pinhole collimator set approximately 8 cm from the animal. To determine monoclonal antibody biodistribution following imaging, the normal organs and tumors are removed, weighed, and the radioactivity of the tissues and a sample of the injectate are measured. Additionally, cancer-associated antigen-specific antibodies conjugated to antitumor compounds are used for cancer-specific chemotherapy.

### Example 12

### Immunohistochemical Methods

[0421] Frozen tissue samples from cancer patients are embedded in an optimum cutting temperature (OCT) compound and quick-frozen in isopentane with dry ice. Cryosections are cut with a Leica 3050 CM mictrotome at thickness of 5 μm and thaw-mounted on vectabound-coated slides. The sections are fixed with ethanol at −20° C. and allowed to air dry overnight at room temperature. The fixed sections are stored at −80° C. until use. For immunohistochemistry, the tissue sections are retrieved and first incubated in blocking buffer (PBS, 5% normal goat serum, 0.1% Tween 20) for 30 minutes at room temperature, and then incubated with the cancer-associated protein-specific monoclonal antibody and control monoclonal antibodies diluted in blocking buffer (1 μg/ml) for 120 minutes. The sections are then washed three times with the blocking buffer. The bound monoclonal antibodies are detected with a goat anti-mouse IgG+IgM (H+L) F(ab′)²-peroxidase conjugates and the peroxidase substrate diaminobenzidine (1 mg/ml, Sigma Catalog No. D 5637) in 0.1 M sodium acetate buffer pH 5.05 and 0.003% hydrogen peroxide (Sigma cat. No. H1009). The stained slides are counter-stained with hematoxylin and examined under Nikon microscope.

[0422] Monoclonal antibody against a cancer-associated protein (antigen) is used to test reactivity with various cell lines from different types of tissues. Cells from different established cell lines are removed from the growth surface without using proteases, packed and embedded in OCT compound. The cells are frozen and sectioned, then stained using a standard IHC protocol. The CellArray™ technology is described in WO 01/43869. Normal tissue (human) obtained by surgical resection are frozen and mounted. Cryosections are cut with a Leica 3050 CM mictrotome at thickness of 5 μm and thaw-mounted on vectabound-coated slides. The sections are fixed with ethanol at −20° C. and allowed to air dry overnight at room temperature. PolyMICA™ Detection kit is used to determine binding of a cancer-associated antigen-specific monoclonal antibody to normal tissue. Primary monoclonal antibody is used at a final concentration of 1 μg/ml.

### Example 13

### Expression Data

[0423] The table below shows the expression level of a number of genes from this application in a range of tumor tissues. The results of three forms of expression assay are shown in the table. Results with the notation U133A&B (see Array Type column) indicate that an Affymetrix oligonucleotide based expression array was used (worldwide web site: affymetrix.com/support/technical/byproduct.affx?product-hg-u133-plus) results with the notation Chiron cDNA array were produced using a Chiron in house spotted cDNA array. The remaining results were produced using the Affymetrix U133 plus 2 oligo array (worldwide web site: affymetrix.com/support/technical/byproduct.affx?product=hg-u133-plus).

[0424] Tissue samples for the first two array formats were collected using laser capture microdissection (LCD) (see definition below). Tissue samples for the third form of array (U133 plus 2) were collected using standard manual dissection procedures.

[0425] The level of differential expression was assessed by separate methods for each array type. The results for U133A&B and EVD arrays are expressed as the number of samples that had an expression level either above or below a defined threshold. The notation “2× concordance” or “0.5× Concordance” indicates that a number of the samples (shown in the column % samples showing diff level of expression) had either a 2× greater level of expression than the control values or a level of expression less than half that of the control average. Thus showing either over or under-expression of the gene (at a significance level of “t”<=0.001).

[0426] The expression levels for the U133+2 arrays are expressed as 80-50 or 80-80 percentile ratios. All results shown have passed at test for significance at the 0.001% level. In an 80-50 Percentile Ratio result 20% of the tumor samples have a greater the 2 fold level of overexpression when compared to 50% of the control samples. In an 80-80 percentile ratio result 20% of the tumor samples have a greater than 3 fold level of overexpression as compared to 80% of the control samples.

Selection of Tumor Associated Antigens for Targeting

Laser Dissection of Tumorous Cells and Adjacent Normals and Production of RNA from Dissected Cells.

[0427] Normal and cancerous tissues were collected from patients using laser capture microdissection (LCM), and RNA was prepared from these tissues, using techniques which are well known in the art (see, e.g., Ohyama et al. (2000) Biotechniques 29:530-6; Curran et al. (2000) Mol. Pathol. 53:64-8; Suarez-Quian et al. (1999) Biotech'iques 26:328-35; Simone et al. (1998) Trends Gerzet 14:272-6; Conia et al. (1997) J. Clin. Lab. Anal. 11:28-38; Emmert-Buck et al. (1996) Science 274:998-1001). Because LCM provides for the isolation of specific cell types to provide a substantially homogenous cell sample, this provided for a similarly pure RNA sample.

Microarray Analysis

[0428] Production of cDNA: Total RNA produced from the dissected cells was then used to produce cDNA using an Affymetrix Two-cycle cDNA Synthesis Kit (cat# 900432). 8 μL of total RNA was used with 1 μL T7-(dT) 24 primer (50 pmol/μL) in an 11 μL reaction which was heated to 70° C. for 12 minutes. The mixture was then cooled to room temperature for five minutes. 9 μL master mix (4 μL 5×1^{st} strand cDNA buffer, 2 μL 0.1 M DTT, 1 μL 10 mM dNTP mix, 2 μL Superscript II (600 U/μL)) was added and the mixture was incubated for 2.5 hours at 42° C. (total volume of the mixture was 20 μL). Following cooling on ice, the 2^{nd} strand synthesis was completed as follows: 20 μL mixture from above was mixed with 130 μL second strand master mix (91 μL water, 30 μL 5× Second Strand Reaction Buffer, 3 μL 10 mM dNTP mix, 1 IL 10 U/μL e. coli DNA ligase, 4 μL 10 U/μL E. coli DNA polymerase I, 1 μL 2 U/μL e. coli Rnase H) and was incubated for 2 hours at 16° C. for 10 minutes. Following cooling on ice, the dsDNA was purified from the reaction mixture. Briefly, a QiaQuick PCT Purification Kit was used (Qiagen, cat# 28104), and 5 volumes of buffer PB was added to 1 volume of the cDNA mixture. The cDNA was then purified on a QIAquick spin column according to manufacture's directions, yielding a final volume of 60 μL.

[0429] Production of biotin-labeled cRNA. The cDNA produced and purified above was then used to make biotin labeled RNA as follows: The 60 μL of cDNA recovered from the QIAQuick column was reduced to a volume of 22 μL in a medium heated speed vacuum. This was then used with an ENZO BioArray High Yield RNA Transcription Kit (cat# 4265520). Briefly, a master mix containing 4 μL 10× HY Reaction buffer, 4 μL 10×Biotin-Labeled Ribonucleotides, 4 μL DTT, 4 μL Rnase Inhibitor Mix, and 2 μL T7 RNA Polymerase was added to the 22 μL of purified cDNA, and left tp incubate at 37° C. for 4 to 6 hours. The reaction was then purified using a Qiagen RNeasy Kit (cat# 74104) according to manufacturer's directions.

[0430] Fragmentation of cRNA. 15 to 20 μg of cRNA from above was mixed with 8 μL of 5× Fragmentation Buffer (200 mM Tris-acetate, pH 8.1, 500 mM Potassium acetate, 150 mM Magnesium acetate) and water to a final volume of 40 μL. The mixture was incubated at 94° C. for 35 minutes. Typically, this fragmentation protocol yields a distribution of RNA fragments that range in size from 35 to 200 bases. Fragmentation was confirmed using TAE agarose electrophoresis.

[0431] Array Hybridization. The fragmented cRNA from above was then used to make a hybridization cocktail. Briefly, the 40 μL from above was mixed with 1 mg/mL human Cot DNA and a suitable control oligonucleotide. Additionally, 3 mg of Herring Sperm DNA (10 mg/mL) was added along with 150 μL 2× Hybridization buffer (100 mM MES, 1 M NaCl, 20 mM EDTA, 0.01% Tween-20) and water to a final volume of 300 μL. 200 μL of this solution was then loaded onto the U133 array (Affymetrix cat # 900370) and incubated at 45° C. with a constant speed of 45 rpm overnight. The hybridization buffer was then removed and the array was washed and stained with 200 μL Non-stringent wash buffer (6×SSPE, 0.01% Tween-20) and using a GeneChip Fluidics Station 450 (Affymetrix, cat# 00-0079) according to manufacturer's protocol.

[0432] Scanning array. The array from above was then scanned using a GeneChip Scanner 3000 (Affymetrix cat# 00-0217) according to manufacturer's protocol.

[0433] Selection of potential tumor cell antigen targets. The tumor antigens were selected for targeting by comparison of the expression level of the antigen in the tumor cells (either primary tumors or metastases) versus neighboring healthy tissue or with pooled normal tissue. Tumor antigens selected showed at least a 3 fold (300%) increased expression relative to surrounding normal tissue, where this 3 fold increase is seen in comparison with a majority of pooled, commercially available normal tissue samples (Reference standard mix or RSM, pools are made for each tissue type). The tables below present the fold increase data from the array analysis for the respective genes, where the numbers represent the percent of patient samples analyzed that showed a 2-, 3- or 5-fold increase in expression in comparison to normal tissues.

[0434] Results for 80-50 or 80-80 percentile ratio assays are in terms of fold difference of expression. Results for the remaining assays are in terms of percent of samples showing a significant difference in expression versus control.

| | | | | | | % samples | | |
|---|---|---|---|---|---|---|---|---|
| | | | | | | showing diff | | |
| | | | | | | level of | | |
| | | | | | SDev | expression | | No |
| GENE | | | | Avg No of | of | or Fold Diff | SDev of | of Replicate |
| SYMBOL | Array Type | Tumour Type and Control Notation | Result Type | Tissue Samples | Sample No | from normal | Fold or % diff. | Exp |
| ADORA3 | U133 + 2 | Renal Carcinoma All Vs Essential Normal | 80-50 Percentile Ratio | 66 | | 3 | | 1 |
| ANP32A | U133 + 2 | Bladder Carcinoma All Vs Essential Normal | 80-50 Percentile Ratio | 20 | | 3 | | 1 |
| ANP32A | U133 + 2 | Blood/Lymph Carcinoma All Vs Essential Normal | 80-50 Percentile Ratio | 60 | | 3 | | 1 |
| ANP32A | U133 + 2 | Breast Carcinoma All Vs Essential Normal | 80-50 Percentile Ratio | 43 | | 2 | | 1 |
| ANP32A | U133 + 2 | Liver Carcinoma All Vs Essential Normal | 80-50 Percentile Ratio | 21 | | 2 | | 1 |
| ANP32A | U133 + 2 | Melanoma All Vs Essential Normal | 80-50 Percentile Ratio | 41 | | 3 | | 1 |
| ANP32A | U133 + 2 | Ovarian Carcinoma All Vs Essential Normal | 80-50 Percentile Ratio | 72 | | 3 | | 1 |
| ANP32A | U133 + 2 | Upper Aero-Digestive Tract Carcinoma All Vs Essential Normal | 80-50 Percentile Ratio | 23 | | 2 | | 1 |
| ANP32A | U133 + 2 | Uterus Carcinoma All Vs Essential Normal | 80-50 Percentile Ratio | 39 | | 2 | | 1 |
| ANXA3 | U133A&B | Colon Cancer | 2Xconcordance | 27 | | 48 | | 1 |
| ANXA3 | U133A&B | Colon Met | 2Xconcordance | 33 | | 64 | | 1 |
| ANXA3 | U133 + 2 | GI Tract Carcinoma All Vs Essential Normal | 80-80 Percentile Ratio | 21 | | 4 | | 1 |
| ANXA3 | U133 + 2 | Stomach Carcinoma All Vs Essential Normal | 80-50 Percentile Ratio | 23 | | 9 | | 1 |
| ANXA3 | Chiron cDNA | Colon Cancer | 2Xconcordance | 41 | | 49 | | 1 |
| | array | | | | | | | |
| ANXA3 | Chiron cDNA | Colon Met | 2Xconcordance | 30 | | 47 | | 1 |
| | array | | | | | | | |
| ANXA3 | Chiron cDNA | matched Colon | 2Xconcordance | 11 | | 64 | | 1 |
| | array | | | | | | | |
| ANXA3 | Chiron cDNA | matched Colon Met | 2Xconcordance | 11 | | 64 | | 1 |
| | array | | | | | | | |
| ARF3 | U133 + 2 | Breast Carcinoma All Vs Essential Normal | 80-50 Percentile Ratio | 43 | | 2 | | 1 |
| ARF3 | Chiron cDNA | Breast Cancer | 2Xconcordance | 18 | | 22 | | 1 |
| | array | | | | | | | |
| ARID1B | U133A&B | Colon Met | 2Xconcordance | 30 | | 37 | | 1 |
| ARMC1 | U133A&B | Breast Cancer | 2Xconcordance | 50 | 0 | 36 | 0 | 2 |
| ARMC1 | U133A&B | Colon Cancer | 2Xconcordance | 26 | | 38 | | 1 |
| ARMC1 | U133A&B | Colon Met | 2Xconcordance | 33 | | 30 | | 1 |
| ARMC1 | U133 + 2 | Blood/Lymph Carcinoma All Vs Essential Normal | 80-50 Percentile Ratio | 60 | | 2 | | 1 |
| ARMC1 | U133 + 2 | Breast Carcinoma All Vs Essential Normal | 80-50 Percentile Ratio | 43 | 0 | 2.5 | 0.7071 | 2 |
| ARMC1 | U133 + 2 | Liver Carcinoma All Vs Essential Normal | 80-50 Percentile Ratio | 21 | | 3 | | 1 |
| ARMC1 | U133 + 2 | Lung Carcinoma All Vs Essential Normal | 80-50 Percentile Ratio | 68 | | 3 | | 1 |
| ARMC1 | U133 + 2 | Melanoma All Vs Essential Normal | 80-50 Percentile Ratio | 41 | | 3 | | 1 |
| ARMC1 | U133 + 2 | Ovarian Carcinoma All Vs Essential Normal | 80-50 Percentile Ratio | 72 | | 3 | | 1 |
| ARMC1 | U133 + 2 | Uterus Carcinoma All Vs Essential Normal | 80-50 Percentile Ratio | 39 | | 2 | | 1 |
| ARMC1 | Chiron cDNA | Breast Cancer | 2Xconcordance | 23 | | 22 | | 1 |
| | array | | | | | | | |
| ARMC1 | Chiron cDNA | matched Colon | 2Xconcordance | 36 | | 25 | | 1 |
| | array | | | | | | | |
| ARMC1 | Chiron cDNA | matched Colon Met | 2Xconcordance | 35 | | 40 | | 1 |
| | array | | | | | | | |
| ARPC2 | U133A&B | Colon Cancer | 2Xconcordance | 27 | | 22 | | 1 |
| ARPC2 | U133 + 2 | Bladder Carcinoma All Vs Essential Normal | 80-50 Percentile Ratio | 20 | 0 | 4.5 | 0.7071 | 2 |
| ARPC2 | U133 + 2 | Bladder Carcinoma All Vs Essential Normal | 80-80 Percentile Ratio | 19 | | 3 | | 1 |
| ARPC2 | U133 + 2 | Blood Lymph Carcinoma All Vs Essential Normal | 80-80 Percentile Ratio | 61 | | 3 | | 1 |
| ARPC2 | U133 + 2 | Blood/Lymph Carcinoma All Vs Essential Normal | 80-50 Percentile Ratio | 60 | 0 | 5 | 0 | 2 |
| ARPC2 | U133 + 2 | Lung Carcinoma All Vs Essential Normal | 80-50 Percentile Ratio | 68 | | 2 | | 1 |
| ARPC2 | U133 + 2 | Stomach Carcinoma All Vs Essential Normal | 80-50 Percentile Ratio | 23 | 0 | 2 | 0 | 2 |
| ARPC2 | U133 + 2 | Upper Aero-Digestive Tract Carcinoma All Vs Essential Normal | 80-50 Percentile Ratio | 23 | 0 | 3.5 | 0.7071 | 2 |
| ARPC2 | Chiron cDNA | Breast Cancer | 2Xconcordance | 23 | | 22 | | 1 |
| | array | | | | | | | |
| ATP2B4 | U133 + 2 | Ovarian Carcinoma All Vs Essential Normal | 80-50 Percentile Ratio | 72 | | 3 | | 1 |
| ATP2B4 | Chiron cDNA | Breast Cancer | 2Xconcordance | 23 | 0 | 39 | 5.6569 | 2 |
| | array | | | | | | | |
| ATP2B4 | Chiron cDNA | Colon Cancer | 2Xconcordance | 59 | 25.456 | 55 | 1.4142 | 2 |
| | array | | | | | | | |
| ATP2B4 | Chiron cDNA | Colon Met | 2Xconcordance | 31.5 | 1.7321 | 39.5 | 20.486 | 4 |
| | array | | | | | | | |
| ATP2B4 | Chiron cDNA | matched Colon | 2Xconcordance | 36 | | 53 | | 1 |
| | array | | | | | | | |
| ATP2B4 | Chiron cDNA | matched Colon Met | 2Xconcordance | 36 | 0 | 36 | 11.314 | 2 |
| | array | | | | | | | |
| ATP8B4 | U133A&B | Colon Cancer | 2Xconcordance | 26 | | 42 | | 1 |
| ATP8B4 | U133A&B | Prostate Cancer | 2Xconcordance | 22 | | 23 | | 1 |
| BCL11B | U133A&B | Colon Cancer | 2Xconcordance | 26 | | 42 | | 1 |
| BCL11B | U133A&B | Prostate Cancer | 2Xconcordance | 22 | | 23 | | 1 |
| BCL11B | U133 + 2 | Blood Lymph Carcinoma All Vs Essential Normal | 80-80 Percentile Ratio | 61 | 0 | 4.5 | 0.7071 | 2 |
| BCL11B | U133 + 2 | Blood/Lymph Carcinoma All Vs Essential Normal | 80-50 Percentile Ratio | 60 | 0 | 7 | 2.8284 | 2 |
| BCL11B | U133 + 2 | Upper Aero-Digestive Carcinoma All Vs Essential Normal | 80-80 Percentile Ratio | 23 | | 3 | | 1 |
| BCL11B | U133 + 2 | Upper Aero-Digestive Tract Carcinoma All Vs Essential Normal | 80-50 Percentile Ratio | 23 | | 5 | | 1 |
| BCL2L1 | U133 + 2 | Liver Carcinoma All Vs Essential Normal | 80-50 Percentile Ratio | 21 | | 2 | | 1 |
| BCL2L1 | U133 + 2 | Ovarian Carcinoma All Vs Essential Normal | 80-50 Percentile Ratio | 72 | 0 | 2.5 | 0.7071 | 2 |
| BLK | U133 + 2 | Blood Lymph Carcinoma All Vs Essential Normal | 80-80 Percentile Ratio | 61 | | 7 | | 1 |
| BLK | U133 + 2 | Blood/Lymph Carcinoma All Vs Essential Normal | 80-50 Percentile Ratio | 60 | | 9 | | 1 |
| BLK | Chiron cDNA | Colon Cancer | 2Xconcordance | 76 | | 38 | | 1 |
| | array | | | | | | | |
| BLK | Chiron cDNA | Colon Met | 2Xconcordance | 33 | | 24 | | 1 |
| | array | | | | | | | |
| BLK | Chiron cDNA | matched Colon | 2Xconcordance | 36 | | 44 | | 1 |
| | array | | | | | | | |
| BLK | Chiron cDNA | matched Colon Met | 2Xconcordance | 35 | | 31 | | 1 |
| | array | | | | | | | |
| BLM | U133 + 2 | Blood/Lymph Carcinoma All Vs Essential Normal | 80-50 Percentile Ratio | 60 | | 3 | | 1 |
| BLM | Chiron cDNA | matched Colon | 2Xconcordance | 36 | | 22 | | 1 |
| | array | | | | | | | |
| BLR1 | U133A&B | Colon Cancer | 2Xconcordance | 27 | | 37 | | 1 |
| BLR1 | U133 + 2 | Blood Lymph Carcinoma All Vs Essential Normal | 80-80 Percentile Ratio | 61 | | 10 | | 1 |
| BLR1 | U133 + 2 | Blood/Lymph Carcinoma All Vs Essential Normal | 80-50 Percentile Ratio | 60 | | 15 | | 1 |
| BLR1 | U133 + 2 | Liver Carcinoma All Vs Essential Normal | 80-50 Percentile Ratio | 21 | | 2 | | 1 |
| BLR1 | U133 + 2 | Pancreas Carcinoma All Vs Essential Normal | 80-50 Percentile Ratio | 13 | | 2 | | 1 |
| BLR1 | U133 + 2 | Stomach Carcinoma All Vs Essential Normal | 80-50 Percentile Ratio | 23 | | 2 | | 1 |
| C13orf18 | U133A&B | Colon Cancer | 2Xconcordance | 27 | 0 | 52 | 5.6569 | 2 |
| C13orf18 | U133A&B | Colon Met | 2Xconcordance | 33 | 0 | 51.5 | 9.1924 | 2 |
| C13orf18 | U133 + 2 | Blood Lymph Carcinoma All Vs Essential Normal | 80-80 Percentile Ratio | 61 | 0 | 15.5 | 2.1213 | 2 |
| C13orf18 | U133 + 2 | Blood/Lymph Carcinoma All Vs Essential Normal | 80-50 Percentile Ratio | 60 | 0 | 19.5 | 0.7071 | 2 |
| C13orf24 | U133A&B | Colon Cancer | 2Xconcordance | 25 | | 40 | | 1 |
| C13orf24 | U133 + 2 | Uterus Carcinoma All Vs Essential Normal | 80-50 Percentile Ratio | 39 | | 2 | | 1 |
| C14orf4 | U133A&B | Colon Cancer | 2Xconcordance | 26 | | 38 | | 1 |
| C14orf4 | U133A&B | Colon Met | 2Xconcordance | 33 | | 36 | | 1 |
| C14orf4 | U133 + 2 | Bladder Carcinoma All Vs Essential Normal | 80-50 Percentile Ratio | 20 | | 2 | | 1 |
| C14orf4 | U133 + 2 | Ovarian Carcinoma All Vs Essential Normal | 80-50 Percentile Ratio | 72 | | 2 | | 1 |
| C1orf41 | U133A&B | Colon Cancer | 2Xconcordance | 27 | 0 | 44.5 | 16.263 | 2 |
| C1orf41 | U133A&B | Colon Met | 2Xconcordance | 32 | | 50 | | 1 |
| C1orf41 | U133 + 2 | Blood/Lymph Carcinoma All Vs Essential Normal | 80-50 Percentile Ratio | 60 | 0 | 3 | 0 | 2 |
| C1orf41 | U133 + 2 | Breast Carcinoma All Vs Essential Normal | 80-50 Percentile Ratio | 43 | 0 | 3 | 0 | 2 |
| C1orf41 | U133 + 2 | Liver Carcinoma All Vs Essential Normal | 80-50 Percentile Ratio | 21 | 0 | 2.5 | 0.7071 | 2 |
| C1orf41 | U133 + 2 | Lung Carcinoma All Vs Essential Normal | 80-50 Percentile Ratio | 68 | 0 | 2.5 | 0.7071 | 2 |
| C1orf41 | U133 + 2 | Melanoma All Vs Essential Normal | 80-50 Percentile Ratio | 41 | 0 | 3 | 0 | 2 |
| C1orf41 | U133 + 2 | Ovarian Carcinoma All Vs Essential Normal | 80-50 Percentile Ratio | 72 | 0 | 3 | 0 | 2 |
| C1orf41 | U133 + 2 | Upper Aero-Digestive Tract Carcinoma All Vs Essential Normal | 80-50 Percentile Ratio | 23 | | 3 | | 1 |
| C1orf41 | U133 + 2 | Uterus Carcinoma All Vs Essential Normal | 80-50 Percentile Ratio | 39 | 0 | 4 | 0 | 2 |
| C1orf41 | U133 + 2 | Uterus Endometrial Carcinoma All Vs Essential Normal | 80-80 Percentile Ratio | 39 | | 3 | | 1 |
| C1orf9 | U133 + 2 | Bladder Carcinoma All Vs Essential Normal | 80-50 Percentile Ratio | 20 | | 3 | | 1 |
| C1orf9 | U133 + 2 | Breast Carcinoma All Vs Essential Normal | 80-50 Percentile Ratio | 43 | | 5 | | 1 |
| C1orf9 | U133 + 2 | Breast Carcinoma All Vs Essential Normal | 80-80 Percentile Ratio | 43 | | 3 | | 1 |
| C1orf9 | U133 + 2 | Lung Carcinoma All Vs Essential Normal | 80-50 Percentile Ratio | 68 | | 3 | | 1 |
| C1orf9 | U133 + 2 | Melanoma All Vs Essential Normal | 80-50 Percentile Ratio | 41 | | 4 | | 1 |
| C1orf9 | U133 + 2 | Ovarian Carcinoma All Vs Essential Normal | 80-50 Percentile Ratio | 72 | | 4 | | 1 |
| C1orf9 | U133 + 2 | Pancreas Carcinoma All Vs Essential Normal | 80-50 Percentile Ratio | 13 | | 2 | | 1 |
| C1orf9 | U133 + 2 | Uterus Carcinoma All Vs Essential Normal | 80-50 Percentile Ratio | 39 | | 4 | | 1 |
| C1orf9 | Chiron cDNA | Breast Cancer | 2Xconcordance | 23 | 0 | 45.5 | 3.5355 | 2 |
| | array | | | | | | | |
| C1orf9 | Chiron cDNA | Colon Cancer | 2Xconcordance | 75 | 0 | 22 | 2.8284 | 2 |
| | array | | | | | | | |
| C1orf9 | Chiron cDNA | Colon Met | 2Xconcordance | 33 | 0 | 22.5 | 2.1213 | 2 |
| | array | | | | | | | |
| C1orf9 | Chiron cDNA | matched Colon | 2Xconcordance | 36 | | 22 | | 1 |
| | array | | | | | | | |
| C1orf9 | Chiron cDNA | matched Colon Met | 2Xconcordance | 36 | 0 | 29 | 5.6569 | 2 |
| | array | | | | | | | |
| C2orf11 | U133A&B | Breast Cancer | 2Xconcordance | 12 | | 100 | | 1 |
| C2orf11 | U133A&B | Colon Met | 2Xconcordance | 29 | | 21 | | 1 |
| C2orf11 | U133 + 2 | Melanoma All Vs Essential Normal | 80-50 Percentile Ratio | 41 | | 12 | | 1 |
| C2orf11 | U133 + 2 | Melanoma All Vs Essential Normal | 80-80 Percentile Ratio | 39 | | 3 | | 1 |
| C6orf190 | U133 + 2 | Blood Lymph Carcinoma All Vs Essential Normal | 80-80 Percentile Ratio | 61 | 0 | 4 | 1.4142 | 2 |
| C6orf190 | U133 + 2 | Blood/Lymph Carcinoma All Vs Essential Normal | 80-50 Percentile Ratio | 60 | 0 | 12 | 11.314 | 2 |
| C6orf32 | U133A&B | Colon Cancer | 2Xconcordance | 11 | | 91 | | 1 |
| C6orf32 | U133A&B | Colon Met | 2Xconcordance | 13 | | 77 | | 1 |
| C6orf32 | U133 + 2 | Blood Lymph Carcinoma All Vs Essential Normal | 80-80 Percentile Ratio | 61 | 0 | 8.5 | 4.9497 | 2 |
| C6orf32 | U133 + 2 | Blood/Lymph Carcinoma All Vs Essential Normal | 80-50 Percentile Ratio | 60 | 0 | 12 | 8.4853 | 2 |
| C9orf5 | U133A&B | Colon Cancer | 2Xconcordance | 25 | 1.4142 | 38.5 | 10.607 | 2 |
| C9orf5 | U133A&B | Colon Met | 2Xconcordance | 31 | | 29 | | 1 |
| C9orf5 | U133A&B | Prostate Cancer vs adjacent Normal | 2Xconcordance | 16.5 | 0.7071 | 24.5 | 0.7071 | 2 |
| CACNA1D | U133A&B | Breast Cancer | 2Xconcordance | 42 | | 21 | | 1 |
| CACNA1D | U133A&B | Prostate Cancer | 2Xconcordance | 22 | | 45 | | 1 |
| CACNA1D | U133A&B | Prostate Cancer vs adjacent Normal | 2Xconcordance | 15 | | 40 | | 1 |
| CACNA1E | U133A&B | Colon Cancer | 2Xconcordance | 26 | | 88 | | 1 |
| CACNA1E | U133A&B | Colon Met | 2Xconcordance | 33 | | 64 | | 1 |
| CACNA1E | U133A&B | Prostate Cancer | 2Xconcordance | 22 | | 41 | | 1 |
| CACNA1E | U133A&B | Prostate Cancer vs adjacent Normal | 2Xconcordance | 17 | | 35 | | 1 |
| CACNA1E | U133 + 2 | Ovarian Carcinoma All Vs Essential Normal | 80-50 Percentile Ratio | 72 | | 2 | | 1 |
| CACNA1E | U133 + 2 | Renal Carcinoma All Vs Essential Normal | 80-50 Percentile Ratio | 66 | | 2 | | 1 |
| CALM2 | U133 + 2 | Breast Carcinoma All Vs Essential Normal | 80-50 Percentile Ratio | 43 | | 2 | | 1 |
| CALM2 | Chiron cDNA | Breast Cancer | 2Xconcordance | 23 | | 22 | | 1 |
| | array | | | | | | | |
| CCND2 | U133A&B | Colon Cancer | 2Xconcordance | 27 | | 37 | | 1 |
| CCND2 | Chiron cDNA | Colon Cancer | 2Xconcordance | 75.5 | 0.7071 | 29.5 | 0.7071 | 2 |
| | array | | | | | | | |
| CCND2 | Chiron cDNA | Colon Met | 2Xconcordance | 33 | | 24 | | 1 |
| | array | | | | | | | |
| CCND2 | Chiron cDNA | matched Colon | 2Xconcordance | 36 | 0 | 27.5 | 7.7782 | 2 |
| | array | | | | | | | |
| CCND2 | Chiron cDNA | matched Colon Met | 2Xconcordance | 35 | | 40 | | 1 |
| | array | | | | | | | |
| CCRN4L | U133A&B | Breast Cancer | 2Xconcordance | 14 | | 100 | | 1 |
| CCRN4L | Chiron cDNA | Colon Cancer | 2Xconcordance | 75 | | 39 | | 1 |
| | array | | | | | | | |
| CCRN4L | Chiron cDNA | Colon Met | 2Xconcordance | 33 | | 30 | | 1 |
| | array | | | | | | | |
| CCRN4L | Chiron cDNA | matched Colon | 2Xconcordance | 36 | | 36 | | 1 |
| | array | | | | | | | |
| CCRN4L | Chiron cDNA | matched Colon Met | 2Xconcordance | 35 | | 34 | | 1 |
| | array | | | | | | | |
| CD28 | U133 + 2 | Blood Lymph Carcinoma All Vs Essential Normal | 80-80 Percentile Ratio | 61 | 0 | 6.333333333 | 2.5166 | 3 |
| CD28 | U133 + 2 | Blood/Lymph Carcinoma All Vs Essential Normal | 80-50 Percentile Ratio | 60 | 0 | 9.333333333 | 2.3094 | 3 |
| CD28 | U133 + 2 | Liver Carcinoma All Vs Essential Normal | 80-50 Percentile Ratio | 21 | | 2 | | 1 |
| CD28 | U133 + 2 | Lung Carcinoma All Vs Essential Normal | 80-50 Percentile Ratio | 68 | | 2 | | 1 |
| CD28 | U133 + 2 | Melanoma All Vs Essential Normal | 80-50 Percentile Ratio | 41 | 0 | 3 | 0 | 2 |
| CD28 | U133 + 2 | Renal Carcinoma All Vs Essential Normal | 80-50 Percentile Ratio | 66 | | 2 | | 1 |
| CD28 | U133 + 2 | Stomach Carcinoma All Vs Essential Normal | 80-50 Percentile Ratio | 23 | | 2 | | 1 |
| CD38 | U133 + 2 | Blood Lymph Carcinoma All Vs Essential Normal | 80-80 Percentile Ratio | 61 | | 6 | | 1 |
| CD38 | U133 + 2 | Blood/Lymph Carcinoma All Vs Essential Normal | 80-50 Percentile Ratio | 60 | | 11 | | 1 |
| CD3Z | U133 + 2 | Blood Lymph Carcinoma All Vs Essential Normal | 80-80 Percentile Ratio | 61 | | 5 | | 1 |
| CD3Z | U133 + 2 | Blood/Lymph Carcinoma All Vs Essential Normal | 80-50 Percentile Ratio | 60 | | 8 | | 1 |
| CFTR | U133A&B | Prostate Cancer vs adjacent Normal | 2Xconcordance | 15 | | 27 | | 1 |
| CHD7 | U133A&B | Colon Cancer | 2Xconcordance | 26.5 | 0.7071 | 46.5 | 33.234 | 2 |
| CHD7 | U133A&B | Colon Met | 2Xconcordance | 33 | 0 | 37.5 | 2.1213 | 2 |
| CHD7 | U133 + 2 | Bladder Carcinoma All Vs Essential Normal | 80-50 Percentile Ratio | 20 | 0 | 2.5 | 0.7071 | 2 |
| CHD7 | U133 + 2 | Blood/Lymph Carcinoma All Vs Essential Normal | 80-50 Percentile Ratio | 60 | 0 | 3 | 0 | 2 |
| CHD7 | U133 + 2 | Ovarian Carcinoma All Vs Essential Normal | 80-50 Percentile Ratio | 72 | 0 | 3 | 0 | 2 |
| CHD7 | U133 + 2 | Uterus Carcinoma All Vs Essential Normal | 80-50 Percentile Ratio | 39 | 0 | 2.5 | 0.7071 | 2 |
| CHD7 | Chiron cDNA | Breast Cancer | 2Xconcordance | 23 | 0 | 26.33333333 | 7.5056 | 3 |
| | array | | | | | | | |
| CHD7 | Chiron cDNA | Colon Cancer | 2Xconcordance | 75.333333 | 0.5774 | 28.66666667 | 5.0332 | 3 |
| | array | | | | | | | |
| CHD7 | Chiron cDNA | Colon Met | 2Xconcordance | 33 | 0 | 25.5 | 6.364 | 2 |
| | array | | | | | | | |
| CHD7 | Chiron cDNA | matched Colon | 2Xconcordance | 36 | 0 | 36.33333333 | 4.6188 | 3 |
| | array | | | | | | | |
| CHD7 | Chiron cDNA | matched Colon Met | 2Xconcordance | 35 | 0 | 36 | 1.7321 | 3 |
| | array | | | | | | | |
| CHDH | U133 + 2 | Liver Carcinoma All Vs Essential Normal | 80-50 Percentile Ratio | 21 | | 3 | | 1 |
| CHIC2 | U133 + 2 | Blood/Lymph Carcinoma All Vs Essential Normal | 80-50 Percentile Ratio | 60 | | 2 | | 1 |
| CHIC2 | U133 + 2 | Stomach Carcinoma All Vs Essential Normal | 80-50 Percentile Ratio | 23 | | 2 | | 1 |
| CHIC2 | U133 + 2 | Upper Aero-Digestive Tract Carcinoma All Vs Essential Normal | 80-50 Percentile Ratio | 23 | | 3 | | 1 |
| CIITA | U133 + 2 | Blood Lymph Carcinoma All Vs Essential Normal | 80-80 Percentile Ratio | 61 | | 4 | | 1 |
| CIITA | U133 + 2 | Blood/Lymph Carcinoma All Vs Essential Normal | 80-50 Percentile Ratio | 60 | | 4 | | 1 |
| CLEC2D | U133 + 2 | Blood Lymph Carcinoma All Vs Essential Normal | 80-80 Percentile Ratio | 61 | 0 | 23.5 | 13.435 | 2 |
| CLEC2D | U133 + 2 | Blood/Lymph Carcinoma All Vs Essential Normal | 80-50 Percentile Ratio | 60 | 0 | 27.5 | 14.849 | 2 |
| CLEC2D | U133 + 2 | Melanoma All Vs Essential Normal | 80-50 Percentile Ratio | 41 | | 4 | | 1 |
| CLEC2D | U133 + 2 | Melanoma All Vs Essential Normal | 80-80 Percentile Ratio | 39 | | 3 | | 1 |
| CLIC1 | U133A&B | Breast Cancer | 2Xconcordance | 18 | | 100 | | 1 |
| CLIC1 | U133A&B | Colon Cancer | 2Xconcordance | 20.5 | 9.1924 | 59.5 | 47.376 | 2 |
| CLIC1 | U133A&B | Colon Met | 2Xconcordance | 32.5 | 0.7071 | 29.5 | 12.021 | 2 |
| CLIC1 | U133 + 2 | Bladder Carcinoma All Vs Essential Normal | 80-50 Percentile Ratio | 20 | | 3 | | 1 |
| CLIC1 | U133 + 2 | Blood/Lymph Carcinoma All Vs Essential Normal | 80-50 Percentile Ratio | 60 | | 3 | | 1 |
| CLIC1 | U133 + 2 | Breast Carcinoma All Vs Essential Normal | 80-50 Percentile Ratio | 43 | | 3 | | 1 |
| CLIC1 | U133 + 2 | Lung Carcinoma All Vs Essential Normal | 80-50 Percentile Ratio | 68 | | 3 | | 1 |
| CLIC1 | U133 + 2 | Melanoma All Vs Essential Normal | 80-50 Percentile Ratio | 41 | | 4 | | 1 |
| CLIC1 | U133 + 2 | Ovarian Carcinoma All Vs Essential Normal | 80-50 Percentile Ratio | 72 | | 3 | | 1 |
| CLIC1 | U133 + 2 | Renal Carcinoma All Vs Essential Normal | 80-50 Percentile Ratio | 66 | | 3 | | 1 |
| CLIC1 | U133 + 2 | Stomach Carcinoma All Vs Essential Normal | 80-50 Percentile Ratio | 23 | | 4 | | 1 |
| CLIC1 | U133 + 2 | Upper Aero-Digestive Tract Carcinoma All Vs Essential Normal | 80-50 Percentile Ratio | 23 | | 5 | | 1 |
| CLIC1 | U133 + 2 | Uterus Carcinoma All Vs Essential Normal | 80-50 Percentile Ratio | 39 | | 3 | | 1 |
| CLIC1 | Chiron cDNA | Colon Cancer | 2Xconcordance | 41 | | 22 | | 1 |
| | array | | | | | | | |
| CLIC1 | Chiron cDNA | Colon Met | 2Xconcordance | 30 | | 33 | | 1 |
| | array | | | | | | | |
| COL19A1 | U133A&B | Colon Met | 2Xconcordance | 10 | | 100 | | 1 |
| CPNE4 | U133A&B | Breast Cancer | 2Xconcordance | 17 | | 24 | | 1 |
| CREG1 | U133 + 2 | Liver Carcinoma All Vs Essential Normal | 80-50 Percentile Ratio | 21 | | 3 | | 1 |
| CREG1 | Chiron cDNA | Colon Cancer | 2Xconcordance | 27 | 9.2376 | 27 | 10.708 | 4 |
| | array | | | | | | | |
| CREG1 | Chiron cDNA | Colon Met | 2Xconcordance | 30 | | 27 | | 1 |
| | array | | | | | | | |
| CREG1 | Chiron cDNA | matched Colon | 2Xconcordance | 14 | 6.9282 | 31.33333333 | 16.166 | 3 |
| | array | | | | | | | |
| CREG1 | Chiron cDNA | matched Colon Met | 2Xconcordance | 18 | | 28 | | 1 |
| | array | | | | | | | |
| CTSL | U133A&B | Breast Cancer | 2Xconcordance | 50 | | 64 | | 1 |
| CTSL | U133 + 2 | Liver Carcinoma All Vs Essential Normal | 80-50 Percentile Ratio | 21 | | 3 | | 1 |
| CTSL | U133 + 2 | Melanoma All Vs Essential Normal | 80-50 Percentile Ratio | 41 | | 4 | | 1 |
| CTSL | U133 + 2 | Melanoma All Vs Essential Normal | 80-80 Percentile Ratio | 39 | | 3 | | 1 |
| CTSL | U133 + 2 | Renal Carcinoma All Vs Essential Normal | 80-50 Percentile Ratio | 66 | | 3 | | 1 |
| CTSL | Chiron cDNA | Breast Cancer | 2Xconcordance | 23 | 0 | 37.7 | 6.4816 | 10 |
| | array | | | | | | | |
| CTSL | Chiron cDNA | Colon Met | 2Xconcordance | 33 | 0 | 24 | 5.1962 | 3 |
| | array | | | | | | | |
| CTSL | Chiron cDNA | matched Colon Met | 2Xconcordance | 35 | 0 | 25.83333333 | 3.4881 | 6 |
| | array | | | | | | | |
| CXCR4 | U133A&B | Breast Cancer | 2Xconcordance | 50 | | 24 | | 1 |
| CXCR4 | U133 + 2 | Blood Lymph Carcinoma All Vs Essential Normal | 80-80 Percentile Ratio | 61 | 0 | 7.666666667 | 1.1547 | 3 |
| CXCR4 | U133 + 2 | Blood/Lymph Carcinoma All Vs Essential Normal | 80-50 Percentile Ratio | 60 | 0 | 22 | 2 | 3 |
| CXCR4 | U133 + 2 | Breast Carcinoma All Vs Essential Normal | 80-50 Percentile Ratio | 43 | | 7 | | 1 |
| CXCR4 | U133 + 2 | Lung Carcinoma All Vs Essential Normal | 80-50 Percentile Ratio | 68 | | 6 | | 1 |
| CXCR4 | U133 + 2 | Renal Carcinoma All Vs Essential Normal | 80-50 Percentile Ratio | 66 | 0 | 9 | 0 | 3 |
| CXCR4 | U133 + 2 | Renal Carcinoma All Vs Essential Normal | 80-80 Percentile Ratio | 68 | 0 | 3 | 0 | 2 |
| CXCR4 | Chiron cDNA | Breast Cancer | 2Xconcordance | 23 | | 35 | | 1 |
| | array | | | | | | | |
| CXCR4 | Chiron cDNA | Colon Cancer | 2Xconcordance | 75 | | 23 | | 1 |
| | array | | | | | | | |
| CXCR4 | Chiron cDNA | Colon Met | 2Xconcordance | 33 | | 39 | | 1 |
| | array | | | | | | | |
| CXCR4 | Chiron cDNA | matched Colon Met | 2Xconcordance | 35 | | 31 | | 1 |
| | array | | | | | | | |
| CXCR4 | Chiron cDNA | Prostate Cancer | 2Xconcordance | 106 | | 23 | | 1 |
| | array | | | | | | | |
| CYB5A | U133A&B | Breast Cancer | 2Xconcordance | 37 | 19.975 | 52 | 41.569 | 3 |
| CYB5A | U133A&B | Colon Cancer | 2Xconcordance | 21 | | 52 | | 1 |
| CYB5A | U133A&B | Colon Met | 2Xconcordance | 29 | | 38 | | 1 |
| CYB5A | U133 + 2 | Liver Carcinoma All Vs Essential Normal | 80-50 Percentile Ratio | 21 | 0 | 24.33333333 | 2.0817 | 3 |
| CYB5A | U133 + 2 | Liver Carcinoma All Vs Essential Normal | 80-80 Percentile Ratio | 21 | 0 | 10.66666667 | 0.5774 | 3 |
| CYB5A | U133 + 2 | Renal Carcinoma All Vs Essential Normal | 80-50 Percentile Ratio | 66 | 0 | 5 | 0 | 2 |
| CYB5A | Chiron cDNA | Breast Cancer | 2Xconcordance | 22.285714 | 1.8898 | 33.14285714 | 4.8795 | 7 |
| | array | | | | | | | |
| CYB5A | Chiron cDNA | matched Colon Met | 2Xconcordance | 35.666667 | 0.5774 | 23.33333333 | 1.5275 | 3 |
| | array | | | | | | | |
| CYB5A | Chiron cDNA | Prostate Cancer | 2Xconcordance | 97.6 | 18.783 | 27.6 | 1.5166 | 5 |
| | array | | | | | | | |
| DAD1 | U133 + 2 | Melanoma All Vs Essential Normal | 80-50 Percentile Ratio | 41 | | 2 | | 1 |
| DAD1 | Chiron cDNA | Colon Cancer | 2Xconcordance | 77 | | 29 | | 1 |
| | array | | | | | | | |
| DAD1 | Chiron cDNA | matched Colon | 2Xconcordance | 36 | | 33 | | 1 |
| | array | | | | | | | |
| DAD1 | Chiron cDNA | matched Colon Met | 2Xconcordance | 36 | | 28 | | 1 |
| | array | | | | | | | |
| DDR2 | Chiron cDNA | Colon Cancer | 2Xconcordance | 41 | | 27 | | 1 |
| | array | | | | | | | |
| DDR2 | Chiron cDNA | Colon Met | 2Xconcordance | 30 | | 30 | | 1 |
| | array | | | | | | | |
| DDR2 | Chiron cDNA | matched Colon | 2Xconcordance | 36 | | 25 | | 1 |
| | array | | | | | | | |
| DDR2 | Chiron cDNA | matched Colon Met | 2Xconcordance | 35 | | 29 | | 1 |
| | array | | | | | | | |
| DMBT1 | U133A&B | Colon Cancer | 2Xconcordance | 27 | | 22 | | 1 |
| DMBT1 | U133 + 2 | GI Tract Carcinoma All Vs Essential Normal | 80-80 Percentile Ratio | 21 | | 15 | | 1 |
| DNAJC6 | Chiron cDNA | matched Colon Met | 2Xconcordance | 35 | | 20 | | 1 |
| | array | | | | | | | |
| DNMT3A | U133 + 2 | Bladder Carcinoma All Vs Essential Normal | 80-50 Percentile Ratio | 20 | | 3 | | 1 |
| DNMT3A | U133 + 2 | Breast Carcinoma All Vs Essential Normal | 80-50 Percentile Ratio | 43 | | 3 | | 1 |
| DNMT3A | U133 + 2 | Lung Carcinoma All Vs Essential Normal | 80-50 Percentile Ratio | 68 | | 3 | | 1 |
| DNMT3A | U133 + 2 | Ovarian Carcinoma All Vs Essential Normal | 80-50 Percentile Ratio | 72 | | 4 | | 1 |
| DNMT3A | U133 + 2 | Ovarian Carcinoma All Vs Essential Normal | 80-80 Percentile Ratio | 72 | | 3 | | 1 |
| DNMT3A | U133 + 2 | Upper Aero-Digestive Tract Carcinoma All Vs Essential Normal | 80-50 Percentile Ratio | 23 | | 2 | | 1 |
| DNMT3A | U133 + 2 | Uterus Carcinoma All Vs Essential Normal | 80-50 Percentile Ratio | 39 | | 4 | | 1 |
| DNMT3A | U133 + 2 | Uterus Endometrial Carcinoma All Vs Essential Normal | 80-80 Percentile Ratio | 39 | | 3 | | 1 |
| DNMT3A | Chiron cDNA | Breast Cancer | 2Xconcordance | 23 | | 26 | | 1 |
| | array | | | | | | | |
| DNMT3A | Chiron cDNA | Colon Cancer | 2Xconcordance | 76 | | 32 | | 1 |
| | array | | | | | | | |
| DNMT3A | Chiron cDNA | Colon Met | 2Xconcordance | 33 | | 24 | | 1 |
| | array | | | | | | | |
| DNMT3A | Chiron cDNA | matched Colon | 2Xconcordance | 36 | | 31 | | 1 |
| | array | | | | | | | |
| DNMT3A | Chiron cDNA | matched Colon Met | 2Xconcordance | 35 | | 46 | | 1 |
| | array | | | | | | | |
| DPT | U133A&B | Breast Cancer | 2Xconcordance | 13.5 | 10.607 | 66.5 | 47.376 | 2 |
| DYM | U133A&B | Colon Cancer | 2Xconcordance | 27 | | 33 | | 1 |
| EGR2 | U133 + 2 | Blood Lymph Carcinoma All Vs Essential Normal | 80-80 Percentile Ratio | 61 | | 5 | | 1 |
| EGR2 | U133 + 2 | Blood/Lymph Carcinoma All Vs Essential Normal | 80-50 Percentile Ratio | 60 | | 6 | | 1 |
| EGR2 | U133 + 2 | Breast Carcinoma All Vs Essential Normal | 80-50 Percentile Ratio | 43 | | 3 | | 1 |
| EGR2 | U133 + 2 | Lung Carcinoma All Vs Essential Normal | 80-50 Percentile Ratio | 68 | | 3 | | 1 |
| EGR2 | U133 + 2 | Melanoma All Vs Essential Normal | 80-50 Percentile Ratio | 41 | | 3 | | 1 |
| EGR2 | U133 + 2 | Pancreas Carcinoma All Vs Essential Normal | 80-50 Percentile Ratio | 13 | | 11 | | 1 |
| EGR2 | U133 + 2 | Pancreas Carcinoma All Vs Essential Normal | 80-80 Percentile Ratio | 13 | | 8 | | 1 |
| EGR2 | U133 + 2 | Renal Carcinoma All Vs Essential Normal | 80-50 Percentile Ratio | 66 | | 3 | | 1 |
| EIF4G3 | U133A&B | Prostate Cancer vs adjacent Normal | 2Xconcordance | 16 | | 25 | | 1 |
| EIF4G3 | U133 + 2 | Blood/Lymph Carcinoma All Vs Essential Normal | 80-50 Percentile Ratio | 60 | | 2 | | 1 |
| EIF4G3 | U133 + 2 | Ovarian Carcinoma All Vs Essential Normal | 80-50 Percentile Ratio | 72 | | 2 | | 1 |
| EIF4G3 | Chiron cDNA | Breast Cancer | 2Xconcordance | 23 | 0 | 30.5 | 6.364 | 2 |
| | array | | | | | | | |
| EIF4G3 | Chiron cDNA | Colon Cancer | 2Xconcordance | 76 | | 59 | | 1 |
| | array | | | | | | | |
| EIF4G3 | Chiron cDNA | Colon Met | 2Xconcordance | 33 | | 67 | | 1 |
| | array | | | | | | | |
| EIF4G3 | Chiron cDNA | matched Colon | 2Xconcordance | 36 | | 53 | | 1 |
| | array | | | | | | | |
| EIF4G3 | Chiron cDNA | matched Colon Met | 2Xconcordance | 36 | | 58 | | 1 |
| | array | | | | | | | |
| EIF4G3 | Chiron cDNA | Prostate Cancer | 2Xconcordance | 106 | | 23 | | 1 |
| | array | | | | | | | |
| ENAH | U133A&B | Breast Cancer | 2Xconcordance | 49.5 | 0.7071 | 62.5 | 6.364 | 2 |
| ENAH | U133A&B | Colon Cancer | 2Xconcordance | 26.5 | 0.7071 | 66 | 11.314 | 2 |
| ENAH | U133A&B | Colon Met | 2Xconcordance | 32.5 | 0.7071 | 48 | 9.8995 | 2 |
| ENAH | U133 + 2 | Breast Carcinoma All Vs Essential Normal | 80-50 Percentile Ratio | 43 | 0 | 5.5 | 2.1213 | 2 |
| ENAH | U133 + 2 | Breast Carcinoma All Vs Essential Normal | 80-80 Percentile Ratio | 43 | | 3 | | 1 |
| ENAH | U133 + 2 | Lung Carcinoma All Vs Essential Normal | 80-50 Percentile Ratio | 68 | 0 | 3 | 0 | 2 |
| ENAH | U133 + 2 | Ovarian Carcinoma All Vs Essential Normal | 80-50 Percentile Ratio | 72 | | 3 | | 1 |
| ENAH | U133 + 2 | Uterus Carcinoma All Vs Essential Normal | 80-50 Percentile Ratio | 39 | 0 | 4 | 1.4142 | 2 |
| ENAH | Chiron cDNA | Breast Cancer | 2Xconcordance | 8 | | 75 | | 1 |
| | array | | | | | | | |
| ENAH | Chiron cDNA | Colon Cancer | 2Xconcordance | 35 | | 66 | | 1 |
| | array | | | | | | | |
| ENAH | Chiron cDNA | Colon Met | 2Xconcordance | 30 | | 50 | | 1 |
| | array | | | | | | | |
| ENAH | Chiron cDNA | matched Colon | 2Xconcordance | 6 | | 67 | | 1 |
| | array | | | | | | | |
| ENAH | Chiron cDNA | matched Colon Met | 2Xconcordance | 7 | | 57 | | 1 |
| | array | | | | | | | |
| ETV1 | U133 + 2 | Melanoma All Vs Essential Normal | 80-50 Percentile Ratio | 41 | 0 | 4.5 | 2.1213 | 2 |
| ETV1 | U133 + 2 | Melanoma All Vs Essential Normal | 80-80 Percentile Ratio | 39 | | 4 | | 1 |
| EXOC2 | U133 + 2 | Blood/Lymph Carcinoma All Vs Essential Normal | 80-50 Percentile Ratio | 60 | | 4 | | 1 |
| EXOC2 | U133 + 2 | Breast Carcinoma All Vs Essential Normal | 80-50 Percentile Ratio | 43 | | 4 | | 1 |
| EXOC2 | U133 + 2 | Liver Carcinoma All Vs Essential Normal | 80-50 Percentile Ratio | 21 | | 3 | | 1 |
| EXOC2 | U133 + 2 | Lung Carcinoma All Vs Essential Normal | 80-50 Percentile Ratio | 68 | | 3 | | 1 |
| EXOC2 | U133 + 2 | Melanoma All Vs Essential Normal | 80-50 Percentile Ratio | 41 | | 4 | | 1 |
| EXOC2 | U133 + 2 | Ovarian Carcinoma All Vs Essential Normal | 80-50 Percentile Ratio | 72 | | 3 | | 1 |
| EXOC2 | U133 + 2 | Stomach Carcinoma All Vs Essential Normal | 80-50 Percentile Ratio | 23 | | 2 | | 1 |
| EXOC2 | U133 + 2 | Upper Aero-Digestive Tract Carcinoma All Vs Essential Normal | 80-50 Percentile Ratio | 23 | | 3 | | 1 |
| EXOC2 | U133 + 2 | Uterus Carcinoma All Vs Essential Normal | 80-50 Percentile Ratio | 39 | | 3 | | 1 |
| F2RL2 | U133A&B | Breast Cancer | 2Xconcordance | 43 | | 26 | | 1 |
| F2RL2 | U133 + 2 | Breast Carcinoma All Vs Essential Normal | 80-50 Percentile Ratio | 43 | | 11 | | 1 |
| F2RL2 | U133 + 2 | Breast Carcinoma All Vs Essential Normal | 80-80 Percentile Ratio | 43 | | 7 | | 1 |
| F2RL2 | U133 + 2 | GI Tract Carcinoma All Vs Essential Normal | 80-80 Percentile Ratio | 21 | | 4 | | 1 |
| F2RL2 | U133 + 2 | Pancreas Carcinoma All Vs Essential Normal | 80-50 Percentile Ratio | 13 | | 7 | | 1 |
| F2RL2 | U133 + 2 | Pancreas Carcinoma All Vs Essential Normal | 80-80 Percentile Ratio | 13 | | 4 | | 1 |
| F2RL2 | U133 + 2 | Stomach Carcinoma All Vs Essential Normal | 80-50 Percentile Ratio | 23 | | 6 | | 1 |
| F2RL2 | U133 + 2 | Upper Aero-Digestive Carcinoma All Vs Essential Normal | 80-80 Percentile Ratio | 23 | | 5 | | 1 |
| F2RL2 | U133 + 2 | Upper Aero-Digestive Tract Carcinoma All Vs Essential Normal | 80-50 Percentile Ratio | 23 | | 8 | | 1 |
| F5 | U133A&B | Colon Cancer | 2Xconcordance | 27 | | 30 | | 1 |
| F5 | U133A&B | Prostate Cancer vs adjacent Normal | 2Xconcordance | 15 | | 27 | | 1 |
| F5 | U133 + 2 | Liver Carcinoma All Vs Essential Normal | 80-50 Percentile Ratio | 21 | 0 | 246 | 308.3 | 2 |
| F5 | U133 + 2 | Liver Carcinoma All Vs Essential Normal | 80-80 Percentile Ratio | 21 | 0 | 154.5 | 191.63 | 2 |
| F5 | Chiron cDNA | Prostate Cancer | 2Xconcordance | 106 | | 23 | | 1 |
| | array | | | | | | | |
| FAM107B | U133A&B | Breast Cancer | 2Xconcordance | 7 | | 100 | | 1 |
| FAM107B | U133 + 2 | Blood/Lymph Carcinoma All Vs Essential Normal | 80-50 Percentile Ratio | 60 | 0 | 3 | 0 | 2 |
| FAM107B | Chiron cDNA | Breast Cancer | 2Xconcordance | 23 | | 26 | | 1 |
| | array | | | | | | | |
| FAS | U133A&B | Colon Cancer | 2Xconcordance | 27 | | 44 | | 1 |
| FAS | U133 + 2 | Blood Lymph Carcinoma All Vs Essential Normal | 80-80 Percentile Ratio | 61 | | 3 | | 1 |
| FAS | U133 + 2 | Blood/Lymph Carcinoma All Vs Essential Normal | 80-50 Percentile Ratio | 60 | 0 | 4.75 | 0.9574 | 4 |
| FAS | U133 + 2 | Renal Carcinoma All Vs Essential Normal | 80-50 Percentile Ratio | 66 | 0 | 3.75 | 0.9574 | 4 |
| FCGR2B | Chiron cDNA | Colon Cancer | 2Xconcordance | 19 | | 32 | | 1 |
| | array | | | | | | | |
| FCGR2B | Chiron cDNA | matched Colon | 2Xconcordance | 18 | | 33 | | 1 |
| FCGR2B | Chiron cDNA | matched Colon Met | 2Xconcordance | 18 | | 22 | | 1 |
| | array | | | | | | | |
| FGFR3 | U133A&B | Breast Cancer | 2Xconcordance | 26 | | 100 | | 1 |
| FGFR3 | Chiron cDNA | Breast Cancer | 2Xconcordance | 23 | | 26 | | 1 |
| | array | | | | | | | |
| FLJ10996 | U133A&B | Prostate Cancer vs adjacent Normal | 2Xconcordance | 15 | | 20 | | 1 |
| FLJ11155 | U133A&B | Breast Cancer | 2Xconcordance | 48 | | 42 | | 1 |
| FLJ11155 | U133A&B | Prostate Cancer | 2Xconcordance | 21 | | 33 | | 1 |
| FLJ23235 | U133 + 2 | Blood Lymph Carcinoma All Vs Essential Normal | 80-80 Percentile Ratio | 61 | | 3 | | 1 |
| FLJ23235 | U133 + 2 | Blood/Lymph Carcinoma All Vs Essential Normal | 80-50 Percentile Ratio | 60 | | 5 | | 1 |
| FNBP1 | U133 + 2 | Blood/Lymph Carcinoma All Vs Essential Normal | 80-50 Percentile Ratio | 60 | 0 | 5.333333333 | 0.5774 | 3 |
| FOXD3 | U133A&B | Colon Cancer | 2Xconcordance | 6 | | 100 | | 1 |
| FZD10 | U133A&B | Colon Cancer | 2Xconcordance | 8 | | 100 | | 1 |
| FZD10 | U133A&B | Colon Met | 2Xconcordance | 8 | | 100 | | 1 |
| FZD10 | U133 + 2 | Uterus Carcinoma All Vs Essential Normal | 80-50 Percentile Ratio | 39 | | 6 | | 1 |
| FZD10 | U133 + 2 | Uterus Endometrial Carcinoma All Vs Essential Normal | 80-80 Percentile Ratio | 39 | | 5 | | 1 |
| GALNAC4S- | U133 + 2 | Blood/Lymph Carcinoma All Vs Essential Normal | 80-50 Percentile Ratio | 60 | | 3 | | 1 |
| 6ST | | | | | | | | |
| GALNAC4S- | U133 + 2 | Lung Carcinoma All Vs Essential Normal | 80-50 Percentile Ratio | 68 | | 3 | | 1 |
| 6ST | | | | | | | | |
| GALNAC4S- | U133 + 2 | Renal Carcinoma All Vs Essential Normal | 80-50 Percentile Ratio | 66 | | 4 | | 1 |
| 6ST | | | | | | | | |
| GFI1 | U133 + 2 | Blood/Lymph Carcinoma All Vs Essential Normal | 80-50 Percentile Ratio | 60 | | 4 | | 1 |
| GFI1 | U133 + 2 | Liver Carcinoma All Vs Essential Normal | 80-50 Percentile Ratio | 21 | | 3 | | 1 |
| GFI1 | U133 + 2 | Lung Carcinoma All Vs Essential Normal | 80-50 Percentile Ratio | 68 | | 2 | | 1 |
| GFI1 | U133 + 2 | Melanoma All Vs Essential Normal | 80-50 Percentile Ratio | 41 | | 2 | | 1 |
| GFI1 | U133 + 2 | Pancreas Carcinoma All Vs Essential Normal | 80-50 Percentile Ratio | 13 | | 3 | | 1 |
| GFI1 | U133 + 2 | Renal Carcinoma All Vs Essential Normal | 80-50 Percentile Ratio | 66 | | 2 | | 1 |
| GFI1 | U133 + 2 | Stomach Carcinoma All Vs Essential Normal | 80-50 Percentile Ratio | 23 | | 3 | | 1 |
| GFI1 | U133 + 2 | Upper Aero-Digestive Tract Carcinoma All Vs Essential Normal | 80-50 Percentile Ratio | 23 | | 2 | | 1 |
| GGTA1 | U133A&B | Breast Cancer | 2Xconcordance | 9 | | 100 | | 1 |
| GSCL | U133A&B | Colon Cancer | 2Xconcordance | 27 | | 52 | | 1 |
| HMGA1 | U133A&B | Breast Cancer | 2Xconcordance | 49 | | 33 | | 1 |
| HMGA1 | U133A&B | Colon Met | 2Xconcordance | 29 | | 34 | | 1 |
| HMGA1 | U133 + 2 | Bladder Carcinoma All Vs Essential Normal | 80-50 Percentile Ratio | 20 | 0 | 4.5 | 0.7071 | 2 |
| HMGA1 | U133 + 2 | Blood Lymph Carcinoma All Vs Essential Normal | 80-80 Percentile Ratio | 61 | | 4 | | 1 |
| HMGA1 | U133 + 2 | Blood/Lymph Carcinoma All Vs Essential Normal | 80-50 Percentile Ratio | 60 | 0 | 5 | 0 | 2 |
| HMGA1 | U133 + 2 | Lung Carcinoma All Vs Essential Normal | 80-50 Percentile Ratio | 68 | | 4 | | 1 |
| HMGA1 | U133 + 2 | Melanoma All Vs Essential Normal | 80-50 Percentile Ratio | 41 | 0 | 5 | 0 | 2 |
| HMGA1 | U133 + 2 | Melanoma All Vs Essential Normal | 80-80 Percentile Ratio | 39 | | 3 | | 1 |
| HMGA1 | U133 + 2 | Ovarian Carcinoma All Vs Essential Normal | 80-50 Percentile Ratio | 72 | 0 | 4.5 | 0.7071 | 2 |
| HMGA1 | U133 + 2 | Stomach Carcinoma All Vs Essential Normal | 80-50 Percentile Ratio | 23 | 0 | 4.5 | 0.7071 | 2 |
| HMGA1 | U133 + 2 | Upper Aero-Digestive Carcinoma All Vs Essential Normal | 80-80 Percentile Ratio | 23 | | 4 | | 1 |
| HMGA1 | U133 + 2 | Upper Aero-Digestive Tract Carcinoma All Vs Essential Normal | 80-50 Percentile Ratio | 23 | 0 | 5.5 | 0.7071 | 2 |
| HMGA1 | U133 + 2 | Uterus Carcinoma All Vs Essential Normal | 80-50 Percentile Ratio | 39 | | 4 | | 1 |
| HMGA1 | Chiron cDNA | Breast Cancer | 2Xconcordance | 23 | | 35 | | 1 |
| | array | | | | | | | |
| HMGA1 | Chiron cDNA | Colon Cancer | 2Xconcordance | 76 | 0 | 47 | 19.799 | 2 |
| | array | | | | | | | |
| HMGA1 | Chiron cDNA | Colon Met | 2Xconcordance | 33 | 0 | 45.5 | 17.678 | 2 |
| | array | | | | | | | |
| HMGA1 | Chiron cDNA | matched Colon | 2Xconcordance | 36 | 0 | 43 | 21.213 | 2 |
| | array | | | | | | | |
| HMGA1 | Chiron cDNA | matched Colon Met | 2Xconcordance | 35 | 0 | 52.5 | 26.163 | 2 |
| | array | | | | | | | |
| HMGA1 | Chiron cDNA | Prostate Cancer | 2Xconcordance | 106 | | 27 | | 1 |
| | array | | | | | | | |
| ICOS | U133 + 2 | Blood Lymph Carcinoma All Vs Essential Normal | 80-80 Percentile Ratio | 61 | | 11 | | 1 |
| ICOS | U133 + 2 | Blood/Lymph Carcinoma All Vs Essential Normal | 80-50 Percentile Ratio | 60 | | 18 | | 1 |
| ICOS | U133 + 2 | Breast Carcinoma All Vs Essential Normal | 80-50 Percentile Ratio | 43 | | 5 | | 1 |
| ICOS | U133 + 2 | GI Tract Carcinoma All Vs Essential Normal | 80-80 Percentile Ratio | 21 | | 3 | | 1 |
| ICOS | U133 + 2 | Lung Carcinoma All Vs Essential Normal | 80-50 Percentile Ratio | 68 | | 5 | | 1 |
| ICOS | U133 + 2 | Lung Carcinoma All Vs Essential Normal | 80-80 Percentile Ratio | 67 | | 3 | | 1 |
| ICOS | U133 + 2 | Melanoma All Vs Essential Normal | 80-50 Percentile Ratio | 41 | | 6 | | 1 |
| ICOS | U133 + 2 | Melanoma All Vs Essential Normal | 80-80 Percentile Ratio | 39 | | 3 | | 1 |
| ICOS | U133 + 2 | Ovarian Carcinoma All Vs Essential Normal | 80-50 Percentile Ratio | 72 | | 4 | | 1 |
| ICOS | U133 + 2 | Pancreas Carcinoma All Vs Essential Normal | 80-50 Percentile Ratio | 13 | | 7 | | 1 |
| ICOS | U133 + 2 | Pancreas Carcinoma All Vs Essential Normal | 80-80 Percentile Ratio | 13 | | 4 | | 1 |
| ICOS | U133 + 2 | Renal Carcinoma All Vs Essential Normal | 80-50 Percentile Ratio | 66 | | 4 | | 1 |
| ICOS | U133 + 2 | Stomach Carcinoma All Vs Essential Normal | 80-50 Percentile Ratio | 23 | | 5 | | 1 |
| ICOS | U133 + 2 | Upper Aero-Digestive Carcinoma All Vs Essential Normal | 80-80 Percentile Ratio | 23 | | 4 | | 1 |
| ICOS | U133 + 2 | Upper Aero-Digestive Tract Carcinoma All Vs Essential Normal | 80-50 Percentile Ratio | 23 | | 6 | | 1 |
| ICOS | U133 + 2 | Uterus Carcinoma All Vs Essential Normal | 80-50 Percentile Ratio | 39 | | 3 | | 1 |
| IGF1R | U133A&B | Colon Met | 2Xconcordance | 29 | | 21 | | 1 |
| IGF1R | Chiron cDNA | Breast Cancer | 2Xconcordance | 23 | | 26 | | 1 |
| | array | | | | | | | |
| IGF2 | U133A&B | Colon Met | 2Xconcordance | 16 | | 31 | | 1 |
| IGF2 | U133A&B | Prostate Cancer vs adjacent Normal | 2Xconcordance | 10 | | 70 | | 1 |
| IGF2 | Chiron cDNA | Breast Cancer | 2Xconcordance | 23 | | 22 | | 1 |
| | array | | | | | | | |
| IGF2 | Chiron cDNA | Colon Cancer | 2Xconcordance | 75.75 | 0.5 | 30 | 4.3205 | 4 |
| | array | | | | | | | |
| IGF2 | Chiron cDNA | Colon Met | 2Xconcordance | 33 | 0 | 37 | 14.832 | 4 |
| | array | | | | | | | |
| IGF2 | Chiron cDNA | matched Colon | 2Xconcordance | 36 | 0 | 24 | 3.4641 | 3 |
| | array | | | | | | | |
| IGF2 | Chiron cDNA | matched Colon Met | 2Xconcordance | 35 | 0 | 34.75 | 4.5 | 4 |
| | array | | | | | | | |
| IRF2 | U133 + 2 | Blood/Lymph Carcinoma All Vs Essential Normal | 80-50 Percentile Ratio | 60 | | 3 | | 1 |
| ITK | U133 + 2 | Blood Lymph Carcinoma All Vs Essential Normal | 80-80 Percentile Ratio | 61 | | 9 | | 1 |
| ITK | U133 + 2 | Blood/Lymph Carcinoma All Vs Essential Normal | 80-50 Percentile Ratio | 60 | | 14 | | 1 |
| JAK1 | U133 + 2 | Blood/Lymph Carcinoma All Vs Essential Normal | 80-50 Percentile Ratio | 60 | 0 | 4.5 | 2.1213 | 2 |
| JAK1 | U133 + 2 | Renal Carcinoma All Vs Essential Normal | 80-50 Percentile Ratio | 66 | | 4 | | 1 |
| JAK1 | Chiron cDNA | Breast Cancer | 2Xconcordance | 19.666667 | 2.8868 | 25.33333333 | 3.0551 | 3 |
| | array | | | | | | | |
| JAK1 | Chiron cDNA | Colon Cancer | 2Xconcordance | 76 | | 21 | | 1 |
| | array | | | | | | | |
| JAK1 | Chiron cDNA | matched Colon | 2Xconcordance | 36 | | 28 | | 1 |
| | array | | | | | | | |
| JAK1 | Chiron cDNA | matched Colon Met | 2Xconcordance | 36 | | 44 | | 1 |
| | array | | | | | | | |
| JAKMIP1 | U133A&B | Prostate Cancer | 2Xconcordance | 5 | | 100 | | 1 |
| JARID2 | U133 + 2 | Melanoma All Vs Essential Normal | 80-50 Percentile Ratio | 41 | | 4 | | 1 |
| JARID2 | U133 + 2 | Melanoma All Vs Essential Normal | 80-80 Percentile Ratio | 39 | | 4 | | 1 |
| JDP2 | U133A&B | Colon Cancer | 2Xconcordance | 25 | | 20 | | 1 |
| KIAA0261 | U133A&B | Colon Cancer | 2Xconcordance | 27 | | 37 | | 1 |
| KIAA0261 | U133 + 2 | Blood/Lymph Carcinoma All Vs Essential Normal | 80-50 Percentile Ratio | 60 | 0 | 2.666666667 | 0.5774 | 3 |
| KIAA0261 | U133 + 2 | Breast Carcinoma All Vs Essential Normal | 80-50 Percentile Ratio | 43 | 0 | 2 | 0 | 3 |
| KIAA0261 | U133 + 2 | Liver Carcinoma All Vs Essential Normal | 80-50 Percentile Ratio | 21 | | 2 | | 1 |
| KIAA0261 | U133 + 2 | Ovarian Carcinoma All Vs Essential Normal | 80-50 Percentile Ratio | 72 | 0 | 2 | 0 | 3 |
| KIAA0261 | U133 + 2 | Upper Aero-Digestive Tract Carcinoma All Vs Essential Normal | 80-50 Percentile Ratio | 23 | | 2 | | 1 |
| KIAA0261 | U133 + 2 | Uterus Carcinoma All Vs Essential Normal | 80-50 Percentile Ratio | 39 | 0 | 2 | 0 | 3 |
| KIAA0261 | Chiron cDNA | Breast Cancer | 2Xconcordance | 23 | | 22 | | 1 |
| | array | | | | | | | |
| KIAA0261 | Chiron cDNA | Colon Cancer | 2Xconcordance | 19 | | 26 | | 1 |
| | array | | | | | | | |
| KIAA0261 | Chiron cDNA | matched Colon | 2Xconcordance | 18 | | 28 | | 1 |
| | array | | | | | | | |
| KIAA0261 | Chiron cDNA | matched Colon Met | 2Xconcordance | 17 | | 29 | | 1 |
| | array | | | | | | | |
| KIAA0350 | U133A&B | Colon Cancer | 2Xconcordance | 26 | | 27 | | 1 |
| KIAA0427 | U133A&B | Colon Cancer | 2Xconcordance | 26 | | 31 | | 1 |
| LCK | U133 + 2 | Blood Lymph Carcinoma All Vs Essential Normal | 80-80 Percentile Ratio | 61 | 0 | 10 | 1.4142 | 2 |
| LCK | U133 + 2 | Blood/Lymph Carcinoma All Vs Essential Normal | 80-50 Percentile Ratio | 60 | 0 | 14 | 1.4142 | 2 |
| LFNG | U133A&B | Breast Cancer | 2Xconcordance | 43 | | 35 | | 1 |
| LFNG | U133A&B | Colon Cancer | 2Xconcordance | 26 | | 58 | | 1 |
| LFNG | U133A&B | Colon Met | 2Xconcordance | 33 | | 27 | | 1 |
| LFNG | U133A&B | Prostate Cancer | 2Xconcordance | 20 | | 30 | | 1 |
| LFNG | U133 + 2 | Breast Carcinoma All Vs Essential Normal | 80-50 Percentile Ratio | 43 | | 6 | | 1 |
| LFNG | U133 + 2 | Breast Carcinoma All Vs Essential Normal | 80-80 Percentile Ratio | 43 | | 4 | | 1 |
| LFNG | U133 + 2 | GI Tract Carcinoma All Vs Essential Normal | 80-80 Percentile Ratio | 21 | | 3 | | 1 |
| LFNG | U133 + 2 | Lung Carcinoma All Vs Essential Normal | 80-50 Percentile Ratio | 68 | | 4 | | 1 |
| LFNG | U133 + 2 | Pancreas Carcinoma All Vs Essential Normal | 80-50 Percentile Ratio | 13 | | 4 | | 1 |
| LFNG | U133 + 2 | Stomach Carcinoma All Vs Essential Normal | 80-50 Percentile Ratio | 23 | | 5 | | 1 |
| LFNG | Chiron cDNA | Breast Cancer | 2Xconcordance | 18 | | 22 | | 1 |
| | array | | | | | | | |
| LMO7 | Chiron cDNA | Breast Cancer | 2Xconcordance | 23 | | 22 | | 1 |
| | array | | | | | | | |
| LMO7 | Chiron cDNA | matched Colon Met | 2Xconcordance | 36 | | 22 | | 1 |
| | array | | | | | | | |
| LRFN3 | Chiron cDNA | Breast Cancer | 2Xconcordance | 23 | | 26 | | 1 |
| | array | | | | | | | |
| LRFN3 | Chiron cDNA | Colon Cancer | 2Xconcordance | 76 | | 30 | | 1 |
| | array | | | | | | | |
| LRFN3 | Chiron cDNA | Colon Met | 2Xconcordance | 33 | | 30 | | 1 |
| | array | | | | | | | |
| LRFN3 | Chiron cDNA | matched Colon | 2Xconcordance | 36 | | 39 | | 1 |
| | array | | | | | | | |
| LRFN3 | Chiron cDNA | matched Colon Met | 2Xconcordance | 35 | | 43 | | 1 |
| | array | | | | | | | |
| LTB | U133 + 2 | Blood Lymph Carcinoma All Vs Essential Normal | 80-80 Percentile Ratio | 61 | | 29 | | 1 |
| LTB | U133 + 2 | Blood/Lymph Carcinoma All Vs Essential Normal | 80-50 Percentile Ratio | 60 | | 36 | | 1 |
| LTB | Chiron cDNA | Breast Cancer | 2Xconcordance | 23 | 0 | 28 | 2.8284 | 2 |
| | array | | | | | | | |
| LTB | Chiron cDNA | matched Colon | 2Xconcordance | 36 | | 22 | | 1 |
| | array | | | | | | | |
| MAP3K8 | U133A&B | Colon Cancer | 2Xconcordance | 22 | | 32 | | 1 |
| MAP3K8 | U133A&B | Colon Met | 2Xconcordance | 30 | | 37 | | 1 |
| MAP3K8 | U133 + 2 | Bladder Carcinoma All Vs Essential Normal | 80-50 Percentile Ratio | 20 | | 3 | | 1 |
| MAP3K8 | U133 + 2 | Blood/Lymph Carcinoma All Vs Essential Normal | 80-50 Percentile Ratio | 60 | | 5 | | 1 |
| MAP3K8 | U133 + 2 | Lung Carcinoma All Vs Essential Normal | 80-50 Percentile Ratio | 68 | | 2 | | 1 |
| MAP3K8 | U133 + 2 | Ovarian Carcinoma All Vs Essential Normal | 80-50 Percentile Ratio | 72 | | 3 | | 1 |
| MAP3K8 | U133 + 2 | Pancreas Carcinoma All Vs Essential Normal | 80-50 Percentile Ratio | 13 | | 4 | | 1 |
| MAP3K8 | U133 + 2 | Stomach Carcinoma All Vs Essential Normal | 80-50 Percentile Ratio | 23 | | 3 | | 1 |
| MBNL1 | U133 + 2 | Blood/Lymph Carcinoma All Vs Essential Normal | 80-50 Percentile Ratio | 60 | 0 | 4.5 | 1 | 4 |
| MCM3AP | U133A&B | Prostate Cancer vs adjacent Normal | 2Xconcordance | 16 | | 31 | | 1 |
| MCM3AP | U133 + 2 | Blood/Lymph Carcinoma All Vs Essential Normal | 80-50 Percentile Ratio | 60 | | 2 | | 1 |
| MCM3AP | Chiron cDNA | Colon Cancer | 2Xconcordance | 76 | | 49 | | 1 |
| | array | | | | | | | |
| MCM3AP | Chiron cDNA | Colon Met | 2Xconcordance | 33 | | 30 | | 1 |
| | array | | | | | | | |
| MCM3AP | Chiron cDNA | matched Colon | 2Xconcordance | 36 | | 50 | | 1 |
| | array | | | | | | | |
| MCM3AP | Chiron cDNA | matched Colon Met | 2Xconcordance | 36 | | 53 | | 1 |
| | array | | | | | | | |
| MCM5 | U133A&B | Colon Cancer | 2Xconcordance | 25 | | 44 | | 1 |
| MCM5 | U133 + 2 | Bladder Carcinoma All Vs Essential Normal | 80-50 Percentile Ratio | 20 | | 3 | | 1 |
| MCM5 | U133 + 2 | Blood Lymph Carcinoma All Vs Essential Normal | 80-80 Percentile Ratio | 61 | 0 | 5.5 | 0.7071 | 2 |
| MCM5 | U133 + 2 | Blood/Lymph Carcinoma All Vs Essential Normal | 80-50 Percentile Ratio | 60 | 0 | 8 | 1.4142 | 2 |
| MCM5 | U133 + 2 | Lung Carcinoma All Vs Essential Normal | 80-50 Percentile Ratio | 68 | 0 | 2.5 | 0.7071 | 2 |
| MCM5 | U133 + 2 | Melanoma All Vs Essential Normal | 80-50 Percentile Ratio | 41 | 0 | 3 | 0 | 2 |
| MCM5 | U133 + 2 | Stomach Carcinoma All Vs Essential Normal | 80-50 Percentile Ratio | 23 | | 2 | | 1 |
| MCM5 | U133 + 2 | Upper Aero-Digestive Carcinoma All Vs Essential Normal | 80-80 Percentile Ratio | 23 | 0 | 3.5 | 0.7071 | 2 |
| MCM5 | U133 + 2 | Upper Aero-Digestive Tract Carcinoma All Vs Essential Normal | 80-50 Percentile Ratio | 23 | 0 | 5 | 1.4142 | 2 |
| MCM5 | Chiron cDNA | Breast Cancer | 2Xconcordance | 23 | | 22 | | 1 |
| | array | | | | | | | |
| MCM5 | Chiron cDNA | Colon Cancer | 2Xconcordance | 77 | | 30 | | 1 |
| | array | | | | | | | |
| MCM5 | Chiron cDNA | matched Colon | 2Xconcordance | 36 | | 42 | | 1 |
| | array | | | | | | | |
| MCM5 | Chiron cDNA | matched Colon Met | 2Xconcordance | 36 | | 33 | | 1 |
| | array | | | | | | | |
| MCOLN3 | U133 + 2 | Melanoma All Vs Essential Normal | 80-80 Percentile Ratio | 39 | | 5 | | 1 |
| MON2 | U133A&B | Colon Cancer | 2Xconcordance | 14 | | 50 | | 1 |
| MON2 | Chiron cDNA | matched Colon Met | 2Xconcordance | 36 | | 28 | | 1 |
| | array | | | | | | | |
| MR1 | U133A&B | Colon Cancer | 2Xconcordance | 27 | | 26 | | 1 |
| MR1 | U133 + 2 | Bladder Carcinoma All Vs Essential Normal | 80-50 Percentile Ratio | 20 | | 3 | | 1 |
| MR1 | U133 + 2 | Blood/Lymph Carcinoma All Vs Essential Normal | 80-50 Percentile Ratio | 60 | | 2 | | 1 |
| MR1 | U133 + 2 | Lung Carcinoma All Vs Essential Normal | 80-50 Percentile Ratio | 68 | | 2 | | 1 |
| MR1 | U133 + 2 | Renal Carcinoma All Vs Essential Normal | 80-50 Percentile Ratio | 66 | | 2 | | 1 |
| NCF4 | U133 + 2 | Blood Lymph Carcinoma All Vs Essential Normal | 80-80 Percentile Ratio | 61 | 0 | 4 | 0 | 2 |
| NCF4 | U133 + 2 | Blood/Lymph Carcinoma All Vs Essential Normal | 80-50 Percentile Ratio | 60 | 0 | 5.5 | 0.7071 | 2 |
| NCF4 | Chiron cDNA | Colon Cancer | 2Xconcordance | 41 | | 22 | | 1 |
| | array | | | | | | | |
| NCF4 | Chiron cDNA | Colon Met | 2Xconcordance | 30 | | 23 | | 1 |
| | array | | | | | | | |
| NEDD4L | U133A&B | Prostate Cancer vs adjacent Normal | 2Xconcordance | 16 | | 38 | | 1 |
| NEDD4L | U133 + 2 | Lung Carcinoma All Vs Essential Normal | 80-50 Percentile Ratio | 68 | | 3 | | 1 |
| NEDD4L | U133 + 2 | Melanoma All Vs Essential Normal | 80-50 Percentile Ratio | 41 | | 5 | | 1 |
| NEDD4L | U133 + 2 | Melanoma All Vs Essential Normal | 80-80 Percentile Ratio | 39 | | 3 | | 1 |
| NEDD4L | Chiron cDNA | Prostate Cancer | 2Xconcordance | 96.666667 | 23.58 | 25 | 4.2131 | 9 |
| | array | | | | | | | |
| NEDD9 | U133 + 2 | Renal Carcinoma All Vs Essential Normal | 80-50 Percentile Ratio | 66 | | 4 | | 1 |
| NEU1 | U133 + 2 | Breast Carcinoma All Vs Essential Normal | 80-50 Percentile Ratio | 43 | | 3 | | 1 |
| NEU1 | U133 + 2 | Liver Carcinoma All Vs Essential Normal | 80-50 Percentile Ratio | 21 | | 4 | | 1 |
| NEU1 | U133 + 2 | Melanoma All Vs Essential Normal | 80-50 Percentile Ratio | 41 | | 3 | | 1 |
| NEU1 | U133 + 2 | Renal Carcinoma All Vs Essential Normal | 80-50 Percentile Ratio | 66 | | 3 | | 1 |
| NEU1 | U133 + 2 | Uterus Carcinoma All Vs Essential Normal | 80-50 Percentile Ratio | 39 | | 3 | | 1 |
| NEU1 | Chiron cDNA | Breast Cancer | 2Xconcordance | 23 | | 43 | | 1 |
| | array | | | | | | | |
| NEU1 | Chiron cDNA | Colon Cancer | 2Xconcordance | 76 | | 28 | | 1 |
| | array | | | | | | | |
| NEU1 | Chiron cDNA | matched Colon | 2Xconcordance | 36 | | 36 | | 1 |
| | array | | | | | | | |
| NEU1 | Chiron cDNA | matched Colon Met | 2Xconcordance | 36 | | 39 | | 1 |
| | array | | | | | | | |
| NFKBIZ | U133 + 2 | Blood/Lymph Carcinoma All Vs Essential Normal | 80-50 Percentile Ratio | 60 | 0 | 2.5 | 0.7071 | 2 |
| NFKBIZ | U133 + 2 | Pancreas Carcinoma All Vs Essential Normal | 80-50 Percentile Ratio | 13 | 0 | 4 | 0 | 2 |
| NFKBIZ | U133 + 2 | Pancreas Carcinoma All Vs Essential Normal | 80-80 Percentile Ratio | 13 | | 3 | | 1 |
| NFKBIZ | U133 + 2 | Stomach Carcinoma All Vs Essential Normal | 80-50 Percentile Ratio | 23 | 0 | 3.5 | 0.7071 | 2 |
| NFKBIZ | U133 + 2 | Upper Aero-Digestive Tract Carcinoma All Vs Essential Normal | 80-50 Percentile Ratio | 23 | 0 | 3 | 0 | 2 |
| NOL10 | U133 + 2 | Breast Carcinoma All Vs Essential Normal | 80-50 Percentile Ratio | 43 | | 2 | | 1 |
| NOL10 | U133 + 2 | Ovarian Carcinoma All Vs Essential Normal | 80-50 Percentile Ratio | 72 | | 2 | | 1 |
| NOL10 | U133 + 2 | Upper Aero-Digestive Tract Carcinoma All Vs Essential Normal | 80-50 Percentile Ratio | 23 | | 2 | | 1 |
| NOL10 | U133 + 2 | Uterus Carcinoma All Vs Essential Normal | 80-50 Percentile Ratio | 39 | | 2 | | 1 |
| NOL10 | Chiron cDNA | Breast Cancer | 2Xconcordance | 23 | | 22 | | 1 |
| | array | | | | | | | |
| NTRK3 | U133A&B | Colon Cancer | 2Xconcordance | 27 | | 26 | | 1 |
| OASL | U133 + 2 | Stomach Carcinoma All Vs Essential Normal | 80-50 Percentile Ratio | 23 | | 4 | | 1 |
| OASL | U133 + 2 | Upper Aero-Digestive Tract Carcinoma All Vs Essential Normal | 80-50 Percentile Ratio | 23 | | 3 | | 1 |
| OASL | Chiron cDNA | Breast Cancer | 2Xconcordance | 23 | | 22 | | 1 |
| | array | | | | | | | |
| OASL | Chiron cDNA | Colon Cancer | 2Xconcordance | 19 | | 42 | | 1 |
| | array | | | | | | | |
| OASL | Chiron cDNA | matched Colon | 2Xconcordance | 18 | | 44 | | 1 |
| | array | | | | | | | |
| OASL | Chiron cDNA | matched Colon Met | 2Xconcordance | 18 | | 39 | | 1 |
| | array | | | | | | | |
| OASL | Chiron cDNA | Prostate Cancer | 2Xconcordance | 101 | | 27 | | 1 |
| | array | | | | | | | |
| OXSM | U133 + 2 | Liver Carcinoma All Vs Essential Normal | 80-50 Percentile Ratio | 21 | | 2 | | 1 |
| PDCD1LG2 | U133 + 2 | Blood/Lymph Carcinoma All Vs Essential Normal | 80-50 Percentile Ratio | 60 | 0 | 3.5 | 2.1213 | 2 |
| PDCD1LG2 | U133 + 2 | Lung Carcinoma All Vs Essential Normal | 80-50 Percentile Ratio | 68 | | 3 | | 1 |
| PDCD1LG2 | U133 + 2 | Renal Carcinoma All Vs Essential Normal | 80-50 Percentile Ratio | 66 | | 2 | | 1 |
| PDGFRA | U133A&B | Colon Cancer | 2Xconcordance | 27 | | 30 | | 1 |
| PDGFRA | U133A&B | Colon Met | 2Xconcordance | 32 | | 38 | | 1 |
| PIGM | U133 + 2 | Bladder Carcinoma All Vs Essential Normal | 80-50 Percentile Ratio | 20 | | 2 | | 1 |
| PIGM | U133 + 2 | Breast Carcinoma All Vs Essential Normal | 80-50 Percentile Ratio | 43 | | 2 | | 1 |
| PIGM | U133 + 2 | Liver Carcinoma All Vs Essential Normal | 80-50 Percentile Ratio | 21 | | 2 | | 1 |
| PIGM | U133 + 2 | Melanoma All Vs Essential Normal | 80-50 Percentile Ratio | 41 | | 2 | | 1 |
| PIGM | U133 + 2 | Ovarian Carcinoma All Vs Essential Normal | 80-50 Percentile Ratio | 72 | | 2 | | 1 |
| PIGM | Chiron cDNA | Breast Cancer | 2Xconcordance | 23 | | 22 | | 1 |
| | array | | | | | | | |
| PIGM | Chiron cDNA | Colon Cancer | 2Xconcordance | 76 | | 33 | | 1 |
| | array | | | | | | | |
| PIGM | Chiron cDNA | Colon Met | 2Xconcordance | 33 | | 24 | | 1 |
| | array | | | | | | | |
| PIGM | Chiron cDNA | matched Colon | 2Xconcordance | 36 | | 31 | | 1 |
| | array | | | | | | | |
| PIGM | Chiron cDNA | matched Colon Met | 2Xconcordance | 35 | | 23 | | 1 |
| | array | | | | | | | |
| PPP3CC | U133 + 2 | Blood/Lymph Carcinoma All Vs Essential Normal | 80-50 Percentile Ratio | 60 | 0 | 3 | 0 | 2 |
| PRIM2A | U133A&B | Breast Cancer | 2Xconcordance | 40 | | 100 | | 1 |
| PRIM2A | U133 + 2 | Bladder Carcinoma All Vs Essential Normal | 80-50 Percentile Ratio | 20 | 0 | 7.5 | 2.1213 | 2 |
| PRIM2A | U133 + 2 | Bladder Carcinoma All Vs Essential Normal | 80-80 Percentile Ratio | 19 | 0 | 4 | 1.4142 | 2 |
| PRIM2A | U133 + 2 | Blood Lymph Carcinoma All Vs Essential Normal | 80-80 Percentile Ratio | 61 | 0 | 4.5 | 0.7071 | 2 |
| PRIM2A | U133 + 2 | Blood/Lymph Carcinoma All Vs Essential Normal | 80-50 Percentile Ratio | 60 | 0 | 8 | 2.8284 | 2 |
| PRIM2A | U133 + 2 | Breast Carcinoma All Vs Essential Normal | 80-50 Percentile Ratio | 43 | 0 | 6.5 | 0.7071 | 2 |
| PRIM2A | U133 + 2 | Breast Carcinoma All Vs Essential Normal | 80-80 Percentile Ratio | 43 | | 5 | | 1 |
| PRIM2A | U133 + 2 | GI Tract Carcinoma All Vs Essential Normal | 80-80 Percentile Ratio | 21 | | 3 | | 1 |
| PRIM2A | U133 + 2 | Liver Carcinoma All Vs Essential Normal | 80-50 Percentile Ratio | 21 | | 5 | | 1 |
| PRIM2A | U133 + 2 | Lung Carcinoma All Vs Essential Normal | 80-50 Percentile Ratio | 68 | 0 | 8 | 1.4142 | 2 |
| PRIM2A | U133 + 2 | Lung Carcinoma All Vs Essential Normal | 80-80 Percentile Ratio | 67 | 0 | 4 | 1.4142 | 2 |
| PRIM2A | U133 + 2 | Melanoma All Vs Essential Normal | 80-50 Percentile Ratio | 41 | 0 | 9 | 1.4142 | 2 |
| PRIM2A | U133 + 2 | Melanoma All Vs Essential Normal | 80-80 Percentile Ratio | 39 | 0 | 4.5 | 2.1213 | 2 |
| PRIM2A | U133 + 2 | Ovarian Carcinoma All Vs Essential Normal | 80-50 Percentile Ratio | 72 | 0 | 8.5 | 0.7071 | 2 |
| PRIM2A | U133 + 2 | Ovarian Carcinoma All Vs Essential Normal | 80-80 Percentile Ratio | 72 | 0 | 4.5 | 2.1213 | 2 |
| PRIM2A | U133 + 2 | Pancreas Carcinoma All Vs Essential Normal | 80-50 Percentile Ratio | 13 | 0 | 3.5 | 0.7071 | 2 |
| PRIM2A | U133 + 2 | Renal Carcinoma All Vs Essential Normal | 80-50 Percentile Ratio | 66 | | 3 | | 1 |
| PRIM2A | U133 + 2 | Stomach Carcinoma All Vs Essential Normal | 80-50 Percentile Ratio | 23 | 0 | 5 | 1.4142 | 2 |
| PRIM2A | U133 + 2 | Upper Aero-Digestive Carcinoma All Vs Essential Normal | 80-80 Percentile Ratio | 23 | 0 | 4.5 | 2.1213 | 2 |
| PRIM2A | U133 + 2 | Upper Aero-Digestive Tract Carcinoma All Vs Essential Normal | 80-50 Percentile Ratio | 23 | 0 | 8.5 | 2.1213 | 2 |
| PRIM2A | U133 + 2 | Uterus Carcinoma All Vs Essential Normal | 80-50 Percentile Ratio | 39 | 0 | 9 | 0 | 2 |
| PRIM2A | U133 + 2 | Uterus Endometrial Carcinoma All Vs Essential Normal | 80-80 Percentile Ratio | 39 | 0 | 5 | 2.8284 | 2 |
| PRKCH | Chiron cDNA | Colon Cancer | 2Xconcordance | 75 | | 21 | | 1 |
| | array | | | | | | | |
| PRKCH | Chiron cDNA | Colon Met | 2Xconcordance | 33 | | 24 | | 1 |
| | array | | | | | | | |
| PRKCH | Chiron cDNA | matched Colon | 2Xconcordance | 36 | | 31 | | 1 |
| | array | | | | | | | |
| PSMB1 | U133A&B | Breast Cancer | 2Xconcordance | 50 | | 20 | | 1 |
| PSMB1 | U133A&B | Colon Cancer | 2Xconcordance | 27 | 0 | 33.5 | 4.9497 | 2 |
| PSMB1 | U133A&B | Colon Met | 2Xconcordance | 33 | | 55 | | 1 |
| PSMB1 | U133A&B | Prostate Cancer vs adjacent Normal | 2Xconcordance | 16 | | 31 | | 1 |
| PSMB1 | U133 + 2 | Breast Carcinoma All Vs Essential Normal | 80-50 Percentile Ratio | 43 | | 2 | | 1 |
| PSMB1 | U133 + 2 | Liver Carcinoma All Vs Essential Normal | 80-50 Percentile Ratio | 21 | | 2 | | 1 |
| PSMB1 | U133 + 2 | Lung Carcinoma All Vs Essential Normal | 80-50 Percentile Ratio | 68 | | 2 | | 1 |
| PSMB1 | U133 + 2 | Upper Aero-Digestive Tract Carcinoma All Vs Essential Normal | 80-50 Percentile Ratio | 23 | 0 | 2 | 0 | 2 |
| PSMB1 | U133 + 2 | Uterus Carcinoma All Vs Essential Normal | 80-50 Percentile Ratio | 39 | 0 | 2 | 0 | 2 |
| PSMB1 | Chiron cDNA | Colon Cancer | 2Xconcordance | 57.333333 | 33.201 | 37.66666667 | 14.468 | 3 |
| | array | | | | | | | |
| PSMB1 | Chiron cDNA | Colon Met | 2Xconcordance | 33 | 0 | 37.5 | 2.1213 | 2 |
| | array | | | | | | | |
| PSMB1 | Chiron cDNA | matched Colon | 2Xconcordance | 30 | 10.392 | 37 | 13.229 | 3 |
| | array | | | | | | | |
| PSMB1 | Chiron cDNA | matched Colon Met | 2Xconcordance | 30 | 10.392 | 48.33333333 | 13.279 | 3 |
| | array | | | | | | | |
| PSMB9 | U133A&B | Breast Cancer | 2Xconcordance | 50 | | 50 | | 1 |
| PSMB9 | U133A&B | Colon Cancer | 2Xconcordance | 27 | | 48 | | 1 |
| PSMB9 | U133A&B | Colon Met | 2Xconcordance | 33 | | 39 | | 1 |
| PSMB9 | U133 + 2 | Blood Lymph Carcinoma All Vs Essential Normal | 80-80 Percentile Ratio | 61 | | 6 | | 1 |
| PSMB9 | U133 + 2 | Blood/Lymph Carcinoma All Vs Essential Normal | 80-50 Percentile Ratio | 60 | | 11 | | 1 |
| PSMB9 | U133 + 2 | GI Tract Carcinoma All Vs Essential Normal | 80-80 Percentile Ratio | 21 | | 3 | | 1 |
| PSMB9 | U133 + 2 | Stomach Carcinoma All Vs Essential Normal | 80-50 Percentile Ratio | 23 | | 6 | | 1 |
| PSMB9 | U133 + 2 | Upper Aero-Digestive Carcinoma All Vs Essential Normal | 80-80 Percentile Ratio | 23 | | 3 | | 1 |
| PSMB9 | U133 + 2 | Upper Aero-Digestive Tract Carcinoma All Vs Essential Normal | 80-50 Percentile Ratio | 23 | | 6 | | 1 |
| PSMB9 | Chiron cDNA | Breast Cancer | 2Xconcordance | 23 | | 26 | | 1 |
| | array | | | | | | | |
| PSMB9 | Chiron cDNA | Colon Cancer | 2Xconcordance | 77 | | 31 | | 1 |
| | array | | | | | | | |
| PSMB9 | Chiron cDNA | matched Colon | 2Xconcordance | 36 | | 28 | | 1 |
| | array | | | | | | | |
| PSMB9 | Chiron cDNA | matched Colon Met | 2Xconcordance | 36 | | 25 | | 1 |
| | array | | | | | | | |
| PTP4A2 | U133A&B | Breast Cancer | 2Xconcordance | 50 | 0 | 31 | 7.0711 | 2 |
| PTP4A2 | U133A&B | Colon Cancer | 2Xconcordance | 27 | | 33 | | 1 |
| PTP4A2 | U133 + 2 | Bladder Carcinoma All Vs Essential Normal | 80-50 Percentile Ratio | 20 | 0 | 2.5 | 0.7071 | 2 |
| PTP4A2 | U133 + 2 | Blood/Lymph Carcinoma All Vs Essential Normal | 80-50 Percentile Ratio | 60 | 0 | 2.5 | 0.7071 | 2 |
| PTP4A2 | U133 + 2 | Breast Carcinoma All Vs Essential Normal | 80-50 Percentile Ratio | 43 | 0 | 3 | 0 | 2 |
| PTP4A2 | U133 + 2 | Stomach Carcinoma All Vs Essential Normal | 80-50 Percentile Ratio | 23 | | 2 | | 1 |
| PTP4A2 | Chiron cDNA | Breast Cancer | 2Xconcordance | 22 | 2.2361 | 29.6 | 8.5323 | 5 |
| | array | | | | | | | |
| PTP4A2 | Chiron cDNA | matched Colon | 2Xconcordance | 36 | | 25 | | 1 |
| | array | | | | | | | |
| PTP4A2 | Chiron cDNA | matched Colon Met | 2Xconcordance | 35 | | 20 | | 1 |
| | array | | | | | | | |
| PTPRK | U133 + 2 | Pancreas Carcinoma All Vs Essential Normal | 80-50 Percentile Ratio | 13 | | 3 | | 1 |
| PTPRK | U133 + 2 | Renal Carcinoma All Vs Essential Normal | 80-50 Percentile Ratio | 66 | | 3 | | 1 |
| PTPRK | U133 + 2 | Stomach Carcinoma All Vs Essential Normal | 80-50 Percentile Ratio | 23 | | 3 | | 1 |
| PTPRK | U133 + 2 | Upper Aero-Digestive Tract Carcinoma All Vs Essential Normal | 80-50 Percentile Ratio | 23 | | 3 | | 1 |
| PTPRK | U133 + 2 | Uterus Carcinoma All Vs Essential Normal | 80-50 Percentile Ratio | 39 | | 3 | | 1 |
| RAC2 | U133 + 2 | Blood Lymph Carcinoma All Vs Essential Normal | 80-80 Percentile Ratio | 61 | 0 | 18 | 4.2426 | 2 |
| RAC2 | U133 + 2 | Blood/Lymph Carcinoma All Vs Essential Normal | 80-50 Percentile Ratio | 60 | 0 | 31 | 4.2426 | 2 |
| RAC2 | Chiron cDNA | Breast Cancer | 2Xconcordance | 23 | | 22 | | 1 |
| | array | | | | | | | |
| RAC2 | Chiron cDNA | Colon Cancer | 2Xconcordance | 75.166667 | 0.4082 | 28.83333333 | 4.0208 | 6 |
| | array | | | | | | | |
| RAC2 | Chiron cDNA | matched Colon Met | 2Xconcordance | 35 | 0 | 32.66666667 | 4.8854 | 6 |
| | array | | | | | | | |
| REG3A | U133A&B | Colon Cancer | 2Xconcordance | 26 | | 50 | | 1 |
| REG3A | U133A&B | Prostate Cancer | 2Xconcordance | 22 | | 23 | | 1 |
| REG3A | U133 + 2 | GI Tract Carcinoma All Vs Essential Normal | 80-80 Percentile Ratio | 21 | | 1588 | | 1 |
| REG3A | U133 + 2 | Stomach Carcinoma All Vs Essential Normal | 80-50 Percentile Ratio | 23 | | 2289 | | 1 |
| REG3A | Chiron cDNA | Colon Cancer | 2Xconcordance | 77 | | 22 | | 1 |
| | array | | | | | | | |
| RGC32 | U133A&B | Colon Cancer | 2Xconcordance | 9 | | 100 | | 1 |
| RGC32 | U133A&B | Colon Met | 2Xconcordance | 15 | | 100 | | 1 |
| RGC32 | Chiron cDNA | Breast Cancer | 2Xconcordance | 23 | | 26 | | 1 |
| | array | | | | | | | |
| RGC32 | Chiron cDNA | Prostate Cancer | 2Xconcordance | 101 | | 47 | | 1 |
| | array | | | | | | | |
| RNASE1 | Chiron cDNA | Breast Cancer | 2Xconcordance | 23 | | 48 | | 1 |
| | array | | | | | | | |
| RNASE1 | Chiron cDNA | matched Colon Met | 2Xconcordance | 29 | 8.4853 | 21 | 1.4142 | 2 |
| | array | | | | | | | |
| RNPC1 | U133 + 2 | Blood/Lymph Carcinoma All Vs Essential Normal | 80-50 Percentile Ratio | 60 | | 5 | | 1 |
| RORC | U133A&B | Breast Cancer | 2Xconcordance | 37 | | 32 | | 1 |
| RORC | U133A&B | Colon Cancer | 2Xconcordance | 21 | | 29 | | 1 |
| RORC | U133A&B | Colon Met | 2Xconcordance | 20 | | 20 | | 1 |
| RUNX3 | U133 + 2 | Blood Lymph Carcinoma All Vs Essential Normal | 80-80 Percentile Ratio | 61 | 0 | 5.5 | 0.7071 | 2 |
| RUNX3 | U133 + 2 | Blood/Lymph Carcinoma All Vs Essential Normal | 80-50 Percentile Ratio | 60 | 0 | 7 | 1.4142 | 2 |
| RUNX3 | U133 + 2 | Melanoma All Vs Essential Normal | 80-50 Percentile Ratio | 41 | | 4 | | 1 |
| RUNX3 | U133 + 2 | Melanoma All Vs Essential Normal | 80-80 Percentile Ratio | 39 | | 3 | | 1 |
| SELL | U133A&B | Prostate Cancer | 2Xconcordance | 9 | | 100 | | 1 |
| SELL | U133 + 2 | Blood Lymph Carcinoma All Vs Essential Normal | 80-80 Percentile Ratio | 61 | | 27 | | 1 |
| SELL | U133 + 2 | Blood/Lymph Carcinoma All Vs Essential Normal | 80-50 Percentile Ratio | 60 | | 38 | | 1 |
| SELL | Chiron cDNA | Colon Cancer | 2Xconcordance | 77 | | 35 | | 1 |
| | array | | | | | | | |
| SELL | Chiron cDNA | Colon Met | 2Xconcordance | 33 | | 27 | | 1 |
| | array | | | | | | | |
| SELL | Chiron cDNA | matched Colon | 2Xconcordance | 36 | | 28 | | 1 |
| | array | | | | | | | |
| SELL | Chiron cDNA | matched Colon Met | 2Xconcordance | 36 | | 42 | | 1 |
| | array | | | | | | | |
| SEPT9 | U133A&B | Colon Cancer | 2Xconcordance | 27 | 0 | 44.5 | 10.607 | 2 |
| SEPT9 | U133A&B | Prostate Cancer | 2Xconcordance | 17 | | 24 | | 1 |
| SEPT9 | U133 + 2 | Bladder Carcinoma All Vs Essential Normal | 80-50 Percentile Ratio | 20 | | 3 | | 1 |
| SEPT9 | U133 + 2 | Blood/Lymph Carcinoma All Vs Essential Normal | 80-50 Percentile Ratio | 60 | | 3 | | 1 |
| SEPT9 | U133 + 2 | Breast Carcinoma All Vs Essential Normal | 80-50 Percentile Ratio | 43 | | 2 | | 1 |
| SEPT9 | U133 + 2 | Melanoma All Vs Essential Normal | 80-50 Percentile Ratio | 41 | | 3 | | 1 |
| SEPT9 | Chiron cDNA | Breast Cancer | 2Xconcordance | 23 | | 43 | | 1 |
| | array | | | | | | | |
| SEPT9 | Chiron cDNA | Colon Cancer | 2Xconcordance | 76 | | 29 | | 1 |
| | array | | | | | | | |
| SEPT9 | Chiron cDNA | matched Colon | 2Xconcordance | 36 | | 28 | | 1 |
| | array | | | | | | | |
| SEPT9 | Chiron cDNA | matched Colon Met | 2Xconcordance | 35 | 0 | 30 | 1.4142 | 2 |
| | array | | | | | | | |
| SLC12A7 | U133A&B | Breast Cancer | 2Xconcordance | 50 | | 22 | | 1 |
| SLC12A7 | U133 + 2 | Liver Carcinoma All Vs Essential Normal | 80-50 Percentile Ratio | 21 | | 3 | | 1 |
| SLC12A7 | U133 + 2 | Renal Carcinoma All Vs Essential Normal | 80-50 Percentile Ratio | 66 | | 3 | | 1 |
| SLC12A7 | Chiron cDNA | Breast Cancer | 2Xconcordance | 20.5 | 3.5355 | 24 | 2.8284 | 2 |
| | array | | | | | | | |
| SLC12A7 | Chiron cDNA | Colon Cancer | 2Xconcordance | 19 | | 21 | | 1 |
| | array | | | | | | | |
| SLC12A7 | Chiron cDNA | matched Colon | 2Xconcordance | 18 | | 22 | | 1 |
| | array | | | | | | | |
| SLC12A7 | Chiron cDNA | matched Colon Met | 2Xconcordance | 18 | | 28 | | 1 |
| | array | | | | | | | |
| SLC25A37 | U133A&B | Colon Cancer | 2Xconcordance | 26 | | 54 | | 1 |
| SLC25A37 | U133A&B | Prostate Cancer | 2Xconcordance | 20 | | 20 | | 1 |
| SLC39A10 | U133A&B | Breast Cancer | 2Xconcordance | 44 | | 39 | | 1 |
| SLC39A10 | U133A&B | Colon Cancer | 2Xconcordance | 16.666667 | 4.6188 | 85.33333333 | 12.741 | 3 |
| SLC39A10 | U133A&B | Colon Met | 2Xconcordance | 31.666667 | 0.5774 | 62 | 15 | 3 |
| SLC39A10 | U133 + 2 | Ovarian Carcinoma All Vs Essential Normal | 80-50 Percentile Ratio | 72 | | 5 | | 1 |
| SLC39A10 | U133 + 2 | Ovarian Carcinoma All Vs Essential Normal | 80-80 Percentile Ratio | 72 | | 4 | | 1 |
| SLC39A10 | U133 + 2 | Uterus Carcinoma All Vs Essential Normal | 80-50 Percentile Ratio | 39 | | 3 | | 1 |
| SLC39A10 | Chiron cDNA | Breast Cancer | 2Xconcordance | 23 | | 30 | | 1 |
| | array | | | | | | | |
| SLC39A10 | Chiron cDNA | Colon Cancer | 2Xconcordance | 61 | 28 | 33 | 8.641 | 4 |
| | array | | | | | | | |
| SLC39A10 | Chiron cDNA | Colon Met | 2Xconcordance | 33 | 0 | 57 | 3.4641 | 3 |
| | array | | | | | | | |
| SLC39A10 | Chiron cDNA | matched Colon | 2Xconcordance | 31.5 | 9 | 40.25 | 14.66 | 4 |
| | array | | | | | | | |
| SLC39A10 | Chiron cDNA | matched Colon Met | 2Xconcordance | 31.25 | 9.5 | 44.25 | 8.5 | 4 |
| SLC44A3 | U133 + 2 | Bladder Carcinoma All Vs Essential Normal | 80-50 Percentile Ratio | 20 | | 6 | | 1 |
| SLC44A3 | U133 + 2 | Bladder Carcinoma All Vs Essential Normal | 80-80 Percentile Ratio | 19 | | 3 | | 1 |
| SLC44A3 | U133 + 2 | Renal Carcinoma All Vs Essential Normal | 80-50 Percentile Ratio | 66 | | 4 | | 1 |
| SLC44A3 | U133 + 2 | Stomach Carcinoma All Vs Essential Normal | 80-50 Percentile Ratio | 23 | | 4 | | 1 |
| SLPI | U133 + 2 | Lung Carcinoma All Vs Essential Normal | 80-50 Percentile Ratio | 68 | | 26 | | 1 |
| SLPI | U133 + 2 | Lung Carcinoma All Vs Essential Normal | 80-80 Percentile Ratio | 67 | | 14 | | 1 |
| SLPI | U133 + 2 | Ovarian Carcinoma All Vs Essential Normal | 80-50 Percentile Ratio | 72 | | 91 | | 1 |
| SLPI | U133 + 2 | Ovarian Carcinoma All Vs Essential Normal | 80-80 Percentile Ratio | 72 | | 49 | | 1 |
| SLPI | U133 + 2 | Uterus Carcinoma All Vs Essential Normal | 80-50 Percentile Ratio | 39 | | 131 | | 1 |
| SLPI | U133 + 2 | Uterus Endometrial Carcinoma All Vs Essential Normal | 80-80 Percentile Ratio | 39 | | 71 | | 1 |
| SLPI | Chiron cDNA | Breast Cancer | 2Xconcordance | 23 | | 22 | | 1 |
| | array | | | | | | | |
| SLPI | Chiron cDNA | Colon Cancer | 2Xconcordance | 77 | | 35 | | 1 |
| | array | | | | | | | |
| SLPI | Chiron cDNA | Colon Met | 2Xconcordance | 33 | | 36 | | 1 |
| | array | | | | | | | |
| SLPI | Chiron cDNA | matched Colon | 2Xconcordance | 30 | 8.4853 | 34.5 | 13.435 | 2 |
| | array | | | | | | | |
| SLPI | Chiron cDNA | matched Colon Met | 2Xconcordance | 36 | | 25 | | 1 |
| | array | | | | | | | |
| SMAP1L | U133 + 2 | Blood Lymph Carcinoma All Vs Essential Normal | 80-80 Percentile Ratio | 61 | | 10 | | 1 |
| SMAP1L | U133 + 2 | Blood/Lymph Carcinoma All Vs Essential Normal | 80-50 Percentile Ratio | 60 | | 15 | | 1 |
| SOS1 | U133A&B | Breast Cancer | 2Xconcordance | 50 | | 30 | | 1 |
| SOS1 | Chiron cDNA | Colon Cancer | 2Xconcordance | 76 | | 51 | | 1 |
| | array | | | | | | | |
| SOS1 | Chiron cDNA | Colon Met | 2Xconcordance | 33 | | 45 | | 1 |
| | array | | | | | | | |
| SOS1 | Chiron cDNA | matched Colon | 2Xconcordance | 36 | | 50 | | 1 |
| | array | | | | | | | |
| SOS1 | Chiron cDNA | matched Colon Met | 2Xconcordance | 35 | | 40 | | 1 |
| | array | | | | | | | |
| SOX11 | U133A&B | Breast Cancer | 2Xconcordance | 13.5 | 3.5355 | 100 | 0 | 2 |
| SOX11 | U133 + 2 | Breast Carcinoma All Vs Essential Normal | 80-50 Percentile Ratio | 43 | 0 | 30.66666667 | 13.051 | 3 |
| SOX11 | U133 + 2 | Breast Carcinoma All Vs Essential Normal | 80-80 Percentile Ratio | 43 | 0 | 14.66666667 | 3.2146 | 3 |
| SOX11 | U133 + 2 | Ovarian Carcinoma All Vs Essential Normal | 80-80 Percentile Ratio | 72 | | 4 | | 1 |
| SOX11 | U133 + 2 | Pancreas Carcinoma All Vs Essential Normal | 80-50 Percentile Ratio | 13 | | 27 | | 1 |
| SOX11 | U133 + 2 | Pancreas Carcinoma All Vs Essential Normal | 80-80 Percentile Ratio | 13 | 0 | 6.666666667 | 3.5119 | 3 |
| SOX11 | U133 + 2 | Renal Carcinoma All Vs Essential Normal | 80-50 Percentile Ratio | 66 | 0 | 23.33333333 | 11.504 | 3 |
| SOX11 | U133 + 2 | Renal Carcinoma All Vs Essential Normal | 80-80 Percentile Ratio | 68 | 0 | 11 | 2.6458 | 3 |
| SPATA13 | U133A&B | Colon Met | 2Xconcordance | 33 | | 30 | | 1 |
| SPATA13 | U133A&B | Prostate Cancer vs adjacent Normal | 2Xconcordance | 17 | | 29 | | 1 |
| SRC | U133 + 2 | Bladder Carcinoma All Vs Essential Normal | 80-50 Percentile Ratio | 20 | | 5 | | 1 |
| SRC | U133 + 2 | Bladder Carcinoma All Vs Essential Normal | 80-80 Percentile Ratio | 19 | | 3 | | 1 |
| ST6GALNAC3 | U133A&B | Colon Met | 2Xconcordance | 24 | | 21 | | 1 |
| TFEB | U133 + 2 | Blood/Lymph Carcinoma All Vs Essential Normal | 80-50 Percentile Ratio | 60 | | 2 | | 1 |
| THADA | U133A&B | Colon Met | 2Xconcordance | 20 | | 20 | | 1 |
| THADA | U133 + 2 | Bladder Carcinoma All Vs Essential Normal | 80-50 Percentile Ratio | 20 | | 4 | | 1 |
| THADA | U133 + 2 | Blood/Lymph Carcinoma All Vs Essential Normal | 80-50 Percentile Ratio | 60 | 0 | 4 | 1.7321 | 3 |
| THADA | U133 + 2 | Breast Carcinoma All Vs Essential Normal | 80-50 Percentile Ratio | 43 | | 3 | | 1 |
| THADA | U133 + 2 | Lung Carcinoma All Vs Essential Normal | 80-50 Percentile Ratio | 68 | | 4 | | 1 |
| THADA | U133 + 2 | Melanoma All Vs Essential Normal | 80-50 Percentile Ratio | 41 | | 4 | | 1 |
| THADA | U133 + 2 | Ovarian Carcinoma All Vs Essential Normal | 80-50 Percentile Ratio | 72 | | 4 | | 1 |
| THADA | U133 + 2 | Renal Carcinoma All Vs Essential Normal | 80-50 Percentile Ratio | 66 | | 3 | | 1 |
| THADA | U133 + 2 | Stomach Carcinoma All Vs Essential Normal | 80-50 Percentile Ratio | 23 | | 3 | | 1 |
| THADA | U133 + 2 | Upper Aero-Digestive Tract Carcinoma All Vs Essential Normal | 80-50 Percentile Ratio | 23 | | 4 | | 1 |
| THADA | U133 + 2 | Uterus Carcinoma All Vs Essential Normal | 80-50 Percentile Ratio | 39 | | 4 | | 1 |
| THRB | Chiron cDNA | matched Colon | 2Xconcordance | 36 | | 25 | | 1 |
| | array | | | | | | | |
| TLE3 | U133A&B | Breast Cancer | 2Xconcordance | 36 | | 25 | | 1 |
| TLE3 | U133 + 2 | Blood/Lymph Carcinoma All Vs Essential Normal | 80-50 Percentile Ratio | 60 | 0 | 2.5 | 0.7071 | 2 |
| TLE3 | U133 + 2 | Breast Carcinoma All Vs Essential Normal | 80-50 Percentile Ratio | 43 | 0 | 2.666666667 | 0.5774 | 3 |
| TM4SF20 | U133A&B | Colon Met | 2Xconcordance | 21 | | 24 | | 1 |
| TMEFF2 | U133A&B | Colon Cancer | 2Xconcordance | 19.5 | 9.1924 | 67.5 | 19.092 | 2 |
| TMEFF2 | U133A&B | Colon Met | 2Xconcordance | 33 | | 73 | | 1 |
| TMEFF2 | U133A&B | Prostate Cancer | 2Xconcordance | 18.5 | 4.9497 | 79.5 | 28.991 | 2 |
| TMEFF2 | U133A&B | Prostate Cancer vs adjacent Normal | 2Xconcordance | 17 | | 59 | | 1 |
| TMEFF2 | U133 + 2 | Pancreas Carcinoma All Vs Essential Normal | 80-50 Percentile Ratio | 13 | | 5 | | 1 |
| TMEFF2 | U133 + 2 | Pancreas Carcinoma All Vs Essential Normal | 80-80 Percentile Ratio | 13 | | 3 | | 1 |
| TMEFF2 | U133 + 2 | Stomach Carcinoma All Vs Essential Normal | 80-50 Percentile Ratio | 23 | | 4 | | 1 |
| TMEFF2 | Chiron cDNA | Breast Cancer | 2Xconcordance | 23 | 0 | 24 | 2.8284 | 2 |
| | array | | | | | | | |
| TMEFF2 | Chiron cDNA | Colon Cancer | 2Xconcordance | 41 | | 49 | | 1 |
| | array | | | | | | | |
| TMEFF2 | Chiron cDNA | Colon Met | 2Xconcordance | 30 | | 67 | | 1 |
| | array | | | | | | | |
| TMEFF2 | Chiron cDNA | matched Colon | 2Xconcordance | 11 | | 55 | | 1 |
| | array | | | | | | | |
| TMEFF2 | Chiron cDNA | matched Colon Met | 2Xconcordance | 11 | | 82 | | 1 |
| | array | | | | | | | |
| TMEFF2 | Chiron cDNA | Prostate Cancer | 2Xconcordance | 85 | 29.698 | 36.5 | 0.7071 | 2 |
| | array | | | | | | | |
| TNFSF11 | U133 + 2 | Blood Lymph Carcinoma All Vs Essential Normal | 80-80 Percentile Ratio | 61 | | 5 | | 1 |
| TNFSF11 | U133 + 2 | Blood/Lymph Carcinoma All Vs Essential Normal | 80-50 Percentile Ratio | 60 | | 7 | | 1 |
| TNFSF11 | U133 + 2 | Pancreas Carcinoma All Vs Essential Normal | 80-50 Percentile Ratio | 13 | | 4 | | 1 |
| TP53I11 | U133A&B | Prostate Cancer vs adjacent Normal | 2Xconcordance | 15 | 0 | 23.5 | 4.9497 | 2 |
| TP53I11 | Chiron cDNA | Breast Cancer | 2Xconcordance | 8 | | 50 | | 1 |
| | array | | | | | | | |
| TTC15 | Chiron cDNA | Colon Cancer | 2Xconcordance | 19 | 0 | 39.5 | 19.092 | 2 |
| | array | | | | | | | |
| TTC15 | Chiron cDNA | matched Colon | 2Xconcordance | 18 | 0 | 42 | 19.799 | 2 |
| | array | | | | | | | |
| TTC15 | Chiron cDNA | matched Colon Met | 2Xconcordance | 18 | | 44 | | 1 |
| | array | | | | | | | |
| TTC15 | Chiron cDNA | Prostate Cancer | 2Xconcordance | 101 | | 21 | | 1 |
| | array | | | | | | | |
| UBASH3A | U133 + 2 | Blood/Lymph Carcinoma All Vs Essential Normal | 80-50 Percentile Ratio | 60 | | 3 | | 1 |
| VIL2 | U133A&B | Breast Cancer | 2Xconcordance | 5 | | 100 | | 1 |
| VIL2 | U133A&B | Colon Cancer | 2Xconcordance | 27 | | 33 | | 1 |
| VIL2 | U133 + 2 | Bladder Carcinoma All Vs Essential Normal | 80-50 Percentile Ratio | 20 | 0 | 4 | 1 | 3 |
| VIL2 | U133 + 2 | Blood Lymph Carcinoma All Vs Essential Normal | 80-80 Percentile Ratio | 61 | 0 | 3.333333333 | 0.5774 | 3 |
| VIL2 | U133 + 2 | Blood/Lymph Carcinoma All Vs Essential Normal | 80-50 Percentile Ratio | 60 | 0 | 6 | 1.633 | 4 |
| VIL2 | U133 + 2 | Lung Carcinoma All Vs Essential Normal | 80-50 Percentile Ratio | 68 | 0 | 3 | 0 | 3 |
| VIL2 | U133 + 2 | Renal Carcinoma All Vs Essential Normal | 80-50 Percentile Ratio | 66 | 0 | 5 | 1 | 3 |
| VIL2 | U133 + 2 | Renal Carcinoma All Vs Essential Normal | 80-80 Percentile Ratio | 68 | 0 | 3 | 0 | 2 |
| VIL2 | U133 + 2 | Stomach Carcinoma All Vs Essential Normal | 80-50 Percentile Ratio | 23 | 0 | 4 | 0.8165 | 4 |
| VIL2 | U133 + 2 | Upper Aero-Digestive Carcinoma All Vs Essential Normal | 80-80 Percentile Ratio | 23 | 0 | 3 | 0 | 2 |
| VIL2 | U133 + 2 | Upper Aero-Digestive Tract Carcinoma All Vs Essential Normal | 80-50 Percentile Ratio | 23 | 0 | 5.25 | 0.9574 | 4 |
| VIL2 | U133 + 2 | Uterus Carcinoma All Vs Essential Normal | 80-50 Percentile Ratio | 39 | | 4 | | 1 |
| VIL2 | Chiron cDNA | Breast Cancer | 2Xconcordance | 21.333333 | 2.582 | 25.5 | 4.4609 | 6 |
| | array | | | | | | | |
| WDFY1 | U133 + 2 | Blood/Lymph Carcinoma All Vs Essential Normal | 80-50 Percentile Ratio | 60 | | 2 | | 1 |
| WDFY1 | U133 + 2 | Melanoma All Vs Essential Normal | 80-50 Percentile Ratio | 41 | 0 | 4.5 | 0.7071 | 2 |
| WDFY1 | U133 + 2 | Melanoma All Vs Essential Normal | 80-80 Percentile Ratio | 39 | 0 | 4 | 0 | 2 |
| WDFY1 | U133 + 2 | Ovarian Carcinoma All Vs Essential Normal | 80-50 Percentile Ratio | 72 | | 2 | | 1 |
| WDFY1 | U133 + 2 | Upper Aero-Digestive Tract Carcinoma All Vs Essential Normal | 80-50 Percentile Ratio | 23 | | 2 | | 1 |
| WDFY1 | U133 + 2 | Uterus Carcinoma All Vs Essential Normal | 80-50 Percentile Ratio | 39 | | 2 | | 1 |
| WNT6 | U133A&B | Breast Cancer | 2Xconcordance | 34 | | 41 | | 1 |
| WNT6 | Chiron cDNA | Colon Cancer | 2Xconcordance | 75 | | 29 | | 1 |
| | array | | | | | | | |
| WNT6 | Chiron cDNA | Colon Met | 2Xconcordance | 33 | | 33 | | 1 |
| | array | | | | | | | |
| WNT6 | Chiron cDNA | matched Colon | 2Xconcordance | 36 | | 39 | | 1 |
| | array | | | | | | | |
| WNT6 | Chiron cDNA | matched Colon Met | 2Xconcordance | 36 | | 28 | | 1 |
| | array | | | | | | | |
| ZNF608 | U133A&B | Colon Cancer | 2Xconcordance | 26 | | 42 | | 1 |
| ZNF608 | U133 + 2 | Blood/Lymph Carcinoma All Vs Essential Normal | 80-50 Percentile Ratio | 60 | | 5 | | 1 |
| ZNF608 | U133 + 2 | Renal Carcinoma All Vs Essential Normal | 80-50 Percentile Ratio | 66 | | 3 | | 1 |

[0435] All publications, patents and patent applications cited in this specification are herein incorporated by reference as if each individual publication or patent application were specifically and individually indicated to be incorporated by reference.

[0436] It will be understood that the invention has been described by way of example only and modifications may be made whilst remaining within the scope and spirit of the invention.

1. A method for treating cancer in a patient comprising modulating the level of an expression product of a gene selected from the group consisting of ABCB9, AD026, ADSSL1, ANP32A, ANXA3, ARF3, ARHGEF1, ARID1B, ARMC1, ARPC2, ATP2B4, ATP8B4, BCL11B, BCL2L1, BLK, BLM, BLR1, BRAF, BRPF3, BTNL2, C10orf45, C13orf18, C13orf24, C14orf4, C1orf41, C1orf9, C20orf174, C2orf11, C6orf190, C6orf32, C9orf5, CACNA1D, CACNA1E, CALM2, CCND2, CCRN4L, CD28, CD38, CD3Z, CFTR, CHD7, CHDH, CHIC2, CLEC2D, CLIC1, CNR2, CNTN2, COL19A1, CPNE4, CR1, CREG1, CTSL, CXCR4, CYB5, DAD1, DDR2, DKFZP564J047, DKKL1, DLST, DMBT1, DNAJC6, DNMT3A, DPT, DYM, EGR2, EIF4G3, ENAH, ETV1, F2RL2, F5, FAS, FBN2, FCGR2B, FGF10, FGFR3, FLJ10996, FLJ11155, FLJ14075, FLJ20604, FLJ22800, FLJ23235, FLJ40873, FLJ46156, FNBP1, FOXD3, FZD10, GALNAC4S-6ST, GFI1, GGTA1, GSCL, GSH-2, HAAO, HIVEP3, HMGA1, ICOS, IGF1R, IGF2, IL12A, IL7R, IRF2, ITK, ITPR1, JAK1, JARID2, JDP2, KCNH5, KIAA0261, KIAA0350, KIAA0427, KIAA1040, LCK, LFNG, LMO2, LMO7, LOC145814, LOC340075, LOC401548, LOC64744, LPP, LRFN3, LTB, MAP2K5, MAP3K8, MARLIN1, MATN2, MBNL1, MCM3AP, MCM5, MCOLN3, MED12L, MGC45474, MHC2TA, MR1, MSCP, NCF4, NEDD4L, NEDD9, NEU1, NFKBIZ, NR3C1, NTRK3, OASL, PAP, PDCD1LG2, PDGFRA, PIGM, PPP3CC, PRDM11, PRIM2A, PRKCH, PSMB1, PSMB9, PTP4A2, PTPRK, RAC2, RAI17, RAMP, RGC32, RNASE1, RNPC1, RORC, RREB1, RUNX3, SEC5L1, SELL, SEPT9, SH3MD1, SIAT7C, SLC12A7, SLC1A2, SLC28A2, SLC39A10, SLC41A1, SLCO3A1, SLPI, SOS1, SOX11, SPATA13, SPATA3, SRC, TFEB, THADA, THRB, THSD2, TLE3, TMEFF2, TNFRSF8, TNFSF11, TNFSF8, TNN, TP53I11, TTC15, UBASH3A, USP25, UTS2, VIL2, WDFY1, WNT10B, WNT6, WRNIP1, ZNF31, ZNF608, and ZSCAN2, wherein the cancer is selected from the group consisting of carcinoma, melanoma, colon cancer, and prostate cancer.

2. The method of claim 1 wherein said method comprises administering to the patient an antibody, a nucleic acid, or a polypeptide that modulates the level of said gene expression product.

3. The method according to claim 1 or 2 wherein the expression level of the expression product is upregulated or downregulated by at least a 2-fold change.

4. The method according to any one of claims 1 to 3 wherein the cancer is treated by the inhibition of tumour growth or the reduction of tumour volume.

5. The method according to any one of claims 1 to 4 wherein the cancer is treated by reducing the invasiveness of a cancer cell.

6. The method of claim 1 wherein the expression product is a protein or mRNA.

7. The method according to claim 6, wherein the level of the expression product at a first time point is compared to the level of the same expression product at a second time point, wherein an increase in level of the expression product at the second time point relative to the first time point is indicative of the progression of cancer.

8. The method according to claim 2 wherein the nucleic acid is an oligonucleotide.

9. The method of claim 2 wherein the antibody is a neutralizing antibody.

10. The method of claim 2 wherein the antibody is a monoclonal antibody.

11. The method of claim 2 wherein the antibody is a monoclonal antibody which binds to a polypeptide encoded by said gene with an affinity of at least 1×10⁸ Ka.

12. The method of claim 2 wherein the antibody is a monoclonal antibody, a polyclonal antibody, a chimeric antibody, a human antibody, a humanized antibody, a single-chain antibody, a bi-specific antibody, a multi-specific antibody, or a Fab fragment.

13. A method of treating a cancer in a patient characterized by overexpression of a gene selected from the group consisting of ABCB9, AD026, ADSSL1, ANP32A, ANXA3, ARF3, ARHGEF1, ARID1B, ARMC1, ARPC2, ATP2B4, ATP8B4, BCL11B, BCL2L1, BLK, BLM, BLR1, BRAF, BRPF3, BTNL2, C10orf45, C13orf18, C13orf24, C14orf4, C1orf41, C1orf9, C20orf174, C2orf11, C6orf190, C6orf32, C9orf5, CACNA1D, CACNA1E, CALM2, CCND2, CCRN4L, CD28, CD38, CD3Z, CFTR, CHD7, CHDH, CHIC2, CLEC2D, CLIC1, CNR2, CNTN2, COL19A1, CPNE4, CR1, CREG1, CTSL, CXCR4, CYB5, DAD1, DDR2, DKFZP564J047, DKKL1, DLST, DMBT1, DNAJC6, DNMT3A, DPT, DYM, EGR2, EIF4G3, ENAH, ETV1, F2RL2, F5, FAS, FBN2, FCGR2B, FGF10, FGFR3, FLJ10996, FLJ11155, FLJ14075, FLJ20604, FLJ22800, FLJ23235, FLJ40873, FLJ46156, FNBP1, FOXD3, FZD10, GALNAC4S-6ST, GFI1, GGTA1, GSCL, GSH-2, HAAO, HIVEP3, HMGA1, ICOS, IGF1R, IGF2, IL12A, IL7R, IRF2, ITK, ITPR1, JAK1, JARID2, JDP2, KCNH5, KIAA0261, KIAA0350, KIAA0427, KIAA1040, LCK, LFNG, LMO2, LMO7, LOC145814, LOC340075, LOC401548, LOC64744, LPP, LRFN3, LTB, MAP2K5, MAP3K8, MARLIN1, MATN2, MBNL1, MCM3AP, MCM5, MCOLN3, MED12L, MGC45474, MHC2TA, MR1, MSCP, NCF4, NEDD4L, NEDD9, NEU1, NFKBIZ, NR3C1, NTRK3, OASL, PAP, PDCD1LG2, PDGFRA, PIGM, PPP3CC, PRDM11, PRIM2A, PRKCH, PSMB1, PSMB9, PTP4A2, PTPRK, RAC2, RAI17, RAMP, RGC32, RNASE1, RNPC1, RORC, RREB1, RUNX3, SEC5L1, SELL, SEPT9, SH3MD1, SIAT7C, SLC12A7, SLC1A2, SLC28A2, SLC39A10, SLC41A1, SLCO3A1, SLPI, SOS1, SOX11, SPATA13, SPATA3, SRC, TFEB, THADA, THRB, THSD2, TLE3, TMEFF2, TNFRSF8, TNFSF11, TNFSF8, TNN, TP53I11, TTC15, UBASH3A, USP25, UTS2, VIL2, WDFY1, WNT10B, WNT6, WRNIP1, ZNF31, ZNF608, and ZSCAN2, relative to a control, the method comprising modulating expression of the gene in the patient, wherein the cancer is selected from the group consisting of carcinoma, melanoma, colon cancer, and prostate cancer.

14. The method of claim 13 wherein said method comprises administering to the patient an antibody a nucleic acid, or a polypeptide that inhibits gene expression.

15. A method for diagnosing cancer comprising detecting evidence of differential expression in a patient sample of a gene selected from the group consisting of ABCB9, AD026, ADSSL1, ANP32A, ANXA3, ARF3, ARHGEF1, ARID1B, ARMC1, ARPC2, ATP2B4, ATP8B4, BCL11B, BCL2L1, BLK, BLM, BLR1, BRAF, BRPF3, BTNL2, C10orf45, C13orf18, C13orf24, C14orf4, C1orf41, C1orf9, C20orf174, C2orf11, C6orf190, C6orf32, C9orf5, CACNA1D, CACNA1E, CALM2, CCND2, CCRN4L, CD28, CD38, CD3Z, CFTR, CHD7, CHDH, CHIC2, CLEC2D, CLIC1, CNR2, CNTN2, COL19A1, CPNE4, CR1, CREG1, CTSL, CXCR4, CYB5, DAD1, DDR2, DKFZP564J047, DKKL1, DLST, DMBT1, DNAJC6, DNMT3A, DPT, DYM, EGR2, EIF4G3, ENAH, ETV1, F2RL2, F5, FAS, FBN2, FCGR2B, FGF10, FGFR3, FLJ10996, FLJ11155, FLJ14075, FLJ20604, FLJ22800, FLJ23235, FLJ40873, FLJ46156, FNBP1, FOXD3, FZD10, GALNAC4S-6ST, GFI1, GGTA1, GSCL, GSH-2, HAAO, HIVEP3, HMGA1, ICOS, IGF1R, IGF2, IL12A, IL7R, IRF2, ITK, ITPR1, JAK1, JARID2, JDP2, KCNH5, KIAA0261, KIAA0350, KIAA0427, KIAA1040, LCK, LFNG, LMO2, LMO7, LOC145814, LOC340075, LOC401548, LOC64744, LPP, LRFN3, LTB, MAP2K5, MAP3K8, MARLIN1, MATN2, MBNL1, MCM3AP, MCM5, MCOLN3, MED12L, MGC45474, MHC2TA, MR1, MSCP, NCF4, NEDD4L, NEDD9, NEU1, NFKBIZ, NR3C1, NTRK3, OASL, PAP, PDCD1LG2, PDGFRA, PIGM, PPP3CC, PRDM11, PRIM2A, PRKCH, PSMB1, PSMB9, PTP4A2, PTPRK, RAC2, RAI17, RAMP, RGC32, RNASE1, RNPC1, RORC, RREB1, RUNX3, SEC5L1, SELL, SEPT9, SH3MD1, SIAT7C, SLC12A7, SLC1A2, SLC28A2, SLC39A10, SLC41A1, SLCO3A1, SLPI, SOS1, SOX11, SPATA13, SPATA3, SRC, TFEB, THADA, THRB, THSD2, TLE3, TMEFF2, TNFRSF8, TNFSF11, TNFSF8, TNN, TP53I11, TTC15, UBASH3A, USP25, UTS2, VIL2, WDFY1, WNT10B, WNT6, WRNIP1, ZNF31, ZNF608, and ZSCAN2, wherein evidence of differential expression is diagnostic of cancer, wherein, the cancer is selected from the group consisting of carcinoma, melanoma, colon cancer, and prostate cancer.

16. The method of claim 15 wherein evidence of differential expression is detected by measuring the level of an expression product of the gene.

17. The method of claim 16 wherein the expression product is a protein or mRNA.

18. The method of claim 17 wherein the level of expression of protein is measured using an antibody which specifically binds to a polypeptide encoded by the gene.

19. The method of claim 18 wherein the antibody is linked to an imaging agent.

20. The method of claim 16 wherein the level of expression product of the gene in the patient sample is compared to a control.

21. The method of claim 20 wherein the control is a known normal tissue of the same tissue type as in the patient sample.

22. The method of claim 20 wherein the level of the expression product in the sample is increased relative to the control.

23. A method for detecting a cancerous cell in a patient sample comprising detecting evidence of an expression product of a gene selected from the group consisting of ABCB9, AD026, ADSSL1, ANP32A, ANXA3, ARF3, ARHGEF1, ARID1B, ARMC1, ARPC2, ATP2B4, ATP8B4, BCL11B, BCL2L1, BLK, BLM, BLR1, BRAF, BRPF3, BTNL2, C10orf45, C13orf18, C13orf24, C14orf4, C1orf41, C1orf9, C20orf174, C2orf11, C6orf190, C6orf32, C9orf5, CACNA1D, CACNA1E, CALM2, CCND2, CCRN4L, CD28, CD38, CD3Z, CFTR, CHD7, CHDH, CHIC2, CLEC2D, CLIC1, CNR2, CNTN2, COL19A1, CPNE4, CR1, CREG1, CTSL, CXCR4, CYB5, DAD1, DDR2, DKFZP564J047, DKKL1, DLST, DMBT1, DNAJC6, DNMT3A, DPT, DYM, EGR2, EIF4G3, ENAH, ETV1, F2RL2, F5, FAS, FBN2, FCGR2B, FGF10, FGFR3, FLJ10996, FLJ11155, FLJ14075, FLJ20604, FLJ22800, FLJ23235, FLJ40873, FLJ46156, FNBP1, FOXD3, FZD10, GALNAC4S-6ST, GFI1, GGTA1, GSCL, GSH-2, HAAO, HIVEP3, HMGA1, ICOS, IGF1R, IGF2, IL12A, IL7R, IRF2, ITK, ITPR1, JAK1, JARID2, JDP2, KCNH5, KIAA0261, KIAA0350, KIAA0427, KIAA1040, LCK, LFNG, LMO2, LMO7, LOC145814, LOC340075, LOC401548, LOC64744, LPP, LRFN3, LTB, MAP2K5, MAP3K8, MARLIN1, MATN2, MBNL1, MCM3AP, MCM5, MCOLN3, MED12L, MGC45474, MHC2TA, MR1, MSCP, NCF4, NEDD4L, NEDD9, NEU1, NFKBIZ, NR3C1, NTRK3, OASL, PAP, PDCD1LG2, PDGFRA, PIGM, PPP3CC, PRDM11, PRIM2A, PRKCH, PSMB1, PSMB9, PTP4A2, PTPRK, RAC2, RAI17, RAMP, RGC32, RNASE1, RNPC1, RORC, RREB1, RUNX3, SEC5L1, SELL, SEPT9, SH3MD1, SIAT7C, SLC12A7, SLC1A2, SLC28A2, SLC39A10, SLC41A1, SLCO3A1, SLPI, SOS1, SOX11, SPATA13, SPATA3, SRC, TFEB, THADA, THRB, THSD2, TLE3, TMEFF2, TNFRSF8, TNFSF11, TNFSF8, TNN, TP53I11, TTC15, UBASH3A, USP25, UTS2, VIL2, WDFY1, WNT10B, WNT6, WRNIP1, ZNF31, ZNF608, and ZSCAN2, wherein evidence of expression of the gene in the sample indicates that a cell in the sample is cancerous.

24. The method of claim 23 wherein the cell is a colon or prostate cell.

25. The method of claim 23 wherein evidence of the expression product is detected using an antibody linked to an imaging agent.

26. A method for assessing the progression or cancer in a patient comprising comparing the level of an expression product of a gene selected from the group consisting of ABCB9, AD026, ADSSL1, ANP32A, ANXA3, ARF3, ARHGEF1, ARID1B, ARMC1, ARPC2, ATP2B4, ATP8B4, BCL11B, BCL2L1, BLK, BLM, BLR1, BRAF, BRPF3, BTNL2, C10orf45, C13orf18, C13orf24, C14orf4, C1orf41, C1orf9, C20orf174, C2orf11, C6orf190, C6orf32, C9orf5, CACNA1D, CACNA1E, CALM2, CCND2, CCRN4L, CD28, CD38, CD3Z, CFTR, CHD7, CHDH, CHIC2, CLEC2D, CLIC1, CNR2, CNTN2, COL19A1, CPNE4, CR1, CREG1, CTSL, CXCR4, CYB5, DAD1, DDR2, DKFZP564J047, DKKL1, DLST, DMBT1, DNAJC6, DNMT3A, DPT, DYM, EGR2, EIF4G3, ENAH, ETV1, F2RL2, F5, FAS, FBN2, FCGR2B, FGF10, FGFR3, FLJ10996, FLJ11155, FLJ14075, FLJ20604, FLJ22800, FLJ23235, FLJ40873, FLJ46156, FNBP1, FOXD3, FZD10, GALNAC4S-6ST, GFI1, GGTA1, GSCL, GSH-2, HAAO, HIVEP3, HMGA1, ICOS, IGF1R, IGF2, IL12A, IL7R, IRF2, ITK, ITPR1, JAK1, JARID2, JDP2, KCNH5, KIAA0261, KIAA0350, KIAA0427, KIAA1040, LCK, LFNG, LMO2, LMO7, LOC145814, LOC340075, LOC401548, LOC64744, LPP, LRFN3, LTB, MAP2K5, MAP3K8, MARLIN1, MATN2, MBNL1, MCM3AP, MCM5, MCOLN3, MED12L, MGC45474, MHC2TA, MR1, MSCP, NCF4, NEDD4L, NEDD9, NEU1, NFKBIZ, NR3C1, NTRK3, OASL, PAP, PDCD1LG2, PDGFRA, PIGM, PPP3CC, PRDM11, PRIM2A, PRKCH, PSMB1, PSMB9, PTP4A2, PTPRK, RAC2, RAI17, RAMP, RGC32, RNASE1, RNPC1, RORC, RREB1, RUNX3, SEC5L1, SELL, SEPT9, SH3MD1, SIAT7C, SLC12A7, SLC1A2, SLC28A2, SLC39A10, SLC41A1, SLCO3A1, SLPI, SOS1, SOX11, SPATA13, SPATA3, SRC, TFEB, THADA, THRB, THSD2, TLE3, TMEFF2, TNFRSF8, TNFSF11, TNFSF8, TNN, TP53I11, TTC15, UBASH3A, USP25, UTS2, VIL2, WDFY1, WNT10B, WNT6, WRNIP1, ZNF31, ZNF608, and ZSCAN2, in a biological sample at a first time point to a level of the same expression product at a second time point, wherein a change in the level of the expression product at the second time point relative to the first time point is indicative of the progression of the cancer, wherein the cancer is selected from the group consisting of carcinoma, melanoma, colon cancer, and prostate cancer.

27. A method of diagnosing cancer selected from the group consisting of carcinoma, melanoma, colon cancer, and prostate cancer, the method comprising:
(a) measuring a level of mRNA of a gene selected from the group consisting of ABCB9, AD026, ADSSL1, ANP32A, ANXA3, ARF3, ARHGEF1, ARID1B, ARMC1, ARPC2, ATP2B4, ATP8B4, BCL11B, BCL2L1, BLK, BLM, BLR1, BRAF, BRPF3, BTNL2, C10orf45, C13orf18, C13orf24, C14orf4, C1orf41, C1orf9, C20orf174, C2orf11, C6orf190, C6orf32, C9orf5, CACNA1D, CACNA1E, CALM2, CCND2, CCRN4L, CD28, CD38, CD3Z, CFTR, CHD7, CHDH, CHIC2, CLEC2D, CLIC1, CNR2, CNTN2, COL19A1, CPNE4, CR1, CREG1, CTSL, CXCR4, CYB5, DAD1, DDR2, DKFZP564J047, DKKL1, DLST, DMBT1, DNAJC6, DNMT3A, DPT, DYM, EGR2, EIF4G3, ENAH, ETV1, F2RL2, F5, FAS, FBN2, FCGR2B, FGF10, FGFR3, FLJ10996, FLJ11155, FLJ14075, FLJ20604, FLJ22800, FLJ23235, FLJ40873, FLJ46156, FNBP1, FOXD3, FZD10, GALNAC4S-6ST, GFI1, GGTA1, GSCL, GSH-2, HAAO, HIVEP3, HMGA1, ICOS, IGF1R, IGF2, IL12A, IL7R, IRF2, ITK, ITPR1, JAK1, JARID2, JDP2, KCNH5, KIAA0261, KIAA0350, KIAA0427, KIAA1040, LCK, LFNG, LMO2, LMO7, LOC145814, LOC340075, LOC401548, LOC64744, LPP, LRFN3, LTB, MAP2K5, MAP3K8, MARLIN1, MATN2, MBNL1, MCM3AP, MCM5, MCOLN3, MED12L, MGC45474, MHC2TA, MR1, MSCP, NCF4, NEDD4L, NEDD9, NEU1, NFKBIZ, NR3C1, NTRK3, OASL, PAP, PDCD1LG2, PDGFRA, PIGM, PPP3CC, PRDM11, PRIM2A, PRKCH, PSMB1, PSMB9, PTP4A2, PTPRK, RAC2, RAI17, RAMP, RGC32, RNASE1, RNPC1, RORC, RREB1, RUNX3, SEC5L1, SELL, SEPT9, SH3MD1, SIAT7C, SLC12A7, SLC1A2, SLC28A2, SLC39A10, SLC41A1, SLCO3A1, SLPI, SOS1, SOX11, SPATA13, SPATA3, SRC, TFEB, THADA, THRB, THSD2, TLE3, TMEFF2, TNFRSF8, TNFSF11, TNFSF8, TNN, TP53I11, TTC15, UBASH3A, USP25, UTS2, VIL2, WDFY1, WNT10B, WNT6, WRNIP1, ZNF31, ZNF608, and ZSCAN2, in a first sample, said first sample comprising a first tissue type of a first individual; and
(b) comparing the level of the mRNA in (a) to:
(1) a level of the mRNA in a second sample, said second sample comprising a normal tissue type of said firs individual, or
(2) a level of the mRNA in a third sample, said third sample comprising a normal tissue type from an unaffected individual;
wherein at least a two fold difference between the level of mRNA in (a) and the level of the mRNA in the second sample or the third sample indicates that the first individual has or is predisposed to cancer.

28. The method of claim 27 wherein at least a three fold difference between the level of mRNA in (a) and the level of the mRNA in the second sample or the third sample indicates that the first individual has or is predisposed to cancer.

29. A method of screening for anti-cancer activity comprising:
(a) contacting a cell that expresses a gene selected from the group consisting of ABCB9, AD026, ADSSL1, ANP32A, ANXA3, ARF3, ARHGEF1, ARID1B, ARMC1, ARPC2, ATP2B4, ATP8B4, BCL11B, BCL2L1, BLK, BLM, BLR1, BRAF, BRPF3, BTNL2, C10orf45, C13orf18, C13orf24, C14orf4, C1orf41, C1orf9, C20orf174, C2orf11, C6orf190, C6orf32, C9orf5, CACNA1D, CACNA1E, CALM2, CCND2, CCRN4L, CD28, CD38, CD3Z, CFTR, CHD7, CHDH, CHIC2, CLEC2D, CLIC1, CNR2, CNTN2, COL19A1, CPNE4, CR1, CREG1, CTSL, CXCR4, CYB5, DAD1, DDR2, DKFZP564J047, DKKL1, DLST, DMBT1, DNAJC6, DNMT3A, DPT, DYM, EGR2, EIF4G3, ENAH, ETV1, F2RL2, F5, FAS, FBN2, FCGR2B, FGF10, FGFR3, FLJ10996, FLJ11155, FLJ14075, FLJ20604, FLJ22800, FLJ23235, FLJ40873, FLJ46156, FNBP1, FOXD3, FZD10, GALNAC4S-6ST, GFI1, GGTA1, GSCL, GSH-2, HAAO, HIVEP3, HMGA1, ICOS, IGF1R, IGF2, IL12A, IL7R, IRF2, ITK, ITPR1, JAK1, JARID2, JDP2, KCNH5, KIAA0261, KIAA0350, KIAA0427, KIAA1040, LCK, LFNG, LMO2, LMO7, LOC145814, LOC340075, LOC401548, LOC64744, LPP, LRFN3, LTB, MAP2K5, MAP3K8, MARLIN1, MATN2, MBNL1, MCM3AP, MCM5, MCOLN3, MED12L, MGC45474, MHC2TA, MR1, MSCP, NCF4, NEDD4L, NEDD9, NEU1, NFKBIZ, NR3C1, NTRK3, OASL, PAP, PDCD1LG2, PDGFRA, PIGM, PPP3CC, PRDM11, PRIM2A, PRKCH, PSMB1, PSMB9, PTP4A2, PTPRK, RAC2, RAI17, RAMP, RGC32, RNASE1, RNPC1, RORC, RREB1, RUNX3, SEC5L1, SELL, SEPT9, SH3MD1, SIAT7C, SLC12A7, SLC1A2, SLC28A2, SLC39A10, SLC41A1, SLCO3A1, SLPI, SOS1, SOX11, SPATA13, SPATA3, SRC, TFEB, THADA, THRB, THSD2, TLE3, TMEFF2, TNFRSF8, TNFSF11, TNFSF8, TNN, TP53I11, TTC15, UBASH3A, USP25, UTS2, VIL2, WDFY1, WNT10B, WNT6, WRNIP1, ZNF31, ZNF608, and ZSCAN2, with a candidate anti-cancer agent; and
(b) detecting at least a two fold difference between the level of gene expression in the cell in the presence and in the absence of the candidate anti-cancer agent,
wherein at least a two fold difference between the level of gene expression in the cell in the presence and in the absence of the candidate anti-cancer agent indicates that the candidate anti-cancer agent has anti-cancer activity, wherein the cancer is selected from the group consisting of carcinoma, melanoma, colon cancer, and prostate cancer.

30. The method of claim 29 wherein at least a three fold difference between the level of gene expression in the cell in the presence and in the absence of the candidate anti-cancer agent indicates that the candidate anti-cancer agent has anti-cancer activity.

31. The method of claim 29 wherein the candidate anti-cancer agent is an antibody, small organic compound, small inorganic compound, or polynucleotide.

32. The method of claim 31 wherein the polynucleotide is an antisense oligonucleotide.

33. A method for identifying a patient as susceptible to treatment with an antibody that binds to an expression product of a gene selected from the group consisting of ABCB9, AD026, ADSSL1, ANP32A, ANXA3, ARF3, ARHGEF1, ARID1B, ARMC1, ARPC2, ATP2B4, ATP8B4, BCL11B, BCL2L1, BLK, BLM, BLR1, BRAF, BRPF3, BTNL2, C10orf45, C13orf18, C13orf24, C14orf4, C1orf41, C1orf9, C20orf174, C2orf11, C6orf190, C6orf32, C9orf5, CACNA1D, CACNA1E, CALM2, CCND2, CCRN4L, CD28, CD38, CD3Z, CFTR, CHD7, CHDH, CHIC2, CLEC2D, CLIC1, CNR2, CNTN2, COL19A1, CPNE4, CR1, CREG1, CTSL, CXCR4, CYB5, DAD1, DDR2, DKFZP564J047, DKKL1, DLST, DMBT1, DNAJC6, DNMT3A, DPT, DYM, EGR2, EIF4G3, ENAH, ETV1, F2RL2, F5, FAS, FBN2, FCGR2B, FGF10, FGFR3, FLJ10996, FLJ11155, FLJ14075, FLJ20604, FLJ22800, FLJ23235, FLJ40873, FLJ46156, FNBP1, FOXD3, FZD10, GALNAC4S-6ST, GFI1, GGTA1, GSCL, GSH-2, HAAO, HIVEP3, HMGA1, ICOS, IGF1R, IGF2, IL12A, IL7R, IRF2, ITK, ITPR1, JAK1, JARID2, JDP2, KCNH5, KIAA0261, KIAA0350, KIAA0427, KIAA1040, LCK, LFNG, LMO2, LMO7, LOC145814, LOC340075, LOC401548, LOC64744, LPP, LRFN3, LTB, MAP2K5, MAP3K8, MARLIN1, MATN2, MBNL1, MCM3AP, MCM5, MCOLN3, MED12L, MGC45474, MHC2TA, MR1, MSCP, NCF4, NEDD4L, NEDD9, NEU1, NFKBIZ, NR3C1, NTRK3, OASL, PAP, PDCD1LG2, PDGFRA, PIGM, PPP3CC, PRDM11, PRIM2A, PRKCH, PSMB1, PSMB9, PTP4A2, PTPRK, RAC2, RAI17, RAMP, RGC32, RNASE1, RNPC1, RORC, RREB1, RUNX3, SEC5L1, SELL, SEPT9, SH3MD1, SIAT7C, SLC12A7, SLC1A2, SLC28A2, SLC39A10, SLC41A1, SLCO3A1, SLPI, SOS1, SOX11, SPATA13, SPATA3, SRC, TFEB, THADA, THRB, THSD2, TLE3, TMEFF2, TNFRSF8, TNFSF11, TNFSF8, TNN, TP53I11, TTC15, UBASH3A, USP25, UTS2, VIL2, WDFY1, WNT10B, WNT6, WRNIP1, ZNF31, ZNF608, and ZSCAN2, comprising measuring the level of the expression product of the gene in a biological sample from that patient.

34. A kit for the diagnosis or detection of cancer in a mammal, wherein said kit comprises an antibody or fragment thereof, or an immunoconjugate or fragment thereof, according to any one of the proceeding embodiments, wherein said antibody or fragment specifically binds a tumor cell antigen of a gene selected from the group consisting of ABCB9, AD026, ADSSL1, ANP32A, ANXA3, ARF3, ARHGEF1, ARID1B, ARMC1, ARPC2, ATP2B4, ATP8B4, BCL11B, BCL2L1, BLK, BLM, BLR1, BRAF, BRPF3, BTNL2, C10orf45, C13orf18, C13orf24, C14orf4, C1orf41, C1orf9, C20orf174, C2orf11, C6orf190, C6orf32, C9orf5, CACNA1D, CACNA1E, CALM2, CCND2, CCRN4L, CD28, CD38, CD3Z, CFTR, CHD7, CHDH, CHIC2, CLEC2D, CLIC1, CNR2, CNTN2, COL19A1, CPNE4, CR1, CREG1, CTSL, CXCR4, CYB5, DAD1, DDR2, DKFZP564J047, DKKL1, DLST, DMBT1, DNAJC6, DNMT3A, DPT, DYM, EGR2, EIF4G3, ENAH, ETV1, F2RL2, F5, FAS, FBN2, FCGR2B, FGF10, FGFR3, FLJ10996, FLJ11155, FLJ14075, FLJ20604, FLJ22800, FLJ23235, FLJ40873, FLJ46156, FNBP1, FOXD3, FZD10, GALNAC4S-6ST, GFI1, GGTA1, GSCL, GSH-2, HAAO, HIVEP3, HMGA1, ICOS, IGF1R, IGF2, IL12A, IL7R, IRF2, ITK, ITPR1, JAK1, JARID2, JDP2, KCNH5, KIAA0261, KIAA0350, KIAA0427, KIAA1040, LCK, LFNG, LMO2, LMO7, LOC145814, LOC340075, LOC401548, LOC64744, LPP, LRFN3, LTB, MAP2K5, MAP3K8, MARLIN1, MATN2, MBNL1, MCM3AP, MCM5, MCOLN3, MED12L, MGC45474, MHC2TA, MR1, MSCP, NCF4, NEDD4L, NEDD9, NEU1, NFKBIZ, NR3C1, NTRK3, OASL, PAP, PDCD1LG2, PDGFRA, PIGM, PPP3CC, PRDM11, PRIM2A, PRKCH, PSMB1, PSMB9, PTP4A2, PTPRK, RAC2, RAI17, RAMP, RGC32, RNASE1, RNPC1, RORC, RREB1, RUNX3, SEC5L1, SELL, SEPT9, SH3MD1, SIAT7C, SLC12A7, SLC1A2, SLC28A2, SLC39A10, SLC41A1, SLCO3A1, SLPI, SOS1, SOX11, SPATA13, SPATA3, SRC, TFEB, THADA, THRB, THSD2, TLE3, TMEFF2, TNFRSF8, TNFSF11, TNFSF8, TNN, TP53I11, TTC15, UBASH3A, USP25, UTS2, VIL2, WDFY1, WNT10B, WNT6, WRNIP1, ZNF31, ZNF608, and ZSCAN2, one or more reagents for detecting a binding reaction between said antibody and said tumor cell antigen; and optionally instructions for using the kit, wherein the cancer is selected from the group consisting of carcinoma, melanoma, colon cancer and prostate cancer.

35. A kit for diagnosing cancer comprising a nucleic acid probe that hybridises under stringent conditions to a gene selected from the group consisting of ABCB9, AD026, ADSSL1, ANP32A, ANXA3, ARF3, ARHGEF1, ARID1B, ARMC1, ARPC2, ATP2B4, ATP8B4, BCL11B, BCL2L1, BLK, BLM, BLR1, BRAF, BRPF3, BTNL2, C10orf45, C13orf18, C13orf24, C14orf4, C1orf41, C1orf9, C20orf174, C2orf11, C6orf190, C6orf32, C9orf5, CACNA1D, CACNA1E, CALM2, CCND2, CCRN4L, CD28, CD38, CD3Z, CFTR, CHD7, CHDH, CHIC2, CLEC2D, CLIC1, CNR2, CNTN2, COL19A1, CPNE4, CR1, CREG1, CTSL, CXCR4, CYB5, DAD1, DDR2, DKFZP564J047, DKKL1, DLST, DMBT1, DNAJC6, DNMT3A, DPT, DYM, EGR2, EIF4G3, ENAH, ETV1, F2RL2, F5, FAS, FBN2, FCGR2B, FGF10, FGFR3, FLJ10996, FLJ11155, FLJ14075, FLJ20604, FLJ22800, FLJ23235, FLJ40873, FLJ46156, FNBP1, FOXD3, FZD10, GALNAC4S-6ST, GFI1, GGTA1, GSCL, GSH-2, HAAO, HIVEP3, HMGA1, ICOS, IGF1R, IGF2, IL12A, IL7R, IRF2, ITK, ITPR1, JAK1, JARID2, JDP2, KCNH5, KIAA0261, KIAA0350, KIAA0427, KIAA1040, LCK, LFNG, LMO2, LMO7, LOC145814, LOC340075, LOC401548, LOC64744, LPP, LRFN3, LTB, MAP2K5, MAP3K8, MARLIN1, MATN2, MBNL1, MCM3AP, MCM5, MCOLN3, MED12L, MGC45474, MHC2TA, MR1, MSCP, NCF4, NEDD4L, NEDD9, NEU1, NFKBIZ, NR3C1, NTRK3, OASL, PAP, PDCD1LG2, PDGFRA, PIGM, PPP3CC, PRDM11, PRIM2A, PRKCH, PSMB1, PSMB9, PTP4A2, PTPRK, RAC2, RAI17, RAMP, RGC32, RNASE1, RNPC1, RORC, RREB1, RUNX3, SEC5L1, SELL, SEPT9, SH3MD1, SIAT7C, SLC12A7, SLC1A2, SLC28A2, SLC39A10, SLC41A1, SLCO3A1, SLPI, SOS1, SOX11, SPATA13, SPATA3, SRC, TFEB, THADA, THRB, THSD2, TLE3, TMEFF2, TNFRSF8, TNFSF11, TNFSF8, TNN, TP53111, TTC15, UBASH3A, USP25, UTS2, VIL2, WDFY1, WNT10B, WNT6, WRNIP1, ZNF31, ZNF608, and ZSCAN2; primers for amplifying the gene; and optionally instructions for using the kit, wherein the cancer is selected from the group consisting of carcinoma, melanoma, colon cancer, and prostate cancer.

36. A composition comprising one or more antibodies or oligonucleotides specific for an expression product of a gene selected from the group consisting of ABCB9, AD026, ADSSL1, ANP32A, ANXA3, ARF3, ARHGEF1, ARID1B, ARMC1, ARPC2, ATP2B4, ATP8B4, BCL11B, BCL2L1, BLK, BLM, BLR1, BRAF, BRPF3, BTNL2, C10orf45, C13orf18, C13orf24, C14orf4, C1orf41, C1orf9, C20orf174, C2orf11, C6orf190, C6orf32, C9orf5, CACNA1D, CACNA1E, CALM2, CCND2, CCRN4L, CD28, CD38, CD3Z, CFTR, CHD7, CHDH, CHIC2, CLEC2D, CLIC1, CNR2, CNTN2, COL19A1, CPNE4, CR1, CREG1, CTSL, CXCR4, CYB5, DAD1, DDR2, DKFZP564J047, DKKL1, DLST, DMBT1, DNAJC6, DNMT3A, DPT, DYM, EGR2, EIF4G3, ENAH, ETV1, F2RL2, F5, FAS, FBN2, FCGR2B, FGF10, FGFR3, FLJ10996, FLJ11155, FLJ14075, FLJ20604, FLJ22800, FLJ23235, FLJ40873, FLJ46156, FNBP1, FOXD3, FZD10, GALNAC4S-6ST, GFI1, GGTA1, GSCL, GSH-2, HAAO, HIVEP3, HMGA1, ICOS, IGF1R, IGF2, IL12A, IL7R, IRF2, ITK, ITPR1, JAK1, JARID2, JDP2, KCNH5, KIAA0261, KIAA0350, KIAA0427, KIAA1040, LCK, LFNG, LMO2, LMO7, LOC145814, LOC340075, LOC401548, LOC64744, LPP, LRFN3, LTB, MAP2K5, MAP3K8, MARLIN1, MATN2, MBNL1, MCM3AP, MCM5, MCOLN3, MED12L, MGC45474, MHC2TA, MR1, MSCP, NCF4, NEDD4L, NEDD9, NEU1, NFKBIZ, NR3C1, NTRK3, OASL, PAP, PDCD1LG2, PDGFRA, PIGM, PPP3CC, PRDM11, PRIM2A, PRKCH, PSMB1, PSMB9, PTP4A2, PTPRK, RAC2, RAI17, RAMP, RGC32, RNASE1, RNPC1, RORC, RREB1, RUNX3, SEC5L1, SELL, SEPT9, SH3MD1, SIAT7C, SLC12A7, SLC1A2, SLC28A2, SLC39A10, SLC41A1, SLCO3A1, SLPI, SOS1, SOX11, SPATA13, SPATA3, SRC, TFEB, THADA, THRB, THSD2, TLE3, TMEFF2, TNFRSF8, TNFSF11, TNFSF8, TNN, TP53I11, TTC15, UBASH3A, USP25, UTS2, VIL2, WDFY1, WNT10B, WNT6, WRNIP1, ZNF31, ZNF608, and ZSCAN2.

37. The composition of claim 36 further comprising a conventional cancer.

38. The composition of claim 36 further comprising a pharmaceutically acceptable excipient.

39. The method of any one of claims 1, 15, 26, 27 or 29 wherein the carcinoma is selected from the group consisting of renal carcinoma, bladder carcinoma, lymphatic carcinoma, liver carcinoma, ovarian carcinoma, upper aero-digestive tract carcinoma, uterus carcinoma, gastrointestinal tract carcinoma, stomach carcinoma, lung carcinoma and pancreas carcinoma.

40. The kit of claim 34 wherein the carcinoma is selected from the group consisting of renal carcinoma, bladder carcinoma, lymphatic carcinoma, liver carcinoma, ovarian carcinoma, upper aero-digestive tract carcinoma, uterus carcinoma, gastrointestinal tract carcinoma, stomach carcinoma, lung carcinoma and pancreas carcinoma.

41. The composition of claim 35 wherein the carcinoma is selected from the group consisting of renal carcinoma, bladder carcinoma, lymphatic carcinoma, liver carcinoma, ovarian carcinoma, upper aero-digestive tract carcinoma, uterus carcinoma, gastrointestinal tract carcinoma, stomach carcinoma, lung carcinoma and pancreas carcinoma.

42. A method for treating a cancer metastasis in a patient comprising modulating the level of an expression product of a gene selected from the group consisting of ABCB9, AD026, ADSSL1, ANP32A, ANXA3, ARF3, ARHGEF1, ARID1B, ARMC1, ARPC2, ATP2B4, ATP8B4, BCL11B, BCL2L1, BLK, BLM, BLR1, BRAF, BRPF3, BTNL2, C10orf45, C13orf18, C13orf24, C14orf4, C1orf41, C1orf9, C20orf174, C2orf11, C6orf190, C6orf32, C9orf5, CACNA1D, CACNA1E, CALM2, CCND2, CCRN4L, CD28, CD38, CD3Z, CFTR, CHD7, CHDH, CHIC2, CLEC2D, CLIC1, CNR2, CNTN2, COL19A1, CPNE4, CR1, CREG1, CTSL, CXCR4, CYB5, DAD1, DDR2, DKFZP564J047, DKKL1, DLST, DMBT1, DNAJC6, DNMT3A, DPT, DYM, EGR2, EIF4G3, ENAH, ETV1, F2RL2, F5, FAS, FBN2, FCGR2B, FGF10, FGFR3, FLJ10996, FLJ11155, FLJ14075, FLJ20604, FLJ22800, FLJ23235, FLJ40873, FLJ46156, FNBP1, FOXD3, FZD10, GALNAC4S-6ST, GFI1, GGTA1, GSCL, GSH-2, HAAO, HIVEP3, HMGA1, ICOS, IGF1R, IGF2, IL12A, IL7R, IRF2, ITK, ITPR1, JAK1, JARID2, JDP2, KCNH5, KIAA0261, KIAA0350, KIAA0427, KIAA1040, LCK, LFNG, LMO2, LMO7, LOC145814, LOC340075, LOC401548, LOC64744, LPP, LRFN3, LTB, MAP2K5, MAP3K8, MARLIN1, MATN2, MBNL1, MCM3AP, MCM5, MCOLN3, MED12L, MGC45474, MHC2TA, MR1, MSCP, NCF4, NEDD4L, NEDD9, NEU1, NFKBIZ, NR3C1, NTRK3, OASL, PAP, PDCD1LG2, PDGFRA, PIGM, PPP3CC, PRDM11, PRIM2A, PRKCH, PSMB1, PSMB9, PTP4A2, PTPRK, RAC2, RAI17, RAMP, RGC32, RNASE1, RNPC1, RORC, RREB1, RUNX3, SEC5L1, SELL, SEPT9, SH3MD1, SIAT7C, SLC12A7, SLC1A2, SLC28A2, SLC39A10, SLC41A1, SLCO3A1, SLPI, SOS1, SOX11, SPATA13, SPATA3, SRC, TFEB, THADA, THRB, THSD2, TLE3, TMEFF2, TNFRSF8, TNFSF11, TNFSF8, TNN, TP53I11, TTC15, UBASH3A, USP25, UTS2, VIL2, WDFY1, WNT10B, WNT6, WRNIP1, ZNF31, ZNF608, and ZSCAN2.

43. A method for diagnosing a cancer metastasis comprising detecting evidence of differential expression in a patient sample of a gene selected from the group Consisting of ABCB9, AD026, ADSSL1, ANP32A, ANXA3, ARF3, ARHGEF1, ARID1B, ARMC1, ARPC2, ATP2B4, ATP8B4, BCL11B, BCL2L1, BLK, BLM, BLR1, BRAF, BRPF3, BTNL2, C10orf45, C13orf18, C13orf24, C14orf4, C1orf41, C1orf9, C20orf174, C2orf11, C6orf190, C6orf32, C9orf5, CACNA1D, CACNA1E, CALM2, CCND2, CCRN4L, CD28, CD38, CD3Z, CFTR, CHD7, CHDH, CHIC2, CLEC2D, CLIC1, CNR2, CNTN2, COL19A1, CPNE4, CR1, CREG1, CTSL, CXCR4, CYB5, DAD1, DDR2, DKFZP564J047, DKKL1, DLST, DMBT1, DNAJC6, DNMT3A, DPT, DYM, EGR2, EIF4G3, ENAH, ETV1, F2RL2, F5, FAS, FBN2, FCGR2B, FGF10, FGFR3, FLJ10996, FLJ11155, FLJ14075, FLJ20604, FLJ22800, FLJ23235, FLJ40873, FLJ46156, FNBP1, FOXD3, FZD10, GALNAC4S-6ST, GFI1, GGTA1, GSCL, GSH-2, HAAO, HIVEP3, HMGA1, ICOS, IGF1R, IGF2, IL12A, IL7R, IRF2, ITK, ITPR1, JAK1, JARID2, JDP2, KCNH5, KIAA0261, KIAA0350, KIAA0427, KIAA1040, LCK, LFNG, LMO2, LMO7, LOC145814, LOC340075, LOC401548, LOC64744, LPP, LRFN3, LTB, MAP2K5, MAP3K8, MARLIN1, MATN2, MBNL1, MCM3AP, MCM5, MCOLN3, MED12L, MGC45474, MHC2TA, MR1, MSCP, NCF4, NEDD4L, NEDD9, NEU1, NFKBIZ, NR3C1, NTRK3, OASL, PAP, PDCD1LG2, PDGFRA, PIGM, PPP3CC, PRDM11, PRIM2A, PRKCH, PSMB1, PSMB9, PTP4A2, PTPRK, RAC2, RAI17, RAMP, RGC32, RNASE1, RNPC1, RORC, RREB1, RUNX3, SEC5L1, SELL, SEPT9, SH3MD1, SIAT7C, SLC12A7, SLC1A2, SLC28A2, SLC39A10, SLC41A1, SLCO3A1, SLPI, SOS1, SOX11, SPATA13, SPATA3, SRC, TFEB, THADA, THRB, THSD2, TLE3, TMEFF2, TNFRSF8, TNFSF11, TNFSF8, TNN, TP53I11, TTC15, UBASH3A, USP25, UTS2, VIL2, WDFY1, WNT10B, WNT6, WRNIP1, ZNF31, ZNF608, and ZSCAN2, wherein evidence of differential expression is diagnostic of a cancer metastasis.

44. The method of any one of claims 42 or 43 wherein the cancer metastasis is a colon metastasis.

The application's sequence listing, which the Patent Office published only in electronic form, follows.

SEQUENCE LISTING (1821 sequences)

SEQ ID NO: 1 - DNA, 57889 bp, Mus musculus
  misc_feature (1)...(57889): n = a,t,c or g
gcacaaaatcactcccacccattccttaaagtaagaaaaagcagaggtaagccaagaggtaaaattgccaacaatgatgggttctattcgagttccattgaggcttaaaacctggcattagatgtaaagaattgaggaatcatcatgcatcaacagcatggtttcaggaacacagagctcttcagttctcactagtggaagcacccccagccacaggaacatccatgtcctcatagctctgcttgttttaaattgctctggtcagccgctctgcgacccacagctgttgtcgatgatcctggggaaacaaacgaacagaccctctcgcccacgtcaacaccagtgggcaatgatttccacgcccttatgacaatctgattcacctgctcaaacacctgcactggatatcctgtctgttattgtgcaaagcgaccttgatcaagcagcatatctctatcccatgctggatttcctgcagcagagttagccgctgcctgttcatttgcaaattcaacaaggaaggctttccaatctaaatactgcccaggtgaaaggcatgcctttaccaagcctgcccaatcggacggcgtcatgcagtgtctattcaatgcctctacttgagccacagtataggaggcagttaagccgtatatctgcacagactcagccaaattcctgattactttgaaatctagaggctcatgatatctctgccctgcttggtcagtggaaataggacatcccagcaaggagaaactaacctctctccaaacctccagacagaaggtccgcctataggtggctgccgaggaggcatagggagggggcgcagaagctaattcaccttcctcctctgcctcggctcttttgttttgtcctttctgtccacctgataacactgtgtctcctttctttttcctttttctttttaagcccttctcctcttccgacgtactttcttgttgctctgtaagaattttctgacctgtcttgactgcctctacacacagtttcaaacagtaacagagtccatatatcagaacaaacaagaccaaaactatcagacctacccacaaagggtcaatgggagaaaaaagcataactcatgaaccttaagttgtcccaaagccgggaaccttatcgtctcaatcccttctttccttctctctttcccttctctccttcctttctgtcctttcttttctttctttcccttcctttcctttcctttcctttcctttcccttttcctttcctttccttcactatttccttttctttatcactgattcctttcattttcctcccttttcttttccttttttaaaaaaacatatccccctttaacccagggatcaatttgtgagacttaccggtaccaccgttcctcagctgaagagttctgaatccacgcagtcagatccttctcagcagtctgtttgcaagaacacttcattaccaccattccccagctgaacagttctgaatccatgccggatccttctcagcagtctggtttatgggaacactttattaagcgctccttcccctcgatgtagttctgaatcctccctgtagcagggggtcttcgctcttgcctgaagatgtttctttacccgggtttcggcaccacttcttgtgcgccccctgactcgccagcaagaaccacactgcaacaggatccttctgcacacgtttattgggagagcttgattgccgaggcaaagagacaccaagcccagaactagtgctgcttatataggcctaggagaggcatgtctcacacccggattggttatgcatgggttatgcttaccacctcatttgcatttctcacatctgattggttaacatgtctctcatctgattggttaacttgtctctcatctgattggttaattctcaaaacctcatcttggcaaaaaaaaaaaaaaaaacctttactgcctatgtatgcgtggtagccagcgccatcctgcaacagcacatgtggcttcccacaggaaggttgtccacaccagcaatcatcacaagcctgatcagaaatggtagcattaactagatagctatgacaaattccacaagccagcataaagtcagatctgtctgggatggcacgagtttaaaaatcagttcctaaaatgtctttcaacttgtgtagacaacttttctctgcctgccacaaatgttcattatctttactctgagggccttttccatgtggtcagtcagctccaacaaggcagcattcagtggcacaggagcatgcctgggtcttcttctgttttcatagatacctcatcccctaatgcaattgtttctcactattgccctttaagctgcactttgaatacccagatctcatccatttattccatagcatccaaaaatgctttcagtgattctcatgctgccaaaacctcactctgaatgcttactggaagtccatggtatctaggaaacaggtaagggagctgtttcttagggtcattaatgatgaaacatcatgatcaaaggcaacgtgcaggggaaagggtttgtttggcttacaaatcctgaatcaccatccactgagggaagccaagacaggaagtcaaactgggtgagaacctggaggcagaagctgaagcagaggccatgaagagatgctgctcactggcttgctcagcctgctttcctatagcattcaggaccctctgcctgagggatggcaccatcctcaatgggtgaggcctcctctaacaattattaattaagaaaatgccctacaggcttgcctaaagccccattatatggagctgatttctcagctgaagctcccttctttcagatgactatagcttgtctcaagttgacctataacttgtactgtaagatcgagaatcgacaaatgggacctaatgaaactccaaagtttctgcaaggcaaaagacaccgtcaataagacaaaaagaccaccaacagattgggaaaggatctttacctatcctaaatcagataggggactaatatccaacatatataaagaactcaagaaggtggacttcagaaaatcaaataaccccattaaaaaatggggctcagaactgaacaaagaattctcacctgaggaataccgaatgcagatctcagatctcatccatttattccatagcatccaaaaatgctttcagtgattctcatgctgccaaaacctcactctgaatgcttactggaagtccatggtatctaggaaacaggtaagggagctgtttcttagggtcattaatgatgaaacatcatgatcaaaggcaacgtgcaggggaaagggtttgttagcatgcaccagctaactgtaaaagccaagaaacaatgtgttggttcggagggcatttaaacttggagtaagatgttgtccactagaagcatcctctggttttaacttaacatcactgaggtaggtatccacccatagaagtttatcccaaccacagctcctgtctctagaataagccagtgaggtgaagagagagtgcctgaggttccaaaagccatcttaaactccataaagctcattagaccagagcctgctgcattttctgttagactgtttgatgggttccatttaatattgctcacaggtgccaagcacataggaaccctttgttcttcagttgtaaatctctgggcaacagtattacgaaatggaggcttcttccctgagccaaggaatctttcataggctattttcttggagcacttgatgtcctgggagcctcaagaggctttcattggggtctgaacttgaaaatggggcaatttggcatatgccttcactcaaatgcattaatattgatttatctgttcatactttttaatgggtgaaaatctgtatcaatcaatacttgttttgatattcaacttacccttatttggcccagagaaaacctttcaaactgacttcattctcctttggttctctgagcacttccttggtagctgctctaaatgttccatgtgcaacctgctgttcccatgctccagtgctggagccaggtgtttcttcaggggtcttgatgtcctttagtgaagcattcagtatgtagaagccaagattcagatgctgagtgtgctcattgttataggcaggtaagttaactgctctaaggcccctcagaggacagtgtcaagcagtgtctctctctctctctctctctctctctctctctttctctctctctctctcgtgtgtgtgtgtgtgtgtgtgtgtgtgtgtgtgtgtgtgtgtgcatgtctctgtgtgtttcggtatgtgtaagtcttccttatctcttacttctatacatgtctgtgtttcttgaaaactacaggttccaacaagccattctcattcaaatgcagaagctcagactttacaatatttctcttttgcacttctccaattcccctttccagtgaaatttcaattaaactgagtaagcctgtgtacagtcagtctcctaatgccactgctgtgtctcctgcttgactatcttctcagcctcctgggcactggaactccccaccacacagcccctctgcctcatgtccccattgttccttaatgactttaggattgtcttgttatgaatggaaaggatgtaggggataaacttctaaactttgtgaatggaggctgggactatagcttactgttggagcacttgctaggatgtatgagcaccccagcactattaaaaatgaaactaaataatatgcatgcatgatgaagatgaggggatagaaaggacagtatggtaacaaaaatatggttagataagaggaatcagctttgatattccatggcatggtaggaaggctacaattaccaataatttactatctatttcgaatagccaaatgtgccagatagtttttgtcaacttggcacaagccaggaacatctgggaaggaggaacttcaagtgataaaatgtctccatcaggctggcctgtaggcaaatctgtgggatatttccttaattaacgatgggtgtggaagggtcagctcactgtgggcggtgctccccatggggaagtagcccaagtgctcagaaagcaggctgaacaagccatagggagcaaaccaacaaacagcatcactctgtttctttacctgtgggttctgtttatctcattccttccctgacttcctgtcctgtcttccccatggtggactgtgacctgggagttgtaagaggaagtaaagactatcttccctcaagttacttctggccacgttccttatcactgcgacagaaacccagataggccaccaaaagatagaattttttttatattcttaaaagttttaaaggtatccaggtgtggtggctcacacctttgatcccagcactcaggttgcagatctctgtaagttgaggccagcctggcctacaaagtgagtccagggcagccagagatattacacagattaaccttgtcttgaaacaccaaaaatgtagttaatattaattgatttttattaattatcattcatgggtattaattatcagttgatgaaattataaatgatgtgttgttttattatcaatcagttcattgattaattgactaatagtaattaacacctttgttcattcagttcccagagaaaagacaaaaaacctttttgtttataataagccttaacagcactagagctgggcagatatcaaccctctgtgctattttgtctacttccctgtcaataaccccgagttataacttgccatgttctgtctgggactctcttaactccaactagtcagccctcgtggccatgttttcacacagtgccttctctgctctccttatctccctcccttctcgggtgtggtctctgccttaggcccaaagcctggcaaacaaagtcccccttccatgtcttctgcccagctacagtctataggcatctttattcaccagtcagggagaacttggagtcaaggttacatagcatcacttggtatatgcaaggatctattcacccctgggggcaaggagaccatggaggccagtatttagcattataacacatagtaacagatcaaactggacctaaattctacacaaaaatgaataaataattaaatgtaatggtaaaattttaagatgatgaattttctaactactctgaattgatcattacacactatgagcatgtgtttcataattgtgtataattaatagcatattaattaattatatattagggattaaagccatgtgtcaccgtgcctggttgattgactgatgttgattcctgggaccctccctatcttctggatttttctttccaatttctctttgtttgccttttaaatgctggttctgtccattctcctttgtcaagcagattttttattctttttttttctttctttttaaaatatacttgatttagaaccttgttttatttaaatgtgctcttcatgttacaggacaacctttcagggtcaatcaaatatgtgacatcagggagtttcctccaaacttctaaaggctcacaggcagggctctaaacttctctaaggcagcttcaggatccaaaggagcacggcacagtaattgtggcctaagaagtaagggttcctgccaggacacgggctgagaaagaaggtcagctgggtgctttctctgcctctctgagcttgcaggctctcaccccagcatctggcttctgagtcttcattggcaaaattggacaattgaaattttgtttaaaaaacaacaaagtatgaaactatattttgtgtgtgtgtctgcgcaggagtgtatgttttttgagacagggttcctggcctgactggcttgaaacttgctttgtagattatattggccttgaactctcagagatccacctactcctgcctcgtgagggctggaaataaaggcatgcacctccatgctgggctaaaactctactttttgacataagatgttggtaacagtctcactatctttgtgttttctttaacaattaagtatgagtcaacattccatgcatccaaaaacccagaaagattggaggctttgggcgtcgacttggcttctgtcttcactgtattaagtttgacatctgcaagcatctttgcattgtattgttttctcattgttttatatgaaggaccgaatgccacaacagtttcaaatttaaaaaactctctaaacaggctggcaagtggtgtcaacagcattagctaaaaaattttttttcagcacgcaaagtgtgccaaagaatgtggtgttagtgcaaaatacataaactcaaatattatttcacaaaacttaattttttttacttcactgaaatcactaaattattaaggaacaaaatagtcacatcacgtgcagacattattgataataggccataaattttagcaagtacaattagaaattaaagcattaaaagaagaaagagcagaaagagaaaagtcgtgggacacttgcatctgcacagctccccttcctctgcactgccagtccctcctgcgtgccctagtggtctctgtcactgacctgcctgctgccaacacaaagcacaaaccctctaagcatacaaactctgtcagccttcctcttaagaagggaagtgccagttgtggtgatgcctgtgagcccaacatttgggagaccgatgtgggactgtctgtccaaaacctccctgtgctgtgtcgggagtgaggtggagaagatggaggagtgaaactccaactgtggtccctctgggtgtgatcacaggagcacgagctttcacatttctgcagctccttggttggaactttcgggtgcagctgagagtccaagagggttagcacagcatcctaaagtcagaactcaaaagtcaaaaagcaaagccgggcgttgtggcacacacctttaatcccagcactcgggaggcaggcagatttctgagttcgaggcctgcctggtctacaaagtgagttccaggacagccagggttacacagagaaaccctgtctcgaaaaacaaaacaaaacaaaaaaacaaacaaaaaaagcagccagtggcagctgagtgccctggagatctttgcacacctctgaagagaacactcttcctcttgggtccattcacacagtcagcaaatacagtcacactttaaatgcaaagctcctggctgctcaaggctcatagcatttgctacctcaggagggcagcaacatcacacaaaccaagactgatagcaagggccaacctactaaaatgctagcccttgttccctccatgccttgaggaaagacaccatgaataccacttccctttgaaagccttcacttcatgccccatctgctgttttggcgctgacaaaagtgtaactgtattgaggctggagtatattggggtgtgggtgtttggggtagaaggtaccgatatctcaatatggcattagtgctgggcatgtagctcagtgggtgacagagcctgcctctatctgaccaccacagggaaacaactgaactgacgctaacaggttgatgtatgcctgaggtgagcaagcatctggagtttccttcaccatctattgtcctcgtgttaatggcataagagaagccagttagcaggcctgtggctgagtcctctcacttactgaccacactgcctccaggttgtcttacacgtcacagtcgcctacatgttcacccactccctcaatcaatcactaaatccgtttttagagtcgtctttgaacgtatgggacttctgataaattctccagtagacatcaccagtcaggtgtccccttggggcctccgaatgtccaaaacagaatggacagtctcttctcaaatctgttcatccccaacatagtccaaccagtgagctgcactaacagcagttcagccactggagttggagactcaggagttgaatgcctctccttccctccctctcacgtcccagcctgtgttgtcttctggtcatcgccactgctggcccacatctaaggctcatcaggcctctaagatatttctacatggtttctctgtctcatactacggctcttcctcctgtttctttgctttggttgacatggtctatcttacatgtaaatctagtcagataannnnnnnnnnnnnnnnnnnnnnnnnnnnnnnnnnnnnnnnnnnnnnnnnnnnnnnnnnnnnnnnnnnagaaatctgcctgcaattgagtctcttaaggtaacatttttcagctcttctctgtccattagcctttctttctgctccactgagcacaggactgaggtcgcaccccgtgcctagctgcactggcattcagaggatacaggaggcttgtgaacttccagcttttgtaaactatgaagtgtgaaccatcacaggaccaggaagccaatctaatggattacaatcagtcttgatttataaaagaaaaacagaatagtaaacaatagagtattgtttgtgaaccttcagtataaaatgtgtgtcttttagtgagttgtattaaaattaaatgaataagccagcacttttttggtttggttgttttgtcttttttgttttgctttatttagcaagatcaacttcgcctaggggaaaactaaaaccgcacaggtagctaaaaatttcatcgtttctgtggattgccacaggtctcaaaggctgagcttcaaagaaggaagtgcccactgtagttagttctaggtttctgaaaaacggaggaagttaaaatcaactacaaaaatccaggaactgtggccatgtgtccataaagcctagtggtcccgcagtaagtctactgttgtggaaattaagcttctagggcctcacatgtgatactggaactcttatatgtattccctgctgttgaggatctgacttgagtgtgaagatttaacagtttaactggctgcttccccaacattctgttgggaagaacagagagctttgggccaatgaggtgccgccattgggtttccatagtgataaaagaaacaaaccatcctggggcacaagtcaggctcagtcaaaggactagctagagggtgaattcctcctcaagggactttcaggtaataactggggacaactgaactgtcttctaagggaagctcctggggtggatggccgcggaacccttctaaacaccactggctgggtttgcaagtcttcaaggcagtctggagatttctgccttggcatctcaaccacttgggaataaacacagcaaccatgagttctgaaacaccttgattgggtgagaaatgacccctgagtttccctaaaacattatggtttctttaagactcacaacctgggaagggaccacaaggccaatgaatctttgaaagaattaaagtaagatcttgggaagagtttccagccgcttgttgaaaacccaccctttctaaagctctgctcactcagcgacaacttccggctgtgagtgaaacaccagggagataagacaggggaagaaaagaagggaacacacacacgtgcccacacgcacatacatccacacacatatcctcacatgtctaaacatacacacacacacacactcacacacgcacacacacacacacacacacacacacacgcacacacacacgcccgaatgcacatacatctgcacacgtgcccgcacgcacatatatcagcacacacatccacacatgtatgcgcgcacacacacacacgcacacgcaaactcaccaaccagtaaacgatcattatcaaaaggccctaaaagtggtccttaccagcttccttgcctcagtttcaaccctgacaccctcagacctacctcgggatttgctaagagcccaagtctgttctaagggctcaatagctttgcattactgattttaaatgctttgaatatggttcccatagatgcaaagggaacttttctttttaagaaaaagtaataaataataaggcgtttttttgtttagaatgggaaaaaaggaaacaaacatttatcaatacaaaactggttaaaatataagtaagtgaactgatataaatgtagagttgtgaggcaagagaaatggcccagggattagggtgcgtgctgagcttcaagagaacctcaggttcgttgccataaaccccatctaatggctcccgacagcctgtagctccagctcccgagtggctaatgctggcttctggcttccatggctcctgaacacttatgatctacacgcacacagtcaaacacacacacacaaatacgaataaagcttttttttttttttaatttagaattgcagccgggcggtggtggcgcatgcctttgatcccagcacttgggaggcagagacaggcagatttctgagttcaaggccagcctggtctacaaagtgagttccaggacagccagggctgtacagagaaaccctgtctcaaaaagacaaaaaaaaaaaaaaaatttagaattgcaatgatacagaaacatatcccagacttacttgaaaggttgtttaaattttgctttaagataatacgatgctggaggagtaaaatgcagtgggggaggggtatagacaagcaagattagtcacactgacattgttgaatctaggggataggtgagcttactttactctttctctacatttggaatacttttatatttctttttttttatttatttttattttatttatttatttatttatttatttatttattatatgtaagtacactgtagctgtcttcagacactccagaagagggagtcagatctcattacggatggttgtgagccaccatgtggttgctgggatttgaactccagaccttcggaagagcagtcgggtgctcttacccactgagccatctcaccagccctcttttatatttcttgattgtaaaaaaaaaaccttacatttaaaaatgatgacatcttttacataataggaactcgtggtattatcttaaaaaatatatccaggatgtaaatatagtttgttcctgtttataggaaattatgtaagtctgtttctttagaatgcagaaaattctggaaggcatacactcaagtattctcactagtcatctctggattttgtatttttgatgtttttcacttccttaatcttttctgtaatgactgtctctgtaacaagctgatttcaagttaatatacacatacatacaaataaacctatgttcttttaaaaagagagagtttttctatatgtaaaagccatgtagttcatgggattcctttccatgcacagggctgagaacatggttcttagtaaatgttcagagcaatgcaacccagcccggagcagctcaagctagacttttaaaggtgctcatttaactttaaattttatttttttctaagatttacttattattattacatctaagtacactgtagctgtcttcagatgcaccagaaaagggcatcagatctcattacagatggttgtgagccaccatgtggttgctgggatttgaactcaggacctgctgaagagcagtcagtgctcttaaccactgagccatctctccagcccaactttaaattttaaataaaacaatgtttaattttataagctcaaaagagcaggcttcctacgttcccatgtctaatgtgtaaagtcaggcctacctgatttcaaagaacccccaaaattttcataacaggtgtcatgaggggaacaggaaacaaagttctagcattctgacctaattttcagtttttagtacctgagctacaaagtctctttctctatgtacaggtgtgtgtgcgcgtgcatgcgtgcgtgtgcgtgtgcacatgtgtgctcacacgcttatatatgtatgtatgtatgtatgtatgtatgtatgtgcatgtatgcatcatcaggctctgggggggtgggaacagggatgggtctggttctgaaaacacagggacactattgattgtaccatagactccatgtactgtcaagtctacctatcagtgtcttcaggattcagatctctccctgtctgggctcacccgagagtaactctcatgcagcaatcataaagagggctgtttttagttcccttctgcaattcagacacatgacccaaattaagaaacagggccatttgtgctccagttggagaaggacaacaaatttcccggaaagttctgtgcagaacccgctgtgaggaatctcttcatgcagagcaagctatgtgaacttgaggaggactgaggtcataggaactgagctaatgctcccaactttgcaacgtgttgcctctgtgacatccatgcgtgtcacctgaaggctagccagcaatagttaggcaaagattgtacacttggattacagtcatgactcaattattcaagatatgtatttgctttcctgtcaagtagcaaccataaggcagtgacagcctgtgtcagctcagcctctgcccttgttcttggtgctgccctgtcttctgttgtccctgtctctgtttgccttggtttctgagtggtttaactctctgtggttgtttttgcatctcaacaggagcccctggcctagcaagactgccttgtaccatggaccccaatcctttcatctactgtacctgctgtgactgctgcaaattgggacaaccaaagctaatcaagaccccttatccacttccaaagcaccccacggggaagtttaagtaaggataagctaggttggactaggaacaggaggtgaaagtttcctctgtggtcctctttgccttacaagacttcccagtagagagcttgccaccaattccccacagaacagggtgccctgcattcctgccttcccctccagcctcctgttgccctgatcttgcaagcctgtttgactcaatggcatttcagtaaagtcccaactttgcaattttgtggtacaatgtgtgtgtgtgtgtgtgtgtgtgtgtgtgtgtgtgtgtgtgtgtgtgtgtaaaacacccagagagctttggtgccagctgcccctccccaggaacctggccttggggttcgtgctgatgaccaggagatagtagataagaacctgcaccttggacctgaggtcttaaaggcctgtactctccacaatcccagtgatcactttccagtttggagtcagcatgggcactcccttatctgggaagattgagttagcttttttgatttccagtgttcatttatttattgtttccaggccagttttacctccaccaatttcaaaagaacacaactcactcctgtcccaaccaggaaaatctactgtttccccaaggtaagtacttttaactccatgaagcaatgaataaaataataacactatacaagagatcagttttctctgagagcaaaaaagagtacacccctgctcccattcattttggacttcttcactgaggccctgtgccaacaaattaccctaggtgcccaggagacaaacacatacacacacacacacacaaacacacacacacacacacacacacacacacaagacctcatggctgacttgaactaatttgctatcaaggatgtcagaaaactgccacaatccattgatttgtcccctcaaccaaatccatggtgatttcagctcagagaaggtaaggaagcagtgcctggctgcagagaggagcccacagccctggagagcagggagatggagcatggcacagactggaggtggtcaggtggctgacctaagatgtaactgtgtggggccaatgcacttatgagaaacaaagtgtcagtcagcaataagatgtgaactctgtgcagacaaacacggggtcatgggaaggctctgaatgttgcaaaggcatggagttaatttgccctgagagctccagactgcacccacatccatttggactgctccctcaatggggccctaggccaaagtgaccccagctccccagggtgctcctccagaagggcagagctggcgacaccagggtgcggctccctgggctccacctgttttctgctcttctgctttctgagcatgtttctctcttgcagggacaaggtccagtcaggaaacacagagagcagcaaagcaccttctgtgagtaaaaatgggaaaagggacagggtgagcatttatctggcacctactgtgtgcaagcatgaggtttttacaccctcactctgccaaatcttaacagagatcctcggagagatccttatattattaatggtatgcatttgaggtggctgctatgtggccaaactttaactaaccccagctactttccttggctatggaggtccctgggggaaaacagatggtagtgtgttacggtacaactcatgccccaatataggaagacctctgtgtactggaagccagagaccttgaggcagctgtcagggcacctatggctgtaaagggcaaggacattggcctcaaatcgtgagtcttcacagttctgacacaattgtgagagcaggtgtgaccgcccacagccacaagaacctgtttctcctgaaaggcaggccagggctaaaagcaaataaacggggagaaaaggaagaggccaagacaaaaaactgatcaaagcccaaagttaactaaaaatctgtgtttatatggggggaaagcccatctcccacagatccacacttgatgcctatcaacagcctataagcaatctgtctgacagcactggtttggctagaagtgtcaatcactgggttgcctgcagtctctggaatctctcaggaatctctcagcctctcagcaggtagcagtatcttggagaagacacttgacagaacaatagaaccatctaggtgggaaggcttcacctcaggtggtctcattctcattggcagcgaggtctgagccagcctactcaaggctgggggaggctacaattcctccctaatatataattaaaattagctggactgagacataaaatttttttatgctccattgtcctgcctgggaattacggtagctggcagccgtgcccagcttgggaacttggattttctatgaattattcttatctgtcaaggagagtatatgcagcttgcttgtgtttattttgcacaaacatggctctatggtgtattattaataaactacggcctcttggcatatacctctgtcttaagattgatatagttcagaaatctggttgcccgtcattggctaaccggccctcatagcacaccttattcccaaatcagactaaagccacaatacatactcaatatgttccttcatattgatgaatttctgtcacctgtgcttgctggagggaggctgcaagcttgctgaagacaggctgtagggaggtgactgacctgcttgaaattcaaagcccagagttgaaaagcaacaggataaaggcttctttggtgaagtccaggtagtctattcagttgcaaattagcaatgatcaagctcaaactctggcatccagtgttggggaggtagcaatagcagttaattctctgaaagtggaggctgtgttcaaatgaactcttctggctaaaaaaagatttttagccatcatcaaggttggaatcatacttactagaagattcggggctctttccaattgacaaaccaatctttcaggcagccattgctctctgtcttctttttgtgaaaaaaacacagacagagcctcttccccaaattaaaacagggtctggaaaattccacgtattagttagggggtccccccatttaaccatggcataagaactggaagcaactggatgccagtagcaatcccctgcaggctgacttttaacatcagtttgcaaaaaatttaaaataaataagacaaaagcaagatgtgcttttggtgaccttggggggtataattgcccctgttttgcttttaaaagccaaatttttagagtgagatgagcatgttcaacaattctttgtcccatggggttgtaaggaatttcagttttatgtttgataccaaattcctaacaaaatgaaataaaattgttgccaggataggatggcccattatctgtcttaatgactttaagcaatcccatagcattaaaggcttctaggcaatgatcaattacatttttagaggcctctcctgtatgtagagaaacaaaaagaaatccagaacaagtgtcaatacaaatgtgtacatattttaattttccagattctacataatgagttacatccatttgccaaatgtgattgggcataaggtcttgtggattaacccctaaatgtggaactggagataatgtaatatatttaggacattgttttacaatcatttttgcctcctccttagtgatcttatgttggagccttaagatatggctagaaagatgaaatttatcatgatcatgtctagccaatgtaacaggatctgaaactaaggcctctcctatcaatgcaatcattgactgtagctaaaggtccaggaagaccagaatgagctcatatattaccaatataaaacgtatttttttttgatataaaatagaggaagaatgatgttttgcaattgtgaaaacagagattctcctggcgtattaaagttaaacattccacaagtctccaataagggaattgattgcacaacatataaactatcagtaaaaatattaaaagcatcattcacagactgaaaaacattcaataccgctgtcagttctgctaactgagctgagaggccaggagtctctatgactatttgttgattattcataagatatccagcttgccctttagaggggctttcagtaaaaatcaaaagagcattacacaaggctgtaaagaagttatattagaaaatatcacctcatatacattgaaaaattttatcaacttatcttgaggataatgatcatctatagttcctataaatcctatttgagaaagcaaccaatccttactgttttacttcagccaactatcttgatctacactataaggctgaacaatgatatctggctctttatcaaaataagttagtgcctgcttccttcaagtataatgaatgatctgggctactgctgcataatatggcaggatattatgtttaggagatatcctcaaatgtatccacattagaggagccctttgccacaacaatcctgtaggcgtatgaatcgtattaaaaattaacagatgtaaaggcaaagagtaatctatataagtaacaaattgttcttcaatagctctttctacttgttgtaaggccagcaatccttcagaggttaaagatataggggaggtaggatcagaactccctttaagaatatcaaataaaggtttcaactcccctgtagtaagctttaaatagggcgaagccaattaatatcacccaacaatatttgaaaatcatatacagtttttaagctgtccctgcgaataactatcttctagggaaaaacagcttggtctgtaagtctaaaacccaaataattataaggatcctgagtctgtaccttctcaggagttatttgcagtcctttatcagctaaggcctgttgtaagtctctataacataaaagcaagtcctgacgatcttttcccactattaagacattatctgtgtaatgaacgatgtatatcataggccattgttgtcttacaggctgaatggcttgtgccacaaacttttgacataaggtaggactattagccatgccttgtggaagaactgtccattgatatcttttcataggttccttaaaattaatagaaggaacactgaaagcaaatctttcacaatcctcagggttcaaaggaatagtacagaagcaacctttcaaatataccacaattttataatatcctttaggaatggctactggagacagaagcccaggttgtaaagctcccataggtaccatcgtttcagtaacctttcttagatcttgtaacaatctccatttaccagattttatctttataacaaatattgaagtattccgaggagactgagattctactaaatgtcctgcctctaattgctcctgcactagcaaagagatggcttctattttctctttaggtaaaatccactgatcaacccacaccggaatattattaagccattgaattttatcagcatgggatgcaggcaagatagtggccattactgaaaataccccaaacctcttgtgttagagtgaggttcaggaccttcaaaagtcttaataccttgtcctttctttcctagcccatgatcaggcaaaaatccttgtcttagcatctgcttagtcactgcctcattaggactgcacattataaggcccatctgtgacaagagatctcttccccatagggtaacaggcaaatttgacataacatacggctgaatttgtcctgaattgccctcctcatctctccaggttagcaatttggagctttgttttgggttattggcataacaattccttggaggtgagtaagtgtatcagtcaaaggccatgttgaaggccaatcttgtcctataatacttgttacatcaactccagtatctattaattctttaaagctttttccttcaattgtcaatttaaggttaggtctctgattagtaatagattgaacccagtacacatcagaggaaccaaagccactctgtcctctctcattcttaacaaatctggaaggtggcacatgcaagggaactaagacaaattgagcaatttttgattagcaggtacagttataataacatgaggggaaacagccatgattttaatttctccctcataatcattatctataatacctgaataaacctgcagaccttctacaatagaactacttcgtcctaaaagaaatccccaagtttcttcaggcagaggtccaaaaactcctgtaggcagagtgtgaattccaatttctggggttaatactacgtgggtggtggaacagagggtccaatcctgcacttcctggggttgccctaataagttcaaaaatggatttccttgactgggcagcagcttcatggctccataagatgcctgctgtgggtatctcgggcctgaggctggcccctcttttcgtttccgaacaccagagagccctgaatatctgtcttggatgtacattctctagcccaatggttgcccttccatcatagaggacaaactcctggagcacggtctgattgcccactctcagcacctctattcctagaacaatcatttttaaaatgacccaaacttccacacttaaaacatgcattacagtggccaaggccaaaccctgattatatgaaggcccaatctctgcacaaaatggatataccctgctaagtctgtctgtcctttgtgcagcatgaccattctcatatgccaattgcataacaaaattcccgtttgagaatctccaagaattccactagctgcttttaatagcctatccactaagtcctggaaaagctcatcaggaccctgccgaatgctggctaaacttccaccaagatcccctttagttggtaactgattccaagcgtggtgggcagccattgcaacctgtgcatacactccaacaggaaacccaacctgattagcattgctttcatattgaccttctcctaaaagtatgttaatatcccagtctgcgttacctgtctgagcattcaaagtggcagttttcttactggcttctcaccattcagaactccaaagtaggaaatctcctcctgacaaaatagacttacacagtgtcttccaatcttgggggtttaaatgtgactccatgacagtatccaataatgcttgtgtaaaagaagctgtagggccatattgtgcaggcgttcttcctgagattctttaagttctgtctgggtactatctgatgcctgcgaggtctcttcatcagtagcatcttttacgagtgcccagaggcagcaaaaatctatctgatctgaaaaatcttctaacaattgttctacaaaccctactcctcttccctgaagcagatattgaaggctgtggacaaatggcagtttagaattttctatttccattttccgctgtcagccccgaaatggaatcagcgccaggtcaacactgtcccaacttagcccgtatcctatcacacctacagcaacatttttaaaaagatgatgtttaaagccaatgttagagtgaatatctattgcttactgtgccagatatgatcttcttgtttttcccttctcctggagctccactttagacagtgttccctcagtcgatcctactgtgttcaggccccacgttgggtgccaaactgtgaccgcccatggccacatgaaccaggtcctcctgaaaagcaggctggagctaaaagagaataaatggcgaaaaaaggacgaggccaagacaaaatgttgttcaaagcccaaagtttactagaaatctgtgtttatatagggggaaagcccatctcccacagatccactcttgatgcctgtcaccagcctttaagcaatctgtctgacagcactggtttggcaagaaggtatcaatcattgggttgcctgatgtctctggaatctctcaggaatctcttagcctctcagcagtagcagtgtcttagagaagaacagcatcagtgacagaacaatagaaccatctaggtgggaaggctctgcctcaggtggtctcattctcagtggcaacgaggtctgagccagcctactcaaggctgggggaggctacaatcaggttatattgacattttagaaaatgaacttttgccaggaagtggtggtacacgcctttaatcccagcacttgggaggcagaagcagccagatttctgagtttgaggccagcctggtctaccgagtgagttccagacagccagggctataaagagaaaccctgtctagaaaaaagaaaaagaaaaataaagaaaatgaactttctggtaggatgttctggctactttgtcttatggttttattcatccttcccttcctaaaacaagaatcatgcagaaagaaaaaggagagagaaagaagggaacacagggttgtgggggcagagaggtcaaacagtccttttatagaaagccaggctcctaactggctgttgcctgataactgttgggaggagcttagaagaaatgctaaccttgagagtctaagcacaggatgctgtgcacttgatccaggactgagcaagatttaaaggaaggtgatgcagagaagccacttaggagacgccacaatggccgggatggctccatactgctaagtgttctgcacgtctctagatgctacacttgtatccaagttagccactgactctgccagggttctgccatgtcatctgattgatacaggaggattaactcactgaatgtttgtgtccttgctaatcatcttcttgagagttaatttgttgtttttctccctttaaaaaaccctttgaagttattttgtgcaggtttttctttcttttctttttcttttcttcttttctgtttttctttcttttttgcatttttattggatactctatttacatttcaaatttcacacacacactattccattctctcccctctgcccccgcttctgtgagggtgttctcccacccacccattccaacataccccttccacttcattccctacactagggcatcgagccttcacaggaccaagggcctcttctcccactgatgcctgacaaagccatcctctgctacatatgcagctggaaccatgggtccctccatgtgtactctttggttggtggtttagtccctgggagctcctcggggtctggttggttgatattgttgttcttcctatggggttgcgaaccccttcagctcctttagtcatttctctaagtcctcaattagggaccccatgctcagtccaatggttgtctacaagcatccccctctgtatttgtcaggctctggcagagcccctcagcagacagctgtatctgggtcctgtcagcatgcacttcttggcatccacaataatgtctgggtttagtgactgtatatgggatggatccccaggtggggcagtctctgagtggcctttccttcagtctctgctccacactttgtctctgtatttgctcccgtcagtattttgttcccctttctaagaaggaccaaagcatccacacctggcacacttggtcttccttcttgagcttcataggtctgtgaattatatcttgggtattcggaacttttagctaatatccacttttcagtgagtgcatagcatgtgtgtttttttgttttttgttttttgtttttgtgattaggttacctcactcaggatgatattttctagttccattcatttgcctaagaatttcatgaattcattctttttttttttttttttttttttgggttttcgagacagcgtttctctgtgtagccctggctgtcctgaaactaactttgtagacctggctggcctcgaactcagaaatccacctgcctctgcctcctgagtgctgggattaaaggcatgcgccaccacgcctggctgaattcatttttaaatagctgaatagtactccattgtgtaaatgtatcacattttctgaatccattcctctgttgaaggacatctgggttgtttccagcttctggctattataaataaggctgctatgaacatagtggagcatgtgtccttgttatatgttggagcatttttgggtatatgcccaggagtagtatagttgggtcctgaggtagtgctatgtccaattatctgaggaatcaacagactgattttcagagtggttgtaccagtttccaatcccaccaacaatggaggagtgttcctctttctccacatcctcgctagtatctgctgtcacctgagttttttatcttagccattctgactggtctgaggtggaatctcagggtcattttgatttgcatttccctgattactaaaaatgtagaacatttctttaggtgcttcttggtcattagagtttcctcagttttgacatagaatatcttgttttctccatctacggtgattgagagttttgctgggtatagtagcctgggttggcatttgtgttctcttagggtatgtatgacatctacccaggatcttctagctttcatagtctctggtgagaagtctggtgtaattctgataggtctgcctttatatgttacttgacatttttcgcttactgcttttagtattctttctttgttttgtgcatttggtgttttaactattatgtgacaggaggaatttcttttctaggtcaatctatttgtaattctataggctttttgtattttcatgggcatctctttctttgggttagggaagttttcgtctagaattttgttgaagatatatactggccctttacgttgggaatcttcactctcttctataccgattatacttaggtttcatcttctcattgtgtcctggatttcctggatgttttgggtcaggagcttttttgctttttgtgttttctttcactgttgtgtcaatgttttctatggtatcctctgtacctgagattctctcttctatctcttgtattctgttagtggtgcttgcatctatgactcttgatctctttcctaggttttgtatctccagggttgcctccctttgtgatttctttattgtttctaattctacttttagatcctggatggtttgttcatttcctttgcctttttgattgtgttttcctgtaattctttaagggatttttgtgtttgctctttaagtgcttctacctgtttaactgtgttctgtatttccttaagggaattatttatgttcttcttaaagtcctctatcatcatcatgagaagtgattttagacccgaatcttgcttttcatgtgtgatggtgtatccaggacttgctatggtggaatatctaggttctgatgatgccaagttaaccttagtttttgttgcatatattcttatgcttacctctcaccacccggttatctctagtgcttccagcccatgccctctctgactggagcctgtccctcctaggagactgtccctcctgtgatcctggttgtataggaactccttagagtcaagctgtctctgtgatcctgtgattctgtgatcctgtgatcctgagatcctgactgtgtcagagctcctgggagtcaggctgcttctggatcctgaaatcctggcgtgaccaagttcctgagatcttgtgatcctgggattgttagaacacctgagagttgagcttcctctgggtgttgtggcactggttgcctccatttttctgatggggacactgagtcacagagatgttaaaaatctccatggctaaatatataaaccttggtctgtccattccaaaagttgagcagtttccacactgcccatctactgcccataatggaggaaggggaggaaaaggagagtggtaaccatggatcagttggcactgctgagtttaatgggcccctgggggccaggtgattgttgagattagatctgagggtagtgcctgggggaaggcacagaagggtcctgtggcctagaatttcagagaatttcagcacagtgtcaatgtgtataagatgtgaggaagctgtcttagagtttccattgctgtgaacaaacaccatgaccaacgttactcttataaaggacaacatttaattggggctggcttacaggtttagaggttcagtcctttatcatcaaggcaggaagcatggcagcatccaggcaggcatggtgcaggaggagctgagagttctacatcctcatgtgaaggccgctaagagaagactgggtctcaggttgttagggggtctcattgcccacccccactgtgatacacttcctccaacaaggccacacctgctccaataaggccacacctcctaatgtgccacttctgggccaagcattttcaaactaccatggaagcacacagtaggtggaggaacctcaactcttctgggttcacagtttccatttgtcttccaccttgtgacccaggaagtgattcaagtgtcacctggctatacactcattcgaaatcgagaacagatatcagtcaccttgggagatgagatgttcaacaggaaaaagcacttggaatcagatgtcttgagcaaagtcaaattttccaggtaaagtctttgggtcagcaccggcttctcagagctggccctgcccagctattcagccgtgcttggcaccagttcagcacctgacatctacacccacgccacaggtccttgacaagaaacagttacaaagatagggggtccagccagcatgactaaagaggcaagtgcttctgccaggaagggacaggtgaaatacccaaaaaatggtctggcttctgaatatgggaataaagagcaaagccagagattttggaagcctggagtgtgtctgtttcaatataagtaacccaaagtgcccatgactctgcgagacactattaggcgggttctactgttaagtaaccaccatctgctttctcagaagccctgcctcttttttctatcctccgacgttacactcatatccatccacacatctcgtttctacttcctaaaaccctcattcatgtcttctagtcaggcctctccttactacatcactggagagctctcccagtgtctcctctttccagcctttgtctgctgtaagaactactgttctgaagccacagtgggcacacactgttaaccctgtactgggggtgagtgtaggggttgatctctgtgagttaaagaccatcctgatctgtatagcaagtttcaggacagccagaactatgtagaaagaccctgtattgaaaacaaaaagcaagcaagaaaagagctattgttccaaagatctggaagatgttcaacagatcaagcttgttcttatctctagcatccttgtaaaaatctggacatggtgacacatgcccataatcctagcactgaaagacagcagagaatctctggggctcattagccagctgaatgagttgaaacattagttctaggttcagtgagaaaacctgtctcataaaatgagtggagagtaacagaggaagacacttaaaattgatccctgtcttccatgtttgtacacacacacacacatttttgttttatttggttgttgttgttgttgttttgaagcactatgttgctgtataacccaagcaggacactactaccctgttcttgagtgttgggagtgcagacatgtttgcacacacatattcatttgcacctcctcttagccgcatcctcaggcagtccttgtctactggtgcctgtcagcatgagtctccccacacttcctcatttcctaatcctctgacctcttgagttcgactattgataaccacactctggtaagtgtccaacacattgttatttctcttctgctcagtgggacaccacacagcccacatcacttccagcttaattaccttcagggctagatgccaggtccaaacactctactatgaaacgccttatcgaccactgcatccccatgccttagtcgtggagaagacacaaacagaccagagtcaggcagtctgggggcctggctggtgtgactaacaacaagctctcttggtgatagagtgtttgtcccacaggactgatatcatttctgaccttcaggagcaaattgctgagttgatggcaataatagaacagatgaacagagaccagcagtctgccctgaaactggtgagtgacccttgtatcagccacaccctcatggctaatacattcagattacccaagtgccaggtaacatggcaggcggatcaccaccgtactgaagcgtggtatccaagcgccagactcggcatagtgtgcagtgagcagtaccttccctcctccatcctcatccatctctgtaaaaactgaaagacattgcattcctggggttccaggtgcctttgggtgtgtgcatggtaacactgtctcttctacactgctaacactgtcatgagatccgcaggcttcagaggttgccaggctattgctaatgaccccggcatggaagatgcctcctgtgtcttggaaaaccttctaggaagccctagggcccaccctctgttactatgaaggtcccagagcccattcttcagaatcaactggagtccatttagtctggatgcatatgtatgtttatgtatatatatatataattatgcctgcatgtacacccacaggccagaagagggcaccagatctcattatagagggttatgaggcatctataatggttctgctgggaattgagctcaggatctctggaagagcagccagtgctcctagcctctgagccatctttccagcccctcttgatgcattcttaacaggtgacatttttagcattttggtcaccagttccagttttgagcctttcttccccagctcaggcatgtgaccagggctggagtaacagaccatagccatgctcagaaagtaccccctggtgttcctgaagggaaccgtgaggctctgccttcccacagcagcctctcatgctgattaaccttaggctgtctgaatcttacagtcacgggctggttcgtgaccaggcttagaccttccccacctcagctgggctgatgtcttctacaaaagaaatctgaagcttgaggaagcttgtggaaggtggtggggcttcaggcaacctcacattttgactcaccaccacaagccctgcaccacacaactttagcgactgtcttttttgcaagtggaagtgggggtgttgaaaatattctaacctttgaaaggtctctgtgcagaatccaggatgacaccgagatggggtataagaagtttttaggaaaagttagtaacaccacggacagacagacagaaagacagacagtctcctagcagagactctgaggagttgatgccccgttgcctccgcatgctgggactctgaggaagaatccaggtccacaatgtggaggaggggcctgcagccaagatggctgattccctggcagagggcaaggagggaagaggagggactgtgtggccacacgtagccctttgatgtgtccacagtctgattgttggttctttttgactcttccagtcaagtctctcgctaaataagtgattcccaaaggtgaaagagcccagaggttacagtattaggatgaaatgacagaaggaaccagacccaatgacaaagtagcaacaaaatggtggccgtgcattacccgcatgatgcactgactagggagaggacagtcagtagtccctctgctatgtgtgtgtcctgtgcactgcagaacatgcccaggagagactgagaggggcatcccctcagaacggaggggcttcgcgtatatagataagagcgggctggggctctgaatgcttggctgttaacgttggcctcatttctagctctccaaagatctggatctccgctgttccaacatgaagcagaagtttgaaaccgagagcaggtatgctttctggcagaggactgcgtgctgagagcccaggatcccgtgccctggcaggattctaggtccccaggcatccccagcagggctaagtgcagcctgtgacactagagagcagggtagcctcattactgccactaagatgaatcagtttgtgtttggtatccctgcctttcatcgttcatccgtctcattgccactgtagtatttcttttgattggttgctgaggaaagttatgttgttctccacgaagcttctgtcaccctggatttgttataagtacattctccttcccggtcctcctcctcctccgcctctcctcctcctcctnnnnnnnnnnnnnnnnnnnnnnnnnnnnnnnnnnnnnnnnnnnnnnnnnnnnnnnnnnnnnnnnntctcctcctcctcctcctcctcctcctcctcctcctccttccctcctacttctgtctcttagctcagggcctgggcaacaaaggaaggagagatgggtggagaggggacaggccatggcaagttggggccagggggagagaataagaaggaagtgtgttgtgtgttgtctgtgtggggaacattattttttttaaagcctggaggccatcttggtgagagacaatcacctctggctgcaccatccacacttgcttgcttataattactttctgatttttaaagaacagttttagcgtcttggcaaaataagggagagtctgaactcccaggcaggcacattgtgtaccatgcacaacagcctccttgtagaaccgacctgtgttctgtcggcagatgagagtttaaaatgctattctgctccaaaagagaagggaattctcccagttgtgagaacatgggtggatcggaaggatggaagtgaaataaaccaggcaaagaaaagtctctgtgttctcactcagagctgaaacctcttaggaaacagaacctagactgatggttggttacttaggctagcctatgagaggtgactgtcaaagtgtacagaatttgggccagcgcttccaccaggcctgatgacctggatttgatccccaggacccatgtggtagaacactgagtctcttaagttacactctggtctccatgcatggatggatggttggtgtacacacacgccatgcacactaaataaattaagtaagtaagtaagtaaataaataaataaataaataaataaaataccaatgttttaaagtatataaaatctcagacagtagaaatattttttaaaatctttgcaggccttaggataataatactaccgtgttcttcatttcttattgcacaagagcacattttaaggctgtagagatgactcagtggtcctaagtttatactgctcttgcagcggatagttaaacatgctgttctagtttatgaatacaatgtggaaataattaaatcaacatagctgacacacagatgtcaactcaatgattacaattttttgtggtaagaatgtttgaaactcgcttttttttttaaaaaaagttgttttggttgttcattttgtttatatgtatgagtctgtgtggggtaagtgtgcatgagtatagtacagaggtcagaaggtgctggaccccctggagctggacaggtagtggcaagccaccataccagtgtatgtttaactccacaagcttgtgtaatgtacatgagtatttatttttatttttatttattttttaaacatatataagaaataaatgtaataaaccaaatacatggacaaaaaaatacaagaatcatatgagcatctcaatggaagaaaaaaaaaaagaaaaaaaaagaaaacagaaaaagtctttgataagattcaatattccttcttagtaaaaaccctagaataagtaggacgtaggaagcatattccaacataataaagattgtgtatgacaaatccatggccaatatcatcctaaatgaataaaaccattaataagccccattaacatcagagatgggagaggactgcccactgtccctacttctcatccataatgtgattgaagcattagctggagcagtaaggcaagagaagggaaacaaatgggaaaatattaggtcaaagtattttcagttgaagaatatattatcttatacccaatattctcaaaatttgactagaaaaattgtagaaattatcaataatttcagcaaagtgttgtgattcataattgacttacaaaatttatcagtcttaatacataagcgtaacaagcctgctgaaaaagaggtcatggacacgttcctctgccaagttctcaaatcaaataaagtatttagaatatacataacaaaagaggttaaaaaaaaaccctctacaatgaaaactttaaatgtgtgaagaaagagattgagaaacatactagaatttgaagacctcccaagcatacaacttggtagaattaacattgtgaaaaaaagactttcctaccaaaacaatttactgattcaataaagtcacaatcaacatccccatctcattcttcacataaatagaaaaaaaaattcgcaatttgatatggaacaacaaaagactcagagtagtcaattagtcctagataagtgtttgtgtctatgcattctgctcattttaggggccaagtgcctctgtctatgaccccaacatttatgtatctgtttctattgagtcaattttgttagatattagaatggctactccagcttgtttcttgggaccatttgcttggaaaattctttttctaccttttactctgaggtagtgtctgtctttgttactgagatgcgtttcctatatgcagcgaaatgctgggtcctgtttatgtatccagtctgttagtctatgtctttttattagggaactgagtccattgatattaggagatattaaggaaaagtgattgttactccctgttacttttgttgttagaggtagaattatgtttgtgtggctatcttattttgggtttcttgaaggaagattacttcttgctttttctagggtgtagtttccctctttgtgttggtgttctccatctattatcctttgtagggctggatttaaggaaagataatgtgtaaatttagtttttgtcatgggatatcttgttttctcagtctatggtaattgaaagatttactgggtataatagcctgggctggcatttgtgttcccttagggtctgtatgacatctgtccaggatcttctggatttcataatacctggtgagaagtctggtataattctaataactctgcctttatgtgttacttgacctttttcccttactgcttttaatatcctttctttgttttgtgcatttggtattttgattattatgtgaaaggaggaatttcttttctggtccaatctatttgtagttctgtaagcttcttgtatgttcctgggcatctttctttaggttagggaagttttcttctataattttgttgaagatatatactggccctttaagatggctctcttctatcgctattatccttaggtttcatcttctcattgtgtcctggatttcctagatgttttgagttaggagcttttagccttttgcattttctttgactgttgtgccaatgttttctatggtatcttctgcacctgagattcgctcttctatctcttgtattctgttggtgatgcttgcatctaggagtcctgatatctttcctatgctttctatctccagggctatctatctctctttgtattttctttattgtttctatttccatttttagatcttggatggttttgttcatttcctttgcctgtttgattgtgttttcctgtaattctttaacggatttttgtgtttgctctttaagtgcttctacctgtttacctgtgttctcctgtatttctttaagggaattatttatgtccttcttaaagtcctctatcaccatcatgagaagagatttttagatctgaatcttgcttttctggtgtgatggtgtattcaggatttgctatgatgggagaattgggttctgatgaagccaagtaaccttggtttctgttgcttatgttcttatgcttgcctcctgccatctgattatctcaagtactacctgccctcactatatctgactggagcctgtcctccctgtgatcctggttgtataagaactcctcatagtccagctgtctctgtgatcctgggattctgggtgtgtcagagctactgagagtcaagctgcttctgggatcctgagattcttgtgtgaccacgcccctaggatcctgggatcctgggtgtgttaaagagccttggagtggagcttcctctgggtgttatgggacttgctacagagctctggcccaaggtctgctcagggctccagcacagatcagaaggaactgtgcctctgctcatgtggggttcctgcttccctggatcccgctagccctagttactcccagtggtgttgggaccagaaatgagcatttatgacaaaacaaatcctggtagagataccacctctatataatccccagcattttaggcattgatgtctttatttatttttcttgtttgtttgttttttttttttttcagacagggtttctttctttgtagaccaggctgtccttgaacgcacagagatccacctgcctctgcctcccaaatgctggaattaaggtgtgtgccagccaccacgtccagcttgctttgttgtttttatattactttaaagttttcaagcaaaattaccaggaaggtacagagcccccacatatcccttgtgttccaccctatagccaccctcgctttcagcatctctgaaaaatgttttatgtgttacaattgatgggcctgcattggcacatcatcatcacctgcttggaagtcactcctggtgcacaatattctatgtgtgtgaaaaataagtgtgtgtggacgtgcattcactgtgagagtgctgtacacagtggtttcactctcttagtatgtatgctccagttcctagtccctccatagtccctcccaaggcaatgccttgaaacaactgtctccataggctttccttgcttgatgttggaataacatcacatacgtagtctttgcagagaggcatttttcctgtagtaacgtgtgtttcgatttctcccatctgatttaagcctttgggctctcactttagcactcaaacactatcagcatataaatcctgggatgggagctagatctggggttctaaactattctgggtgcttctataatagagctgtaagtaaaaactattgactaagaagagagtctgaggtgcttgcctgagcactattcaaagaagggactgtaggaaacacctcactcagaatagaaaccataagaatactctaggacatgagggctccaccttggtaaggagtgggagggggagggcaggtcagtgcaacagctcaactctacactgtgtgtgtgtgtgtgtgtgtgtgtgtgtgtgtgtgtgtgtgtgtgagtgtgtgtgtgtgtgtcgtgtgtgtgtgtgtgtgtgtgtgtgtgagtgtgcatgagactgtgtgtgcatatgtgcataagtatatgtatgcatgtgtgtacaaatgtgtgtctggatgtgtgtgtaaatgtgtttgagaaagtgtatgtatatgtgtatatgagtgtgagtatacatgtgtgagtatgtgtatgtatgagtgtatgtgagtaggtgtgcatatgaacatgtgtgtgtatatatgaacatgtgaatgtgtatatgtgagtatgtgtgtgtatttgatcatgtgtatgtaggtgagcatgtgtgtgtatatatgagtatgtaagtgtgtatatgtgtgtgtatatgtgaacatgtgtatgtgagcacatgagtgtgtatatgtatgtatatatggatatgtatgtgcatattccttctcctcctcccctccatgtgcttggcctcactgtgtttctgtggaccatagaagacagcttttggaagcaattcttccctccactatagattccagggatcagattcaggttgttaggctttcatggcaagcacctttacctgctgaaacagcttgttcatgctgaacttcttttcttggatggtcccacagggaactcaaagagactcacagagaggagctcgagaggttagagaacaactacaaggaggccctgaaggcagaaaaggccttggccgaagagaaactaggtactgtcgggccctggggggatgctgggaggaaggtggacagccttccctggcatccctatagccatggcttggcacagccagatgtccaacatttcccttctgaggcttaaggcatgagaatgactgagaacggaactgcttcatcactgaagcaagaacgtgaaatttttttaagtgcattctaaagttctaaaactacaatattactatgatgccttcaggttttcttgcatggagaatggcagtgatctcttgaatgctcactgggctactgtgattgcaaggctctgtagtgcatagtgctatgctgacagaatctcactgtttacactgctcttggggaaagcagagtgtgcacccttcagatttggggtttatagactaatgtccacagagagaacgagacactctacaaccttcttcctctgtttgaagttagtgtcttatttacactttgcttgttttctagtttcctgaagagaatgtgtggttttcataaccactgtaaaggaggaaatgatacaaaaaggagaagcagatgcattgtgggaggttctgttcctccttcccatagatacagatgaccctcgggggtggggggaggttgtcttactaaaacagctgaacagagtgtgggaactctgagatcttggagaagcatgtttagaaagtacctggcctctctcccagaagctcttcatccatcggttcaggtgggatacaataactgataagatttttgataagcttccagagcgacttgggaatcccaagacggtttcatcacctcagggagagcttgggtgtggagctgaagagttcatgtgagttttggaaagtgtgcccaccgaaggaataatgacatccttgttttcttttcctccagataagatgagcaaggaatataagtatctgaagagtatgttccatgtgtttcaggtgagattccaaactgtatggtaggctctgagagcaagagaggtgaggctccttcctggctgagaacttgaggatgactgtagacctggagagattctaatacttccatccacagtgtcactgctgtgcccagcaggaatgagtccagtggcttccatgtttgctaaaccagccattcaactctgaagaggcctgttgagaagatggtgtaacagctgttcactgtcttctaaaaatgaagactgggaggggggttaggggctggagagagggcttgacagttaagagaactggctgctcttccagaggccccaggttgagttcccagcacccaaatgatggctcaaaaccacatgtaactacagtgccagcagaccgaacgccctcttctggcctcctcaggcaccagtcccacaaacagtgcacagacctacacaccgacaaaaatacttacacacataaaacaagacttttttttttaagtggagctaaccaccaacagttacatggaaaagaagaaattgtcactcaccagaggcacccatgcaaactgcagtactttgttgaaccattcactgagcgaatctacacttgtatcctcttttctcttgggcactttaggtctttccctcctttgttgtgactgcctctgtggctttgggatatcactgtccctttcccactgaccacgtgctattagagtcactcccggtgacagaacacagaacttcaaacagtggagtactggtcaaacagtggacatatttaaggcctttcaaagatttgatcaaattgccatccaaaaattttatctcattccacattctacaagctgagacctgaagccatttcctttcatccctgtaccagttgggtttgttgtcaacttgacacaaaatggagtcatctggggggagggagcttcgtttgagaacttgcctccattgcctgtggacaagtcggtggggcattttcttgattaataattgacatgggagtgcgcagcccaccacagatggggccgcctctgggcagagagatacaaaaacaggccaagcaagccacgggagccaaccagtagccaggactcccctggcaccagttcctgcctgagttccagcccaattccctcagtgatgggttgtaatatggaaatataagtgaaataaaccttttcccaccaaagctgcttttaatcagactattttatcacagaagtagaaagtaaaagtggacaattccccaaacttgatgaagacccagagcaggctgccttacagggagatgcagagtcagatgattctcagactcagagagccgatctgtcttccaaagaagtcaagattcacagggtaaatgctgttactagagggcctttgaccttccagcttatcccagctctcctctgagctttgctggaatgggcttttttatgtgtaacccatggaagggtccctcagcaaggcccaagttaggggagagcaacgccccatgtgaccctgtgagtaactcagcagtgttcccctgtcatagcgttcccctgcagtagagttcccctgtcgttgtggatcttctcaccggtgccttcgtgctccacaggatagcatttacgaggaaatggaagacaagtggctgagacgaaaggccgaatgggagaaagatgagaagatggagcgggaaaagatcctgctacaacaaagtgagtcatgcagaagctgctggctttttcaatactagagactaaaaaaacaaacaaaacccgctatagatcttgaccttgacttgagggaaggggccttgggtttgtcaagggtcaaaggccagaacttctgaatgaaaggtgcctcaggttacaggaaacaggacagtgagggcaaggcttgccttttttttccctcctcctcctcttcttctttttttgaacttcagacacattaattaagggatctaaaacttacatgtttgcccatcatgatctggaacaaatatgggtattggcatctataatgaaatatagaacctaaaattctaggaggaattcatgaatttgaatttaaattattcagggctctgctgctgggtcttccaacactgagaacaggtgaatttacctttgccctaaggctaagtatgactttttattatgaacaatctgactaaccaagagctttaaagagaaaaaaatgctagagaaagcacagctattacttcagcagagaagacagaaagacaaacaggagacagaaactaaaccacacaccaaagaaagagcagatgctgccgactgatcccacatggctactgtcacagcacacaggagacccacctcaccccatgcatctccccagcagaggtcagagcgcccagcccaggctgaaaggttctcaggttcagtccagtctggaaccagtactgttttcagttattctaggtttctctttggcctgctttcccagattttacacacaaacctgtcgtttctttctctcctccacagaatgtagaataataaaaaagtttgagttacagtcggaagaaaaaaagaagaaaatgaatgagtccatcagtgctgtttctgataacttcgctcgagagaaagaggtaactggaagtagttgagagtagtctaggtggagcagctgagcccactgggcctatgtacttgggtgacttgttggtcccaatggacctactctcctctttgttcaactttcctggaaatatatgcaaaaagaatgactattatagtttgcacttgattgcttccataaaccatgaccaaaagcaagtggaaggaaaaggatttatttcatcttaaaaggggcagttcatcctcaacttccaatgcaggaaaccaaggcagggacttgaaacagaaaccacagaggaacactgctttctggcttgctcattcttattcagctgccattcttatacaggccaggaccacctgcctagtgatggtaccacccacagtaggctggaccatcccacatcctttggctgtcaagaaaatgcccccataggcatgcctacaagcaatgagatgggtacagtccccaaattgaaaccccctgaagtaactatgggctgagtcaagttgacagctgaagccaagttggaggaggattgtcttggggtcctttttagctaggccgtcttacatcaggatttttggaatgaaagtcgtaattagggaatagcagtacgttaaacgtgcaaaaactataaagtcctgtggtttgtcaacatggcctctctgaatgccacccctaccagcagtcctttctataaaggaaggaaaagacattggcgtcaactagtcaaggtggtttggtcatggaccactcctactaaatcagagtggctatctaaaagctaaagtaaggcaagctccatgcacctcctagccaataagagcatcatagacaaggttttcccaaacagatagacactgactaaacaaaatgtgttagcattccagctccctccagttcacacagccaatctctgagttcttggatgcagctgacatggtcaccttagagaggcagaactctgtaacactctcacaattgggccatcagccacacaccttcctatcataagagagtgtcattctgggatcaggtctttggcatcaccctaagtaaacaagctataagctgtcttagattcctccatccttttcttgcaaatggagaattgtgcaatattgtcaatattttgaatatttcacttatgtgtacatttctaaccatggtgctaattcctcttccattaaacccatctcctctcatctgccccaggccaccattcttctggtttctaccaccacagactcaatttatcagtttttgtctggtttaaaaaaaaaaagttggttctgttgttctgatagcataacttatgaaataaacacaaatacagttcctagttatccttgcaacatgcccaaatcaacctttaaaagtttataaaaaccaaatgtagaaagcatcttcctcagcaaacttctaaaggcaatgcagacatgaagacaaaagttggtgcttgttaatcatcacacggttgagcagggttttttttttttaattctgattttttattagatattttctttctttacatttcaaatgttatccctttaaaacaaaaacaaacaaacaaacaaataaaggccggacatggtggtgcatgcctttaatcccagctctcgggaggcagaggcaggcagatttctgactttgaggcaaatctggtctacaaagtgagttccaggacagccggggctatacagagaaaccctgtctcgaaaaaaaaaaaagaaaaaaaaaaacaaaacaaaacaaaacaaaaaaaaaaaaacaaccaaaaccaaaaccaaaaccaaaaccaaaaccaaaaacaaaaacaaaaacaaacaaaaaaacaaaaacaaaaacaatgttatccccttgtctagtttcccctttgaatatcccctcacccccttccctttgctccccaattcacccactctgattctggtcctggtattcccctatactgggtcctagagccttcacaggactaatcgactctcctcccattgatgaccgtctaggccatcctctgctacatatatagctagagccactgctccaggtaaaacactgcctgccatctctcccccccccccccccccacacacacacacatactctctgaactctgcccaccaaggcaaaggtggctttgtccttcagagccacagagatggtgacttgtttattcatcttcctgacagacccttggcttctttgggaaggaccataaagaggggcttctatggaacagagttgtgacagggtaaagaaactccattttgtgctaggcatccatcttgctacccacaggcatttgtgtgagactccagttccttggggtgactcagtgcctctctccacctagaaatgtgcagctgtgactctaactgcttgtcagcatcagtaacctctttatgcagacattcaaggaccacctactcttagcacagtagaaccacgcttggcttgcttatgcagatactaggtcatctcctggttttcatctttaaaaatccttccctctgtcctctttgtgtagcaatctcaaatttggctcagagagtgttgtcctgccatcaggatcaatacatttaaccaattataatctagatggagtctgtggtctgtttacaggggcctcagactccttaacaacaggctagctggggaccagggttccaccatggatacctgggacccttcgatgggttttccgtgtcagtctctgaggctaggtttagtttttgcattttccagccataccttcagtcccccactttggctttcctcctcaacttggtttgcactattcattttcctctcctttctgctccctcacctcggctgactttctcacacttgatatttccctcttgcccttccatgcagacactctcctccagtctctgctgatttttctattagttaaatttatttttatatttattaacagtaagcctggtatggtatggtggtgcacacctttctttaatcccagcactggagaggcagaggcaggcagatccctctgagtttgaggccagcctcctctacagactgagttctaagatagccagggatatggagagagactttgtctcaaaaccacaaatacgtatatcctttcctgatcactctttctgctggcctgttccttatgctcctcttcagtaatgatcttttacatgtctctgtacttccagccctatcacagttgatgagattctgctcagaactttctcttggcagcagtcttgttccttttctcaacaaccctcccttcctgatgtgtcagggtgctttgtggaactcccctgcatctgtccagatcattttatgactcatcatgtcggctggaactgtaagcgatgttctcttcagattccctgtctggacccagactgaatcacctgcttctttgccccaccccaccccacccccaccccactccattctaccccacactgctgcttcttcatccttctcaatccttccaccatcatctccatccaacagaaagctctggtgaccacaaggagatcatgggagcatggtgggattcctgcatctcagagatggactagtgagtgctcagataacacccccatctccaacctcagaccctgcccaacctgggaagggcatgaggagagccaggatagagcagggcccacatctgctcagaaccagttgagggggaggagaaacaatggacacactccactgccacctctggcccacctaggtcaaactagccaaaaatgttccgattttaaaacttaacgcggacatagaatgcctaatgtctaatgtattgttttcccctaaaaataactgataaaatatatttatttgtttttcacattcatacattctttttataaaagtagcttgaggcagatcttcctctgtagcccaggttgaaaccagctgatgtgcaacccaggatgagcctgcccttctggccttggcctgcgggcactgaccttccaagcccgagcccatacccactgtgttccttctcactgctcagcagaatcgcttagtggaaaggtcatacaatgtgcttcttggtttcctggcttgtaattttttggattgttttcatttgttggattttaaacaaagcttctatgaatatttttgtacaagtgactcatagatatattctcttccttctcttagagtgtatcactgaaactccagggtacacagaggaaatctatggtttccacagtagaaatgttttactttgagatctgaaatatgtgaattctgactgcaccgaatcctgcacacttaggccacccagtcattaactatggccattatagtggggatgaatatgaagtgacagtcactttttataagtctctctgatgactaaacaaggccagtttttctaaagtgttgggggaggacagcattgatagatttctatcttcttttgttcctgttcatcccttctattatttaaaagatatggatattggacttgcaaactttatatgccccagtacaggggaatgccagggccaaaatgtgggagtgggtgggtaggggattgggggaggagggtatgggggacttttggtatagcattggaaatgtaaatgaggaaaatacctaataaataatataaaaaagatatggataatacaaatattttgtatatatagttgcaataagaacttctactgggaggggttgctttctcattttgcaaacattatttttcaatgtacagaaatttctaattttgatgaaaggcagattatcaatcttttctttttagaattaaaagctctttctgccttccccataacactactgtctatcataatgccatgggtattctctttttagaaacgtgttgattttagcatttctgagtctatggtccatattgaataattttttgtgtgtagagtgaagtagaggtcataggaaatttttctgtatgaatagacaattattccatcatcctttctgaaaaaagaaaatgtcctccctcctgagtcgtcttgatgtcctctgagtgaagggcaagattctcttcccattctgcttaaccgtttctttacactcaaggaggcgctgcacagccttggtgccatgtaaagccagtgagatcgggcagacagcctgactgggctactggtccttgctttgattttcctcttgttaatttatttgttagctttggttttgtttcccagcatggtctatacattttccattgccttacacttctatgtaagttctagagctcatcacacccaacagttgataatgctgcagttcagtaagtgttaaactcctgagtcctccggtggcttcttaattctctaacctttccaaattcaattgttttcaggagctcctaagacaacatgatgaagacatcctgcaaatacaggagctgagaaaatccaaagaggtaagggttcccattcagctctatgaaagtagtgtcttccaagccctacacacttggggaaataaatgaattttacccagatcagtatagttactggagcacccaaacctaagtgttgaactctgtaggtcaaaatgaatctcaaactccatgtcaagcaaaagcagcctttctcagagccagctgtgaacaaggagaaagcaaaggctgcatggtcattagtgttgaataacagctatgtctagtgacgcttaaaacacaggactttgaattacagaacatcattatcttagttggcattttattgctgtgaagagacaccataaccaaggcagctcttataaaggacatcacttaattggggctggcttacaggttcagaggtctagtccattatcatggtgggggcatggcagcatccaggcccagattgtgctgaaggagttgagagttttacatcttaatccccaggaggctgtgtatctcagttgtcatatgacctcaaagcctgccctgacagtggcacacttccttctacaaggtcacacctcctaatattgccattccctatggccaagcattcaaacacatgaatctacagggctatactattcaaactacaacaaatcagtaacggcaatttgatcaaaaagaagcctcaaggttcaaccaattggcttgagtccatggaagcagcaagaaacctctggaacatcaccagaagttctttggtgtgtttctctctatgaagtcacagcagtgaagtcacagcagtgaagaaggcaaggcgaaccaatgctgcattgttttgcacaaagaccatcgccagcaaagcccaaatgaagatcagcaaagagtggcaaggcgaactaatacctcacaccgcatcatccactgtctgttgggttatatttataccccttccaaatatcacatgttctctcaagtgtccagtctagcaaaacatcacaggcccttttaccaagcagcttccagaaaaacaccatgtgtctgcctcagcaaaacatcctctcatgagacagttttcagaaaccagaaacttccagtgcagtcatccatcttgaaagttcccatataatctcccatggtacccttcatgttcccctgctagctgcttgcactacatgacatgttagttaccgagcagtcagtatcagcacgctgttgttaactgagatccctattttatatcagggatcactcttatggtatacatgctatgggttttggttaatatataatgtcaggtatccatcatgactgggtcaaacaaaacagtttcttgcactaaaaatactctttcccagcatcctcccttccatcccccagccactgaacccacaaacctatttacagtctctagtgtttcgtctttttcagaatatcacagagttggagtcaatagaaagaggtattgtaataaagaatatgcagaatggggttggagagatgccctagcagctcacagcatttgcttgtcttccagaggaacagagcttaggacctagcatccaaatcaggtgactcacagctgcctattaactccagttccagaagagctgatgcgttcttccggtttctacaaacacctacactcacatgtgtacctgcttgtgtgaacacacacacacacactaaaaattaaatataaaaattttttaaggagaacacaaagtttggaagaattagagggtggatctagctagggaaaagtgggaggtaaatatgatcaaatgcattgtattctcaaaaagtcataaaaatattatatcttaaaaacaaatctttaaaaaaaagaccatgcagtggctgagtggctgatgaccacattgcctgatgaaggctgctttggctgtagtggcagtgaacctgaagagcaggacacaggagggagagaaagagaaggtagaaatggcagtaagtggtacaagagagtgtgcctgaagttggcgtggtgtatgtgttccaaatgccctggagaagggagtattcccgggttccctcttgtcttggggacattaattacatcagcatgatgtcctgaggctgcttcctcttgtgcagatcttggaggctgagttgcgggcacaagctactgttctggagaccctgaacacaaaccttttccaatgccagaaagaactcgagagacaggcaagtcctggttagactgagaaccgggctggagaggaacctggagaactgctgttctgcccaggagctatgtcccaagggctctggggaagacagctattcaaatttatcttctagaaaactattgcggcaaatctagagaaattgttccagacaaagcttgctgaagctgaagaaaagcataagtacaacataaagaccccgacagaagaaaataactgcctcaggtatgggatcttccctcaggggtccttggctgggttgcttttgagagcagaaggttgttcaagtgactgataggtcaggtcaccgtcttgatctctgggaggaggtaaacttctggacctggacacacattgtggaggtagacttttcatatctagccttttctcctgtgtgtctgtttttgtgtaaaacacaggtaaattgtcagtgggttctgagctgctttgtcccacgactgaggattgtttttcagagttcagtgggttttagcactctgattctggcttctgttgagactagttgccagtcaccatcaccattccctgaagggccttcctaaaccaccaacttagaagataagttacctatttcatcaatttccattggaaatatgatctcccaaacaccacgtttcaccaaatgtaagccaattactgtgatgagagaagatgcttcctcaagctggaagaaagccaaattctcttacctacctgccagcaaatacccccatcgcctttacccgtcgaggtttcatgatatagtgaccatcattccttttataggcagatgttaaccacaaccacatatgaggaaacttcagaagtttctgagaagtcctcatctgccagtcccaacatgtatgagtctgacgttcctgaacacaacagcaacaaaaagcaagcatcgtaggtaactaactgctcctggggctgagcgacactgccctgggaggaagctacggactcttctggagagacgcacgggaaggctgagctcttgagttgttctgtacttttgtcatttttcacaatttgctttcttccaatggatagaaatatttgaattcttatcctaattatatcttggctctccattgagaactggtgtcctctgtactggagtcggacttctgtgggctgtgtgctatgctcttttttacttttcacatgagactaatttgaagggtcttctttttgggtgatccttgcattttggggtgtgacttttgtccccctgagggtaaacagcaattcattgatttaattccaaaatctttattccctcccatatcagactttttagcccagtgacttgggaagagtaactgaatatttacactgtctctgaccatcaggagaactcaaatgcccacagagcaggcaacaaatccatggaaccggagtgggcacagagtaaccagtcacagaggcaggatgctagaggaggtcggtaaactcagagccacacccttttctgaccatggcacttcttagactcattggactgcctgccacttgggtgcatggggtcattatgattaaaaaaaaattctggtttttatgtggaagtgcttttaagtgttggcaaggaatgtcaaatgttcaccacgtgtgaacatgccaattgtaaaacaaaacaacaacaacaaaaaaacaaacaaagcaaaaacaaacaaaaggatcccctagaaacagtaaggtaaatctatttttcttaaaacaaaacaaaacaatacagcttttgtctcactgacagtttacttaggagggaacagggaatataaaagtttataggtacagattcaataaaatatatactaaagagtaatgcgtagaacaactcagtttcttttaaaaagctatatgaaaacataaaaataaccctatacattaatatggaatttgaaaaacaaacaaaattcaagatagagatcctgctagatcctgattcaaacagactgtaagaatgcaagaagatcgggagatttttaacactgactggtatttaatgttcaaaattgctttggctatctaaaacgtacctcatccttagagacacttgggtctctaaactattcatatgtaagaatattccacctccatggacccaagtcagagcctccaagtgagggagtaaggcaggcaggtgaggatacagtcagggaggacagagcacagcacagatgttgatgttggaggctgtaagcatgtggcttcaccatgctgccattgcttttagtttttgtatatttatgaaatttttcacaataaaatacttgttttagaaaataagttttgttttaatgttattatcctacaaaacataaataaaaccgtcttttataaatacttctagaaaataaacaaaaacagaatttcctgatggactattagctagaagtacattaagtaaaaacctgtaagttacctaaaaactaacaaaaataatttttactcctttttttaagggaaaaaaccaaacaaaccagggtcaaatgtagctcaggctggcctcaaactggttatatagctgaagatgaccttacactccagaccctcctgcctctacatcccaagtgctcagtgtggtccaccacaactggcctcattttccttaaatttatctacatctacttatccagtcacacgttgcatgtatggagagagtgtgctttggaggtcagaggaaaacttatgggagccaattctttcatcattttggtcccagggatcaaaccttgttaccagtctgtgcagcaagcccccttacccgatgagccacctcaccagccccccattcattgaagatataacagaaatgttaacattggcgagtttaacttttgctcatgtgtaggcatgtaaggagagctgacatgcatgctcacatgtgcataagtacatgtgtgagcacacacatgctttggcaggcacatgcatgcagtcttcctcaatctccaccataatcagggaggcaggggctctcgattgaacctatagctgtcctccgataccactggtctggctacacagcttgcaccaggaatcttatccccaccctcccagtgcagtagcaattataggagggacaacatgcccatcgcccatcgctatttacattggttcctgggagctgaactcaggcccttgagtttgcttggcaagttctttaaccactgagctatctcctcatcctggtccaggctaacccttaaccacacttagcctcagaagtgtttttacagttaatgctctccacaaacaaggggaccctttcctttccattatcccccatgctccctaatagctctcactctgaaggactacatgaaatacccagagactaatgaaaaactaacctggaagaattagatactgcacagaaaaaagtttaatattttttattacctctgagaatttcatgcagcaaaatgctgatgatattcacccctttctcaccccaggtccccgctcccatcattcaccccctttgttaacttgtctcaggtccatgttctttcacccactctgttaacttgccccaggtccctgctcccgtcattcacccattctgttaaacaggtttatgttccagtcttgctttcttactcatgcatcttcaagtttgtttttttcaagacaagctttctctgtgtagtcctggctatctcagaacttgctatgtagagcaggttggctttgaactcagagatcctcctgcctctgcctccagagtgctgggattaaaggtgaacccatggaattcagtttgtgttgcccagctattcttgggagagggacctgccttggagtgtgattagcctaccaaaggttgctccaatttaaaaaagcaaaacaaaacatacatctaagtgacagtatacaaactgggtaggttatatttagaaatgtgtgtgtgtgtgtgtgtgtgtgtgtgtgtgtgtgtgtgtgtacaacagttaatgagaaaggaggtcatgtatttgaaattggaacattacatagaaggatttgaagggaggaaaaggggaaatgatgtaagtgtaacctaaaaaacaaaagaaatcctaaaaaataaattagactcatccacacaaaagtgcacagataagccatgtgaactgtggagagcacacatcattagggagggaagaagagcttcttccgtagtgtgaaggtgggctgtgtcatctgctttcccttgttcctcctgtcgtctttattgctcacgtcatagttcacgccagtcaggatgctaagaatgtcatctcctctgaaaaagaaagcagcataaagcatatggggcaaggaagtgcccaccgtctcactggcagtgcccaccgtctcactggctgtgcccaccgtctcactggctatatccactgtctcactggtagtgcccaccatctcactggctgtgcccaccatctcactggctgtgcccaccatctcactggctgtgcccactgtctcattgactatgcccactgtctcactggctgtgccaccttctcactgctgtgcccactgtcatactggctgtgcccagcatctcactggttgtgccacccactgtctcactggctttgccacccaccatctcactggctttgccacccactgtctcacttgctgtgtccaccctccctctggctgtgcccaccacctcactggctgtgcctgaggtaggttctctagttctgtctctctctctgtctctagttctgacatttgcagttgaaagtcactgaatcaagacttctcaccactgttctggcaactcagttttctcagagcacacagagttacttttgtgtacttggaatctctgctggttacaagaaaccagagttccaatggaggagctagagaaagtacccaaggagctaaagggatctgcaaccctataggtggagcaacattatgaactaaccagtaccccggagctcttgactctagctgcatatgtatcaaaagatggcctagtcggccatcactggaaagagaggccattggacgcgcaaactttatatgccccagtacaggggaacgccagggccaaaaagggggagtgggtgggtaggggagtgggggtgggtggctataggggacttttggtatagcattggaaatgtaaatgagctaaatacctaataaaaaatggaaaaaaaaaaaaaaagaaaccagagttcctatcagatttgctttccttctctgttaacctatgtgttcctccatgtttcccatgttgccatttggacctcacaaatgcctccctttcttcccccagtactctctgcctaaatcagcattgctcctacaggaacatccacagatttctaccaaaatgtaggcaagtaaaggctaaacatttcccatagctacttccccacctctgacaccagctgtctgagcaatcttgtggagcaacctcttcatcaatctgcatagctgacatggatcctgtaggactcagggtctgtgttacaaaatgaaagcactgcaatggtgttcctgtctactctccacatgccatgggaaattctcactcttcagacaccagacgataagacagagatgtaaaaggagcccgtagaagggctcctcattgttcagctatcagccgggtgtaagtgggagggaacctgaagtatggagccctaatttaactggagatgaaccatatgccatagggctatcatcccacacttgtggcttcttaagcaggtcaaattagtagagacatacagatcccctgctcttcagtatggtcacagtttgcaaagaagattcaaggctagatagcaattagaggatttctttcctaatttttaaaaattatatttacttatgcacacaggcacatgacatggttcacatgtggtggtcataggacaatttaaaggagttggtcttctccaccatataggtccctgggtatttaactcatgttataagacttggaaccaagtgcctttacccagtgagccatcttgacagctctaaaacatgccttctgacaaagctggtaatggacagttcaactccaggaaatgagtaattctctagatgttttgtgcttgactaattgtggctcggccagcaaagttaatctttagttttccgacaggaacacaggaatgctcccccttgggggtttatgggtgctccctccagtcctcaatgcagtcacgacagctccggggtgccttagggtcattaagggttacttccccgaagatcccatcgcctgaacacaccaggcccccatgggctggggagttgatgccacctgtggtcgccctgagccctggttcttacccagccagcaaagccagtaaagaaaggagctacagtcctccgcgccctcccgggctccgcccgccatcccctgtgtgccttcgcggcactcacagcgacctccggggccgggcaagtatgcgcacggcacagtggccggggacttagggtcccgggctcgcgcagcgtcgcgagtagcgctccggttacaccccgcaggtcacctacctgtctgcccctaagtggccgcttgagaggctcaggtctcagagacttcgctgcgtgccttaggctccccaaaatggagacgcccagaaaccgaaagcagacgtggcagcaggcgcagcatctctgagccctggctggcatcctgggccaggctttagcaaagacaaaggtcctctgagcagtcagcatggcagcagaaaagcgttctctccagacccttacttgacttcataaagccaaaaaaaaaaaaaaaaaaaaagtctttggctagatatgtatcccacttttaaatacagaaaaacacaagtaaaatagcaaatatctttatttctactgaaaaaatataaaagcaaaattctaggcctttaggccaaggcttgggaatgtgatctctgtgactcaatgctccaaggtatgctaatcataaaacagcgacattcctctacccacccgcttcctgggttcaaagagtgttcattcaaagaatgtgctattgttaggggctcctagaaattgtcttgagagataaccggaacaattaccaggtattccttgtgactcttgtggctttgcacttccttgtgattcttaactggtatctttggtattttccaacaacgccctccccacttccttgagttgtggtttcttcctttaaatgcccccttacccagctactcggggcaccatggtcctctacccctgtgtggtgtatgaccgtgggcctgagagcgctcttgaattaaaagtcctcttgcagtttgcagtaagaccgtttctcgtgagtgatttggggtgtcacctctcctgagtcagaacgtgtgggagtcctcacgttgtgggtctttcactaccactctgaacatgtgggcttcctttcttatccggtggagtcgccccagtgggaggagacaaagtgtcaatacattttctgtgttactctcttgcatgggcctgtcctggagagtggttaatatacatagcgacactcccctggagaaaactgattttcccttacccagcagctatcagttgcacctagcttttcggttaggggcagggctctgtccacttccttgcctcagtgctgggattttgtccggtgtgagcctgtgcgagtcttgtgtgtattagcaaagcctccgtggattcatatgtgcattaacattagttcagttgtgtcaagaagaatttccttggggttatccactctctctgtctcttccaggcttcccaccttctcttgtgcatagatccctgagccttgagtggagggtgtgataaacacattccatctagatctgagtgctccaaagtctcttcctcactacactgtctagttgtgggtctctggtaattcccgtctactacaagaacttctctgaccaggggtgagtgaggcactgaactatggttatgggaatccatcattagaggtctgcttattactttgttcttttagtagaataacaggaggcggttttccccctggtttcaggttcttggccactttaacagtgtcatatatgagatgcatctcctggagtgggccttaaacctgattttttaaaaagtggtcgttccttccataacatttatgtcactattgcacagggtataccttgcaggcaagtcacagttgtatgtcacagggtattaaggtcaaaattatttaggatcttgagttttgtctcattccgtctcattcttaaatctaaataccactcaaaaaattaccatttgatttactttttaacaaagcaagtgaaagaactcagtggggaaacccccactcagttcccaattcggcgtgcacccaagaatcacgaatagaacacaacaccttgatgtaacaacaagaggttttttaatggcggagctccgggtcgaaacgtatctcacacaacaggagacagtggattcgaccacgaggcttggaagctaggggtttttatagaaaaggagtggggctgggggaggaattggcgcggtttcacatgattggcccatttaaacatcagcagcctgtaacatttaacttaggtcaaaggggtgggagctagggaggcgatgggcctgcccgggcatgtcctggtctgttctgctatgttctcagccccaggtttcaaagctcacaaacaactctttgggctatttaacatacattacatgaattacagttttatttcctttcattcccctcttcttctgtttagactaattctaatcatagaattttagagattggtgtcccctaactcttcatctacctgaactataagttgatattgcctttgaagaaccatgagttttactgtatcaattttactctggatgaaagccattcctctatttattatacaagggccgaaaactaaagctaagcatatcataaggattggtccggctacagcggaaattaaagaagttatccaagatggtcgcgattcaaaccacgactcaaaccacccccgttgagcatcccgttcctgtttccttcgctctaatctttctctcagtttctgcatagagtctctaactatttctgtatgatctgcatagaagcagcactcttctttaagggcagcacacagtcctctttcctttaggaacaacaaatcaagacctctcctgttctgtaaaactacctcagacagggaggtcaaagatttttttaaagcgtcaatggacttctctattgtcgctaggtcttcattgacagcatctctcaaagactgaattccctgtcttccttctatcaaagctgacactcccgtccccactcctactgccatacctatttccatgaatgcagccagggttaaagtaattggttctctttttgaccgccgcccagcatagctttcttctaaactggatgcagggtgataatatatgcggggtaacagctggatcatgacacaaaaatcatgagatgaattaaaaaccttagttgatacacagggagtaagtcctgtattgcaagcccaccatccaactggggaaggtacaagatagtaattagcttccgttctggacacagactgaatttgtccgcataggtgtttgtgagtggaaggtggggtacctatacagagacctggattcctcgcggatacttcagtcagggtcagtttttgtcctgtaccccaagagcaggaagtatggctgctggttctgttgaaatctccattgaaggcgattccttcataataaggcggacccgaggacaggcatagccagcagtcctcagtagcgcttggatcagttctgttaagggcataaaaggctcctctcactaggttaaacatcctctgtcttgaaggaatcgcgggggtaatagttagaggtacctgaggagtgggaggttgggtgatagcggccatattaagggggtccgcaatcactggagtaggctgagtaattgtatgggtaaggggtgtgaacttggttggggggcctaaaggattgtagggggtctctatttttaatctgatagtgaacaataatnnnnnnnnnnnnnnnnnnnnaatcctaagaccccaggtatacccttttgtccatcccagagctctcttccctggttcagtgaaggtgacacggagcggatggcaccagtcagtacactcgtctaggtcaaatcctccaggcacataagacactagggaatagttggctgttactctaatatagtcccagctcgaggagggcttccagcgggctgtacctgaagtctcgcaaccccagctcttacaaaagaagtcagccttacctccacacgttggattgagggactgactttggtggggcccggggcagacatagaagggatgggttcgaagcatacttttatccctttggttagagcaaccaccccatgggtctctcgaatgtttttctacgtatggagggggtgttaaaggtgccctctgaatgtcagagtacccctccaagtctcatctaggaggggctcctatagccaacttacagatgtcagggaaaagatcaggccaccaagtccacagagggtgtacctcggcgattgtccatacagccctacccccctcattgagtaccttccacgtttgttgaacaggactgtgggggttgaagtcttttgggatcgctcctacgaagcaggcgcaacttaaaaggattagtagtcttctccaaagtccactcatcatggctgactccagggggtgctctcttgacgtgggatgcgtggacccaagtggggattccttccactttgaccgcggtgggcgttgtcagtagcactaagtagggtcccttccacctcggttctaggtttcccgctcggtgtctcctcaccaggactgcgtctcctacttttttttttttttttaaggaatataaaactatttattgaccactgttcaccattatttacaataaagtaaatatacagttggatgacattctgatactacaaagttacttttctggctcattgaaccataacccaaatactgaaaagactgatcctaccagtaaggaatgagtcagggtaaagaaaaagcatgcaggtcattaattgatattagcaaatt

SEQ ID NO: 2 - DNA, 1679 bp, Mus musculus
acaagtcaggctcagtcaaaggactagctagagggtgaattcctcctcaagggactttcaggtaataactggggacaactgaactgtcttctaagggaagctcctggggtggatggccgcggaacccttctaaacaccactggctgggtttgcaagtcttcaaggcagtctggagatttctgccttggcatctcaaccacttgggaataaacacagcaaccatgagttctgaaacaccttgattgggagcccctggcctagcaagactgccttgtaccatggaccccaatcctttcatctactgtacctgctgtgactgctgcaaattgggacaaccaaagctaatcaagaccccttatccacttccaaagcaccccacggggaagtttaagccagttttacctccaccaatttcaaaagaacacaactcactcctgtcccaaccaggaaaatctactgtttccccaagggacaaggtccagtcaggaaacacagagagcagcaaagcaccttctgtgagtaaaaatgggaaaagggacagggaagtgattcaagtgtcacctggctatacactcattcgaaatcgagaacagatatcagtcaccttgggagatgagatgttcaacaggaaaaagcacttggaatcagatgtcttgagcaaagtcaaattttccaggactgatatcatttctgaccttcaggagcaaattgctgagttgatggcaataatagaacagatgaacagagaccagcagtctgccctgaaactggtgagtgacccttgtatcagccacaccctcatggctaatacattcagattacccaagtgccagctctccaaagatctggatctccgctgttccaacatgaagcagaagtttgaaaccgagagcagggaactcaaagagactcacagagaggagctcgagaggttagagaacaactacaaggaggccctgaaggcagaaaaggccttggccgaagagaaactagataagatgagcaaggaatataagtatctgaagagtatgttccatgtgtttcaggatagcatttacgaggaaatggaagacaagtggctgagacgaaaggccgaatgggagaaagatgagaagatggagcgggaaaagatcctgctacaacaaaaatgtagaataataaaaaagtttgagttacagtcggaagaaaaaaagaagaaaatgaatgagtccatcagtgctgtttctgataacttcgctcgagagaaagagaaaactattgcggcaaatctagagaaattgttccagacaaagcttgctgaagctgaagaaaagcataagtacaacataaagaccccgacagaagaaaataactgcctcaggcagatgttaaccacaaccacatatgaggaaacttcagaagtttctgagaagtcctcatctgccagtcccaacatgtatgagtctgacgttcctgaacacaacagcaacaaaaagcaagcatcgtaggtaactaactgctcctggggctgagcgacactgccctgggaggaagctacggactcttctggagagacgcacgggaaggctgagctcttgagttgttctgtacttttgtcatttttcacaatttgctttcttccaatggatagaaatatttgaattcttatcctaattatatcttggctctccattgagaac

SEQ ID NO: 3 - protein, 408 aa, Mus musculus
LGAPGLARLPCTMDPNPFIYCTCCDCCKLGQPKLIKTPYPLPKHPTGKFKPVLPPPISKEHNSLLSQPGKSTVSPRDKVQSGNTESSKAPSVSKNGKRDREVIQVSPGYTLIRNREQISVTLGDEMFNRKKHLESDVLSKVKFSRTDIISDLQEQIAELMAIIEQMNRDQQSALKLVSDPCISHTLMANTFRLPKCQLSKDLDLRCSNMKQKFETESRELKETEELERLENNYKEALKAEKAEEKLDKMSKEYKYLKSMFHVFQDSIYEEMEDKWLRRKAEWEKDEKMEREKILLQQKCRIIKKFELQSEEKKKKMNESISAVSDNFAREKEKTIAANLEKLFQTKLAEAEEKHKYNIKTPTEENNCLRQMLTTTTYEETSEVSEKSSSDNMYESDVPEHNSNKKQAS

SEQ ID NO: 4 - DNA, 84476 bp, Homo sapiens
tcctcttaccttactgctgctgccccagtctttcctgcactccaaagcagtgtctgtgtctgatctcagcagcagcatcacccacaaacctttacagtatttgggcacagtcatcttttgttttgaaggtaaagggtaaaagatgtggtgaagcattccctgagacctgaatgtggttaatgatgagagtgaatctttagggttatggttcctgctgtttcagagctgagctccagatcaagggcccgtgtgtttttgtttttgtttttgttttcttcctcttctgagatggagtcttgctctatcatccaggcttgaatgcagtggcacgatcttggctcactgcaacctccgcctcctgggtttgtacaattcttccacctcaacctcccgagtagctgggactacaagcatgcaccaccacacccagctaatttttttatttttagtagagacggggtttcaccatgttgaccaggctgttcttaaactcctgacctcagttgatccacccaccttggcctctcaaagtgctggaattacaggcatgagccactgcacccagcccgggcccacgtattcttgaacaaatgtaggtttctgtgtgtgcctgtcctatgcagagccctctaaagcccagggctcagaacagtggcccctctttctaggtgcaagggtagcactacaggctttcacgggattcctgtggctacctggtcgggtctattcaggatgatccatgggagttagcatagcaccactctaaagtcagatgttgaaagccaaagatcaaagagagttgagcaagtgagcaagttggagataattacaagcttcttaagagaacactgtcttttccacactgggagtgttctcatagagccacaaatagcgctccacagatggaaagcctccgaatgctcccagctgaccatgtttgccacttcgtgaatgctgcagcatcacacaagaggatatctatttccccaagccctgtgcagaccaattttgataatattgctgtcagaattaagttgcagtttctctcattcatttttcaacttatactttgttttactattggtggcctcctccacctctgttccaaatagtaagacactttgctttaggcgaagttactgagaatgccagcacttccccaatttcatccaagagaagagcacttaacacttagcccctaaacaccttcatttccttctcctcagctgttttggaactggcgaagctttactcatgtccaaaaagatgaaaggagaatggggatacccaagtagtagtaattagtgctgagcctttgccaagtcgagtggctggggtattccttcagcccttacttcctctgtatctctgtttttagccatgcttcactcaagacccaaatcctgctgcttttttttttttaatcataagaaaggatttaaatataaaattttacacattaaacacactcaaagtaaatattcaatctctggatggagacagattgtctagatgactaatagagtctatcaattcttctctaagttatttccctccttttaatctttgaaagtctctcttcatctagcctgttcatggtgctcagagttgaagcagccatagtgcaaccaagacgcttccctccatcaacacaccgaggctggcataacagagagatggaaagagcccagttctccaaggacattgctgaatctttgcaccaactctgatagcactgcctccagactctatttcatgaggttaataaacctctttgatgtaagccacttgcaatcaagcaacaggtctatgcattttaactacacatggcccacactgagaaatcttgtcgtaaatactggtgtcctcagagctctgttctagaccctcttctctccttacacaatactctctctatatgtgatctcactcgctcccttggcttggaatagtatccactctgaagactcctaaatctgcttctaggccagaatcttcctctgaacttctaaaatatgtaagaaactctaacagacgtcaccacttgtctattagtctccctgcacctcaacatatccaaaactgaactaataatctgctccctagaacctgtttatccctccacactttcctatctcaataaatggcaccacggtcaactcaattgctcgagctggaaagccaggaatcatcaccttctccttttcgctcatcccagcatccagtcaatcaccaagttctatcatgtcttctctccatccccactgctgctcctcagtcagggccatcgtcaggtcccatgacgaccactgccacagacttttacctggttttcctggcccttccaattgcttccctatattgcagtcagaatgatctttctgatatgtagatctagtcagatctcttctctgtttaacactgctgcctgactcactggactagaagagtaactcctgctatgaactcccactgcttctggcaagtctcaatatgagtcattgtggctgcatggtgacttacacctgtaatcccagcactttgggaggccgaagcaggaggatcacttgaattcaggagtacaagaccagcctggacaacatagcaaggcctcatgtatactaaaagtcaaaaaaattagctgggcggccgggcgcagtggctcacgcctgtaatcccagcactttgggaggccgaggcgggcggatcacgaggtcaggagatcgagaccatcccggctaaaacggtgaaaccccgtctctactaaaaatacaaaaaaattagccgggcgtagtggcgggcgcctgtagtcccagctacttgggaggctgaggcaggagaatggcgtgaacccgggaggcggagcttgcagtgagccgagatcccgccactgcactccagcctgggtgacagagcgagactccgtctcaaaaaaaaaaaaaaaaaaaaaaattagctgggcatggtgctgtgcacctgtgtagtcccatctacttgggagtctgaggcagaaggatcgcttgagtccaggaggtcaaggctgcagtgagctatgcatgcagcctgcactgccactgccactgcaccgcagcctgggtaacagagtgagctactgtctcaaaggaaaaaaaaattaattatgcttttattgagcttttttattgtctgttttctcattggtctctaagttgtattgagtataagaactgaggtatatccccacacctagcaatagtgcctggcacacagtagacaacaaatgtgaagttgagtgaatagatgaatttataacaatattttgtaagctaggggttgtgacccaccaggatcatgaaatcaatctagtggattataatcagctttaatttaaagaagaaaaagaaatagaagagaatagcaaataataagagtattatttcatgaaatttttttattacaaaatttgtaaaatgtatttcttataatgagtggcagtaaaactaaaatgaaagccactgggttgtaataagcaagtacttttttctatagtaagaaaaagcagctttatttaaaaaaaaaaatcggaaaaccttgtgactgcaaaagattcctgccttgggggatttttactttcacagatttcaaagccttaaactcgagggaaaaaagtgtctagagttttaggtttctgtgagtagatcacagaggaattaaaaatccatcacagatcctgcctggtaactattgccatagaccaatgaagcctaaaagtgctgttgaattctatttcctctgaagatatatcttaaacttttttgtcccatgactgatgacgaaagtggaaatccagtgttaaaagtatgaattctttgctgttgagggtggtcactgatttgtgtcttggagaatttaattggctgtttctcccaaccttctctcttgaagaaaagagccctgagccaatgaggagctactgttctgtgtccatagcaacaaaataaacaaactttggcctgccatctcccaagggcaaacctcacaactcaggcccaagtcacaggaatctgaatggtggggtgaccttctcctctagtttaatttcattgcaatactgagaaacttcaactgttttgtctttagaagggaaattcatgtttgtgccaggccagcctttgtaaaagcctttgattggattcactagaagtctgtcttcccgcagtacatatactgtgaattttctccttcggcatttcaaccacttggaatggccactaaagtggcttttgatctaaagtaaactctgattctgtgttgatggggaaccatttctctctaacatggtggtttctttaagatgtttgacttgggccacatgagaataacagatctttgggcagtccaaggtaagctctttggaaaagatgttttatattattttttctactgattattaatactaaccagtaacttctctgaagcctctgccggctcactggtgactattgttagggcaagcctcaggtaaaatcatcaggtagaagtgcaggaaagggaaaaaagggggagaaaaaatccttacacacactcacacacccctctataattagagctatatgatgtcaagccactgtaaatgcagatctatctgtgatgacatggaaatatcaactagatatcctgttacacaaaaagaacaagatgcaacattgtgtgcaaagtatgctctcacttatgcaaataatttaaaaaatctattatgcttctctacaggttaagttctatatgcaaaacatttaaggttatatgcactcacaacatttctggaaggatgccccaaaaatctgttagaagtagttcccacttaagaagctatgagaagtcaagggctgattttagctactgaaatattaaaatactgccatataggcagggcacggtagctcacacctgtaatcccagcactttgggaggctgagatgggtggatcacctgaagtcaggagtttgagaccagcctggccaatatggtgaaaccccatcgttataaaaatacaaaaattagccaggcatggtggcgggtgcctgtaattccagctactggggaagctgaggcaggagaatcgcttgaacctcggaggtagaggttgcagtgagccaagaccacaccattgcactccagcctaggcaacaagagcaaaactccgtctcaaaacaataataataataaataaaatactgtcatattgattggtagatgaccattgtccaagccccttgcatgtcctccttgccaccttggttgtcccaactcctcccctggcacccccagaccacctcatgattcagcaactaaggggttaatgcctggcatggaggtgggagtgagatctcccaggaccctgttccaaccctggttgattattcaatagccttgtcttactggttgttaaatattttgagtatcactcccatgggtgttcaaagaaaaaggcctttatttttattttatttatttatttattttttagagacagggtcttgtgctgtcacccaggctgaaatgcagtggtgtggtcctagctcactgcaacttcaaactcctggcctcaagtgatcctcccgcaccacctgccaagtggctgggactacaggcacactccaccatactaggctatttttaaaattttttgtagatacagagtctcgatatgtttcccaggctggtctcaaactcctagcctcaagcgactctcccacctcagtctctcaaagtgttgggattacagacatgtgccaccacacctgtgaggccttcttttttttttttcttaagagcaaaagaatatataccaagacattgtttatcatgggaaagaggaaaaggaaacaactacacattcatcaaagatcattgaaaatctatgtaaaactccactgagtgattgtatcacccatacaatttacctctgctttctggcttttgaatgcaaatgtttaatgttatttataatatggtaatgacgattacaacattttggcagtttcatctgtgaatctcttttctctttgtttttgttttttgttttattcatttatttattgagacagagtcttgttctgtcatccaggctggagtgcagtggtgagatctcggctcactgcaacctccacctcccaggttcaagtgattctcctgccttagcctcccgagtagctgggattacaggcatgtgccaccatgcctggctaatttttgtgtttttagtagagacggggtttcgccctgttggctaggctggtctcgaactcctggcgtcaagtgatcctctcgccttggcctcccaaagtgctggaattacaggcatcagccaccataccatctttttctctttgttgagctagccccaaccaccatgatgagctgattacaaccactaagtttactagtcaggtaagaaatattcatcaaatgcccgttgtggacaagccactttgcaaggcttagtggaggtgttgaggcacagagagcactccatagtggagtcctggccttcaagaagagagaaggcagttgctagaagtgggcctgccttagcctctcacttcttgccccatggactcctgctaaatctcccaagttcagggttggctcctttcgtacaggaagcagatacaaggttctaagcagaagcagtttcttttttgctactgttgtagccttctttcagactctcacctgaattccagccccttgtagcatcatcttcccacctgggcactcgatcccatctgcttctctgacctcatctccttgacttggccctaacaggcccccaaacccagtggagtatggacagttataaatggcggccctgtcacctgctcttcaggcctttgctgtttagccagtctcctggactcctttctagccctggactcctttctagccctgacctctattgcagaagactccctagtcccaggcctctggcccagccaacccctgcacacgctgcctttcttccaaggccaggtctcttgcctttgctccactgctcacttagctctctttctgccgactcctctgctgactgcaagctccctgagggcaaggtccaaccagcatctagcacaggactcacagcacgagcctctaaagatttgtactgttaaagcagcagttacaagtgagtgagttttagtatcctcatatgtaaaacagattcaaccttaaggtcctctgtagctcttaaggtcattagacaccatcagtgggtttctcaagcatcagtcgtgttggagacaaaggttgatttcattttttcagcaggttcttaagcaaatgtattccagtgtaatattgaaaactaatcatagacttagacatttgagttaaatctgctatcactttaatgcttctgttaggccattgattcttataacatttttggcatttgtttttattactaatgaaatatccactgacatggctgggcacagtggctcatgcctgtaatcccagcactttgggaggccgaggcaggagaatcccttgagaccaggagtgcaagatcagcctgatcaacatggcgaaacccagtctctactaaaaatacaaaacttagccaggcatagtggtgggcacttgtaggaggctggaggcctacacctacaggaggctgaggcgggagaatcgcttgaacccaggaagcagacgttgtagtgagccaagattgtgccactgcactccagcctgggtgacagagtgagactctgaaaagaaaaaagaaaagaaaagaagaaaagagaaaagaaatatccactgacatcatttaaaaatcaactaatgttaaaaattcattaaggaaaagtctcaatttctgccccatcccctgacctgtcagttctacttctcaatgtgctcctagaggcaattattttcaactctgctatctatttctttggaattttatttacctcatacttccaagtaatttgtctgtgctccgtatgttaatttttctttctggtacagcagatgaggatttggctcttatacatccccattccactcattcttcccatgtagtcacagttcactttttggctaagtcactattaagtatttacatttgatacatatgagtgtgtgccatactatgattatgtttactttctcattcaatattttttaacctggagtaattgcacattttattttcttaggtttctatgtttctattgccaatctctcacccacactcccaaatgctctggttctggttgctctgtaacaaagttaccacaaatgtagtggctcaagcaacaatcttacaattctgaaagtcaaagtccaaaatgagcctcactgagctaaaatcaagaggtcggcagagctgcattccttccggaggctccagggggaattcgtttccttgccttttccagcttctagatgctgccccgattccttggctcctggaccttttcctcaatcactcctacttcttcctccattatcacatcttctctgactgataattcaggttaatctttctatctcaagatctttcatttaatcacagctgcttttgccatgtaaggtaacatagtcacactttccagggattaggacatgcggtatagggaaagggacagtattcatcctaccatgtgctcctacacatctaccagctgcctgtcaatatcatcaggtaatctaccagttccaagtcctgcaccctctgggacctctgatgtgtgaattggctccatcttgttcataccctgtctttgcaggcacataggctatagtgagctatggagagagccctagttactatgccaaacatgtacggacatcccttgtgcaatcttgtctcctctcccattttcttgctcttgtggaactaaatctcttttaatgctgtactctaattttagttggattctggaaaagaaagaagataagccagtgtggtcaagccaccatgtttatctgatagttttctttcatcaagattctcataataggggttttgttttttgggagccagggaaggagtttccactctgtaattcaagaaggtgaccaggaatgagaaacgaggagattcatttgcactgtagctcaagcagcagaactaattttccaggaagttctgtgcagaacttgctgtgggaatttctctttccttcagtgagaactggtgtggcctgctggaaaggaaggagcttgggagtcaaagagatttgtgtttgtttccagctctgcaacttgctgccgccgtgacttctctgagtctcagtagcttcatctatagtatcagcataacaataattgagcagttttacctggctcacagcaaggactcggctatggcaaattttattttattttaattattttgttttatttttatttgtatcttattttattttttgagaggaagtctcactcttcacccaggctggagtgcagtggcacaatctcagctcactgcaacctctgcctcccaggttcaagcaatcctcccacctcagcctcctgagtagctgggactataggtgtgtgccaccatgcccagctaatttttgtattttcagtagagacggggtttcaccatgttggccaggctggtctcaaactcctgacctcaagtgatccatccacctcggcctcccaaagtgctgggattacaggcgtgagccaccatgcccagccagttatggcaaagtttaaattgctttcaagtcaagtctactgagtagaaagggatgagctgttaacctatagtcaagaccctgcaccagatcaacagcttctggaatctaccattgttctttgggtcctccctgggttcttcccaattcttctgtatttttgctttgattctaaatggtttaaccttctgctgttgtttttcaatttcagcaagagcctcctgatctagcagccaagactccccctgacctttggccatgtaccccaaccctctcatctactgcacctgctgggacccctggaacttgggaccacggaagctaatcaagacccctcaactaccacgcaagaactccacagggagttccaagtaagaattatctgggatggggtaggcacagggaccttgggatccatttgtagcctcatttctctcacaagatttctaaaacagcaagtgtggcaggaaaatcccaggtgggccagaaagcctcgctttccccagcttccctgccagctggttggctgcaccctcatcttgccagccctgcctggggtttgtgccattttaaatgaggaagtctcagtgttggtgcaacggcaaagtgcagcttccaaccaaagggccctgatggcagctgccgccttcatgtgggataaagagctttgggaatcgggggacaaactcttcctgggacagtgaacaagtgccagggccttgggcctgagttttaaaggcctcagattttaaagattccagctatcagatcatgcattccaattttgggtcactatagggatgtacttaatctgggagtgttaaaaagggtttccgaatttccaatgttcttgttttagttatttgtttttcactttcaggctaactcctcttgtaccagctccaaaaaatcacaattacctccaaccaacaaaacctgttgtttccccaaagtaagtattgttttgttttgttttgttgttgtttttgagatggagtctcactctgttgcccaggctagagtgcagtggtgtaaccttggctcactgcaacctctgcctcccagtctcaagcgattctcctgcctcagcctctcgagtagctgggaatacaggtgtgcgcgccaccatgcctggctacttttttgtattttagtagagacggggtttcaccacattgcccagggtggtcttgaactcctgaactcaggcaatccacccgcctcagcctcccaaagtgttgggattacaggtgtgagccactgcaccaagcagtttgtttgtttgagatggagtcttgctctgtcacccaggctggagcgcagtggtgccatcttggctcattccaacctccacctccctggttcaaacgattctcctgccttagcctcctgagtagctgggattacaggcacccattaccatgcccacgtaatttttgtatttgtagtaacgacggggtttcaccatgttggccaggctggtctggaactcctgaccttaagtgaccagccctcctcagccttcaaagtgctgggattacagtcgtgagccactgtgcctggccctaagtatttttatgtccatgaggcagaaatggtttcaggcatgtgaataaaataatctccctctcacctggcctgacttgaactaattgatgccagggatgttagagaattgccagaatcgaccttgatttcttgcaaacctcagatcctacatgtagattttggggtcctctgcatccacagcttccaaagtcattgcattgtttgattcaaagtcactgtatccactgctctccacaggggtgcccccagtaactgtcttctgccctggagcccaaagcttgatgtgtgctattgtcacagagccttggcgaccctcccgtgcatttagggtggtgactcactctttagctgattactgtcctgtgtctaagattttctatgggttgcatcttggttttaatcacaaattaaaatttttactcgcattttacaagcttagaaatgtaccttagttttaggtctttgtatgaatctttgtattccattaatttttttggaaaatatttattgaccacctattatttattaggcactgtttcaggtgctgggaaaagagccagaaacacaataaagtctccactctcctggcacttatattctagtggggaaggaaggggaagaggaccataaactagttattacatccgaggttggcaagtgctacatagaaaaaaaatgcaggcaaagcaggtaggggctgtgacggtggggatactttacgtagagaggtcagggcaagtgcctgtgtaaagggggcaaaaggagcctcaatgatgcctggggcaagcactcttggcagagggaccagcaagtccaaaggccctggggtgggaacttgcttggcatgtctgacctcttccaggaaggcagaagccagtgtggcatgagcggagcgagtgagcagggagtggtgggagatgagctcaaagaaggtaacaaggtgatgggtgtggtgggcaggacagtgaccccctcccaaggacgtctacaccctaatacccagagactgtgaatatgttacttgccaaagaggaattaaggctgcagatggaattaaggttgctaatcagctgaccttcagttggagagattatcctggattatcccagatcccatgtaatcacaaaggtccttctttgtatgtgaaagaggaggtcacagtgtcagagtcagagaaggagctgtgacaacagaagcagaggttggagtgatgcaattgctgctggctttggagctggagggaaaggccactgtgaacatatacacatatgtggtattcattttatatatagcatatataaagatttgaatgaaaaacaagtttaacttcaacatttgtatcttaatgggatacatttcattttctggaacatttgtttatatagaatgtttcattctccaataaagagagttccacacagttccctgaactgagtgtgtgtgtgcccgtttgtgtgtaagggggtggtggggggtgtcacctgactcacagagccttgactcagggagaatatgtaggggtccctctagctggtttatgctcctccaaaacagaagttgccccaacatcataagacaagtcttttgcctccttgggcaggaccttttcatgagcacccctactttggggccctcaggagcccggcttcagtgagttccccaactatcctagggatcccctaagaaggtcaggtcagagagcagaagtcagatggtggcggcctcagggttcagctcctaagctttgaacttctctttgctgtctggttgctttctgagcatgtctttctcttgcagaatgaaaatccattcagcaaggcaagaagagactaataaatcattttatgtgagtaaaggcaggagagggcggtgggactaaaatttattgagtgcctactatgtgcaagcatgggccctttacatttttatacttaccttgtcgaatcttcacaaagatcctgggaggaggtgctgttaatattgcacattatgcacggcaggtaagtggaagaaccacgacttgaactcagctcagctagattccagagtgggcatttaattgccactctctcctgccttgcacaagacaaacagagtgtctcagagaaactggacatgacagctagtccaggccagtgaacagctcatgcctagatgcaggaagtgctctgctgacctagggaactaacgaaagctggggagaggctgccgggacccctcaggggagcaggggcgggagggcactggagaaggtgatgagaaccaaactcgaaggctcttgacgcctgcctgggagtgtgggcccgacccttctggtgtctgggagcctttactggtctgacgcaggcacaggaccaagtaagagttacatttcagaaaaagcaccctttggtgggatgtaatcggtacattttactgttttctgtgtttatctagtttcttttcttttttttttttgttttgttttttagttttaggtctttgtatgaatctttgtattccattaatttttttggaaaatatttattgaccacctattatttattaggcactgtttcaggtgctgggaaaagagccagggaaaagagccatgcagtcctttaatggttagggaaaaaaatatacaagcaaaaatataattgccctctaggtagagaggaggatgaactgtggggggagcaagactgaaggcagagaggccagagcccaagagaaagatgatggtggcctggggccgtcaggcaggggtgtggagagaggagggtgactcacagagacatgaaggaggtgacaacagcagggatcaaggggctgcagcatgtgctgcgcagctctcagagccccagccttgccctggtccaggccagcagaggccctgcccaggtttctgacttggcgtctaatgggaaaaggaggaggaaatgacattttgtttgcaaccgtcctgtcattttctcatatgttgttttgtttttccctcacaaaagccctttgagaaagagttattaaccccactttctgataaggaaactgaggcacagagatgctggatggctactgtctggtggcagagccaagatttactcaggcctctgtgattccaaaacccgagcagttgccgcatgctcacctcctctgggctctggccacgagggtgaacacaagtcgggggcaggggcatcagtggcttggtttggcgcagagcttgagaggcccctagggacacccaggagcctgctaagcatcagatttgagtcggagagatgtgagaatgagctataatgggtgaagggcccagaagggcttgggctgtggagtcccaggtccctgtttttaagatgtgagtgaggcaataagagaagatttggaaaaatctcagcactccaagtctgccattttatcttactttcccttgatgcctaggaagtgatcaacgtgtcacctggctatcaacttgttcggaatcgggaacagatttctgtcaccttaggggatgagatgtttgataggaaaaagcggtgggaatcggagatcccggacaaaggcagattttccaggtaatgctgttgcagcaacatgcagctgcttggggctactcccacccagctcagcccggcctcagggacaagccaaagccgctatgcccacacccaggccactggtccctgctctggaggggccgcaagggcacctccctcctcgcccctgcttcctgatgatgcatctctccacatctgcctctctgctctgatcccatccgtgagcagatccaaggggcaggatgaagattgggagttatgtgattgatcccaaaggatagcaattgttcgtggggtgaggaatagatagaatagccataaattagtctgaatttgaggcatgcaaattaagtaaagtgagggtttctgggtggctggagtgcacttttttttttgagacagagtctctctctgccacccaggctggagtttagtggcacgatctcagctcactgcaacttctgcctcccaggtttaagctattctcacgcctcaacctcttgagtagctaggattacaggcttgcaccatgacgcccggctaatatttatagctttagtagagatgggattttgccatattagccaggctgttctcaaactcctgacctcaggtaatcctctggcctcagcctcccaaagtgctgggattataggcgtgagccactgcgcccagcctctttttcattatgtccaaaaatactactcagctcatgcccccgggagatgcagtgtggaaggttctggcctgactctaacccattagcacagctgtcctgtctgtcttcaggctccacccactctctgtcctccaatgccatatcaagtatatctccatgtctttcttttttcattaacagatgcagattcatctctacatcttttcattctaccctttaatctcttattcatatcttcttctctgatatcctgcccatgttcaggcatcttacttcttaactgcactactgaatggctctccaagtgcctcttccctcaggctgattttgctgtaagaattattttttcaacacacaagtctaaaagaccaacaatagaaaacacacacacacatacacacacacacacacacacacacacacacacacaatcatctacctatctgctagtgtattggcagaattcaaccaaaccgttagcagtggttacatctggggaagggattcaggttgagggtgagtctgaaggcccctcaagtagaatgaggccatgccatggagtctccctgatctgacctggcccagagggccacccaggggccaggggcattcaccctgcttatcttgtcttcccacccaggggcattcagcctctgctttcttttccctgcttatccacagccctctgcaggaagagaatgggtcatgcacctatagtcaagctagcaccgacagccacctcttggcctcacaaggaagttgtcaccagttgtgcacaataaaatatgataacctgtgcttgttgtattccctggtaaagttgtgggtgttgtttgtattgaagattgtgttcaaaagataggggctccctattattcaactttctcaagccttttctttctcttacccttgaactgtctcctcctgtatctcctctcttgttttatcagcccacattctctctgtgctcagttagacatgcaaagtggttggccaaagaggtcaaagcatcttgcattgaggacttcctctcagctccactgcacatggcaccacctgctgccttgtcactctagcccaaccagacagagctaaataatttacagataccatggcagccttagacccagaaacacagaaaaccatgacctgtgctgaaagccactctcttaaataccctcttagtcccatctctggcccaatccttgtctgtggttcacagccagcatcaatcctattgcacatcttctaatttcctaatcctctgaacttcgtcctctgtttcaactatcattaccaaatcaaggtcaaactctaataaatttctgacatattcttattttccttctattcggtagggcaccaaaccatcctgttcaagtctagtgagcttacccacaagagccagatctgagcctcaactgccctatagccaaatgccttctgtaagaccacccctatccctccacccccaccccataatgatagagcaggtgcagaacatggccagctctcaccaggccagctctcaccatgccagagtcagtcatgctcaggggcctgaatggcatggaatggtaagctttgtggatgatagaagaattacttctcctacaggaccaacatcatttctgacctagaagagcaaatctcagagctgacagcaataattgaacaaatgaacagagaccaccagtctgcccagaaattggtgagtgaccttacattagctaacatcttcatggacaaaataaaattaatatttttgaatcacctatgtgccaggcaaaatgccaagcactttactcatatgagccatgttgtccaggtgacaggaccctaaagattggactgtgtcactcagtagtatttctctgacatctttatctgtaattccaagaactcaagttcttccacaaagcttaactcatttatttccaggagctctccaagtacctctgtgtgtgtgcagtgacactgtcctcctcacactagggtgcacttgttgttttctgtctggcctttgtggtgcaattaagtttcagagcttgtgaggctctcactaacgacaccagcgcacttaatgtgcagggcttactctctgactgttaaagctgcccacacatcagaatctgcagatgtcatttgacactctttgtgattcctgaggatttcagtgacacctttttagcttttaccatctgtttcatctggtgacttcttcctcacctcaaacaggtgtgcctgttggcctggcctggagtgacagccagtgctgtgttcagaaatatcctccccagggttgttgaaccccaccccatctgtgaagttttacttcccagaaggcagcctctcaccctctgatatgccccagatgtgtctgaatcctacagtgacccagcttatgactcaggctgggtcctatcctgagaccaccctcctccgcctgccaactattgattcattaccttatttatctgaaaacactgccaggtttatggtctccttctatagaaaggaaaatgagactcagggaagttaaacaatttgcatacaatctctcaactgaacagtggtagatcattggacaaaatgaacattttaagtcataggcacagatcctgctgaagacatatttagagactatttccatgaagggatcctagactgtgttactgaaaatactgccacttgtgaagatgctatttgttgtgtggccctgtggaagggagtagtgttggctgacgctgggctgttctctgtctgtcagagtggctctgctgaccacttgttgtgtgacacagtccctggcttctccccagtagtcagagaggtacaaggacaagccctaaacccttgtcctagctgacagtggtcaccgactgatttgaagtattgatttatcctgagacactggccagaggatctgacatgttagaatgaagtatcacctgaaagtgagcaaatcctgcctgctagaatggaactatactgtcaacaaggattaacactagattttaagttcctcgaaggcaagatctgagtcttagtcctccttggctcttccaagccaagccttttgttcaataaatgattgctcaattggattacatatccaaaaatctgaaggccatgatgtaacagaaatgacgatctagcacaggagaccagacctacccaaaaaaaatagtcagtgaaagagatgcaccaacattatgaactgaataagtacaaaacaacatagagcaaggcacaaattgttctgttcccttattaataatgtgctctctggcactgcagagcacagtggaagaggggtgggaagggggctgtgccccatgaattggaaggcggctgtgccccataaattggaaggcttttcagaaggtgcagatcagaatgggacagggtcctcagtcctgtgttgtagatgctgattttgtttccagctctccagtgaaatggatctccgctgtgctgagatgaaacagaactttgaaaacaagaacaggtacactttctggcatggacccttgtgtgtgttgatggctctaagggtcccgcatcctttgcaggattttagttcactgggacttcaaatagttctaaatggagttgggggatgaagggtgggggagatgaacaagacacgtgtctttgaagagcagaatggcttgattcaaagccactaaaataaaccacaaagaaagttattactgcttttacattttatcatccaatcctttcatttcaattataatctccctttttgttggttactgagaagagtcatttttgttctctatgagatttctgtgataaataactgttgttctcagccaaggctcctcctccaccatctcctcgttcttctcttcctcctcctctttttctttgtctcacctctactctccctggctgctaggtcagggcctcagcaaaataggaagaaagtataagagaatcaggagcaaagtcaaatcaagagaaaattgaaaggagtccaaatacagaaagacagagaatagaacatggttaccatggtccggtaggaggaagaaaatggggagatattgatcaaatcatacaatgttgcaaatatgtagggtgaacaagtttatattgtttacaaagatataatgtaaaaaatgagagctatagttaataataatgtatgatattaagaactgttgctaaatgagtttatagctgttctcaccacagagggaaaatggttaactaagtgaaatgatggatatgttaatttgttccactctagtaaactttttactatatgtatatagtaatctccactattataaccatttgtgtatatatatatatacatacatataaactctacctatatatatatgcttgtgtagtgtgagtgtatatatatagtaaaaattatgtgtaatatatatagtataatggttactatagtagagatgcatatatatatgatttatatatatatatatatgaatcttatgacatcatgttgtatacctcaaatatacacaataaaatttatttttaaaggagttttcttatgtgtatgggtgaagataatcctacatcccctttcaggctacttgctgcacaccagagcagccttagaaatcctggtggagagatagcactcttagttgagtcatagccatttacacatttatttatctatagactttatctgttagagcagttttaggtttacagcaaaaatgaggagaaagtacagagagttcctgtgcacctgctcctaatcaaattcaatcaaattaaactcaaagatgagtacaccaagacacataataatcaaactatcaaaaatcaaagacaaagcaaaaattctgagagcatcagaaggtaagaaacacgtcacatacaaaggagtgccaatacaattgtaatttcttaacagaaaccctgcaggccaggagtcagtgtgatgatgtattaaaagtgctgaaggaaaaaactgcctaccaagaataccttagcaaagctgtcttccccagttgagggagaaatagaaactttcccaaacaaaaattaagggagttcattaccactatgcctgccttacagaaattgcaaaaggaagttttaaaaacggaaacagaaagctgctaataacatgaaacatatgaatgcacaacactcaatggtataagcaaaatagagccatactcagaatactttaggactgtgatgatgggatgtaagacaattttatcccaatatgagagtaaaaacacaaaactattaataacaactatagctaaaataaattttcaatgataaatcatattataaaatgatatcaattctgacatcaaaaacaaaatgttagggagggagtaaaactgttgagttattgcttgcaactaaacttgttgtcagcttgaaatagcttattacaagaacaagatattctaactaagtgtcatggtaaccacaaagataaaaatctttagcagtagcacaacacaaaaatagaaatgattcaaagcatacactacaaaaaacatcaaaccacaaaagaagagaccaagagaggaagaaagaatctacaaaacaacaaaacaaaaattaacaaaatggcagtagtaagttcttacctattaataattaccttgaatgtaaatggattaaattctctgattaaaaaaaatagaatgcgtgaatggattttttaaaaacaagaaccaactatacgctgcctacaagagactcatgtcacctgtaaggcacatgagcactcctcccagggtctgagattaagcccactcaacctgccgctaccaccattgctggcacctatctgcatgcaccacctatgggcctgaggacaagaccacccaacttctcatagccattgccaataccagtgagtaccacttgggtgctagagggttgtcccactattgctactgccatcagccacaacacacccactgccaatgggtccgtgaacctacctacctgcccagcccatagctgccattcctgacacctgaaaaaaacactaaaaggcccaagaattggcctgcctgaacccactaatacttaatgccagcatatgccaccctggggcccaaagataggcacacttataagattagaataaaactagaaatcaataacaagaaaaactttggaaactatacaaacgcatggaaattaaacagcattctcctgaatgaccaatagaacaatgaagaaattaagatggaaataaaaaaaatttcttgaaacaaaaaaaaattgaaatacaatataccaaagcctgtgggatacagcaaaagcagtgctaagagggaagtttatagcaataaacacctacatcaaaaaagtagaaagatttcaaataaacaatctaataatgcacctgaaggaattggaaaaccaagcccaaaattagtagaagaaaagaagtaataaaaatcagaccagaactaaacgaaatagaaactaaaaaaacaatacaaagggtcagcaaaaaaacagattcttcaaaaaaataaaccaaattgataaaccagtagctagactaaccaaaaaaagacaagagaagacccaaataaaatcagaaatgaaaaaagagacattacaactgttgccacagaaatacaagaaatcatcagagactattatgaacaactataactaacactaacaaactaaaaaatctagcaaaaatagataaattcctgaaaagataaaatctaacaagatgaatcaggaagaaattgaaaattattcaagaccaataatgagtagcaaggttgaatcagtaataaaaagtctcccaacaaagaaaagcccaggaccaaatggattcactatcaaattctaccaaacatataaaggagaactaatagtaatcctccttaaactattcaaaaaaatttgaagaggaggaaattctcccttacttattctgtgaggccagcattaccttaataccaaagtcagatgacaatacaacaacaggaaaaagaaaaccacggatcaatatctctgatgaacacagatgcaaaaatcttcaatgaaatactagcaaaccaaatccaacaatacatcaaaaatataatacaccatgaccgagtgggacttatatcagaaatgcaaggatggttcagcttatgaaaatcaataaacatgatatataacatcaacagaatgaaggacaaaaatcatgtgatcatcccaatagatgcagaaaaagcatttcataatagtcaacattgcttcatgattaaaaaataaaacctttcaacaagctagatatagaagaaacatacctcaacataacaaaggctgtatatgacagatctgcagctatcatcatactgaacagggaaaagttgaaaacttttcctctaagaattggaacaagataaggatggctacttttaccgctcctattcaatatagtactggaagtcctagccagagcaatcccgcaaaagaaaaaaataaaaggcatccaaattggaaaagaggaagccaaatgatctctctttgccgaaaaacataatcttatatatgaaaatcacaaaaaaactccatccaaaaactcttagaactaataaattcagtaaagttgcagaatataaaatcaacatacaaatatcagttgcatttctgtacaccaacagtgaaatagccaaaagagaaatcaataaggcaataacatttacactggctacaaagcataaaataaaatatctaggaataaatttaaccaaaaaggtgaaagacctttagaaggaaaactgcaaaacacagatgtaataaattgaagaggacacaaacaaatggaaagacatttcacccatgcttatggactggaagaattaagatcgccaaaatggccatgctgcccaatgcaatccctaaattaccaatgtcacttttcacagaaatagaaaaaataattctaaagttcatatggaacaaaagatgagccagaatagccaaagcaatcctgtggggaaaaaaaatctggagttatcacattacctgacttcaaaatatattacaagaccaggcatggtgactcacacctgtaatcccagcactttgggaggccaaggcgagaggatggcttgtgtccaggagtttcagactagcctgcacaacatagcgagacaccgtctacacaaaagattaaaaattagccaggtattatggagtgtgcctggagtcctagctacttgggaggctgaggtgggaggatcacttgagcccagatggtcaaggctgcagtgagctatgatcatgctactgcactccaactgcactccttgatatagatcaaggctatcataaccaaaatggcaaggtattagtataaaaatagacatataaacataaagcatggaacagaatagagaatccagaaataaattcatgtaattacagccaactgatctttgacaatgctgtcaagaacatacactgggaacagggcaccctcttcaataaatgatgctgggaaaactgaataaccatatgcagaagggtgaaactagacccctatctctcatcatgtacaaaaatgaactcaagatggattaaagtcttaaatgtaagatccaaagctataaaaatactagaagaaaacctagggaaaagtcttcaggacatcggtctaggcaaagattttatgaccaagactttgaaagcacaggcaacaaaaacaaaaaaagacaaatgagactatattaaactaaaaagcttctacacgcaaaagaaaccatcaacagagtgaagagacattctcttaaatgggagaaaatatttgcaaactactcatttgacagaggactcaaacaattcaacagtaaaacaaacacaaattcattaaaaatgggtaaaggacatctttcttaaaagacatttcttaaaagaagacatttcttaaaagaagacatacgaatagccaacaagtatgtgttcaacatcactaatcatcagggaaatatagagcaaaaacacaataagatatcatcttacaccagttagaatggctattataaaaagacaaaaaataacatatattgacaaagatgtggagaaaagggaactcttatatactgttggtggaaatgtaaattagtacagccattatggaaaacactacagagatttctcaaaaaattaaaaatatgaaccagcaattcaactactggatatttcttcaaaggatgtggagaataggaaatgctatacactattggtggggatgttaattagttcagccactgtggaaagcagtttggagatttctcaaagaacttgagacagaactaccatttgacccagcaatcccattattgggtgtattgtactcaaaggaatgtaaatcattctaccaaaaagacacatgcatacgtttgttcatcacatcactattcacaataacaaagatatggatcaacttagatgcccatcagtggtggactggataaagaaaatgtggtatatatacaccatacaatactacacagccataaaaaagaacaaaatcatgtcctttgcagcaacatggatgcagctgaaggccattatcctaagtgaattaacacaggaacagaaaaccaaatactgcatattttcacttataagtgggagctaaacattgtgtacacatagatacaaagaagagagcaatagacggtggggcctacttgaaggtggaggttgggaggagagtgagggttcaagaacaacctatcactacctgagcaatgaaatcatttgtacaccaaaccccagtgatgtacaatttacctatgcaacaaatatatacatgtacatgtacccctaaacctaaaataaaaacggaaaaagaaaaaaattagtagtatttctatatactatctaaaaaagaaattaagaagacaattctatttatgacagcttaaaaaataagatagctaggaataaatttaaccaaggaagtggaagatttctacactgaaaattatggagcatcgataaaagaaattgaagaagcagcaaataaatggaaagatattccatgttcatggattggaagaattaatattgtttaaatgatcatgctacccaaagcattacacagatttaatgcaatccctatcaaaataccaaaaatgttcttcacaaaaatagaacaaataatcttaaaattcatatggacccacaaagtccccaaatagccaaaatgatcctgagcaaaaataacaaagctaaaggcacctgattttaaatgatactacaaagctatagtaacccaaacagcatgatactggcataaaaaaacagacacatagaccaatggaacagaatagaggcctataaataaatttatacacccatagccaactgatttttgacaaaggtgccaagaacacacactgggaaaaaagatagccttttcaataaatggcttttagtcaaattaaaagaagtagataaaacagagatctcaaagaagctaatattacacctcacaaaactaggaaagaagaacgaaataagcccaaagtatgctgaagaaagaaaataataaagatcaaagcagaaataaatgaaatagagtctagaaaaacaatataaaaatcaatgaagctaagagttgttttttgaaaagataaaagcaacaaacctttagctaaactaagaataaaatagagaagactcaaataaataagatcagaaatgaaagaggagacattacaactgatatgacaaatacaaaggatcataagagactactgtgaacatttatatggcaatgaattggataatctagaagaaactgataaatttctagacacataaaacctgccaagacttaatcataaaaacaatagaaaatctgaacagaccaataaagatgatattgaataagtaataaaaagcctaccatccaaaaaaaacccagacctggtgcctttactgcttaattctacctgacatttaaaataagaactaacatcaattcttctcagattcttctaaaaaagtgaagaggtggaaggactttcacatgattttttttttagcttttttttttttttttaggcagagtttcactcttgttgcccaggctggagtgcaatggtgcgatcttggctcaccacaaccaccacctcctgagttcaagcgattctcctgcctcagcctcctgagtagctgggattacaggcatgcaccaccacgcctggctaattttgtatttttagtagagatggggtttctccatgttgctcaggctggtcttgagctcccaacctcaagtgatctgcctgcctcggcctcccaaagtgctgagattacaggcatgagccaacgcacccagcctgttcacactatttttatgaggccaggattactctgataccaagtcagacaagaacattataagaaaataaaattacaggccaaaatccttaaatgaacttagatacaaaaatccttaattaaatattagcaaacagaattcagcaacatattgaaaggatcatccaccatgatccagtgagactgatcccctgggatgcaagaacggttggacacacacaaatcaataaatgtgatacctcacattaatagaatgaaggacaaaaccgtatgaacagacacttctcaaaagaagacatttatgcagccaaaagacacatgaaaaaatgctcatcttcactggccatcagagaaatgcaaatcaaaaccacaatgagataccatctcacaccagttagaatggcgatcattaaaaagtcaggaaacaacaggtgctggagaggctgtggagaaataggaagagttttacactgttggtaggactgtaaattagttcaaccattgtggaagtcagtgagtcagtgtggtgattcctcagggatctagaactagaaataccatttgatccagccatcccattactgggtatatacccaaaggattataaatcatgctgctataaagacacatgcacacgtatgtttattgtggcactattcacaatagcaaagacttggaaccaacccaaatgtccaactatgatagactggattaagaaaatgtggcacatatacaccatggaatactatgcagccataaaaaatgatgagtttgtgtcctttgtagggacatgggtgaagctggaaaccatcattctcagcaaactatcgcaaggacaaaaaaccaaacactgcatgttctcactcataggtgggaattgaacaatgagaacacatggacacaggaaggggaacatcacactctggggactgttatggggtggggggaggggggaggtatagcatttggagatatacctaatgctaaatgacgagttactgggtgcagcacaccaacatggcacatgtatacatatgtaactaacctgcacattatgtacatgtaccctaaaaaagtataataaaaagtaaataaataaataaatccaattaaaaaatgggtaagggacctgaatagacatttctcaaaagaagacatacaaatggccaacagacatatgaaaaaatgctcaatattgctaatcattagggaaatgcaaattaaaaccatagtgagttattatctcacatggatcagaatagctattatcaagaaggcgaaagataacaagtgttgaagatgtggagaaaagggaacacttacaaagtgttagtgggattgtaaattagtatggccattatggaaaactgtatagaggttgctcaaaaaactaaaaatagtaataccatatgatccagcaatcccacttccgagtgcttacccaaaatatttgaaatcagtttgttgagatgtctgtattcccatgttcaattcagtactattaacaacatccaagttatggaatcaacttaagtgtccatcagttgatcaatggataaagaaaatgtggtatatacataaaatggaatactattcagcctttaaaaagaaggaaattctggcatttgtgacaacatggatggaactggagagcattatgctaaataaaataaaccgggcacaggaagacaaataccacatattctcacttatatgtgggatctgaaacaatcaaactcatagaaacagcgagtaaaatggtggttaaagagactagggggtggggggaatagggagatgatggtcaaagggtacaaaatctcaattaggcaggagaaatatgggattttcttagatctattgcacagagtagtaaatatagttaataatagagtattggacatttcaaaattgctaagaataaatttcaaatgttctcactgaaaaaacttttaggctgggcgcagtggctcacgcctgtaatctcagcactttgggaggctgaggtgggtggatcacctgaggtcacgagttcaagaccagcctggccaacatggtgaaaacccatctctgcaaaaatacaaaaattggttggacataatggcaggtgcttgtaatcccagctactcaggaagctgaggtgagagaatcgcttgagcccaggaggcgaaggttgcagtgagccgagattgcgccattgcactccagcctgggggacagagccagagactacgtctgaaaaaaaaaaagaaaaaactttaaagtatttcaggtgatgactatgttaactagtttggtttcattattccacattgtattcataaatcataacatcactttttaccccataaatatatataattataagttatcaatttataattaaaaaaagaaatcctggtggagagacagcactcttagctgaggcataaacttttatgtacttattcatttatttataaactttattttttagagtagttttagagttttaggtttacagcaacattgaggggaaagtataaaagatttcccatatacttactgccccctcacacacatagcttcccccattatcaatatccccaaaagtggtaacatttgttataatcaatgaacctatattgacacatcattatcacccagagttcatagttgacattagagttcactcttggtactgtacattcaatgagtttggacaaatgtgtaatgacatgtatccactattctagtgtcataacaatagtttcactgccctaaaaatctgcttcgctctgcctattcatcctacctcccatccctaaccttgggcaaacactgatctctttactgtctccatagtttgacctttttcagaatgtcatatagttggaatcataccctatgtagcctttttaaattggcttccttcacttagtaatatgctttaaaggttcctccatgtcttttcatgcttgatagctcatatggactcattttaatactcatcataaacactgccaacattgcttcctggaatggaggctggagagaacttgggttctaaaattatcctgggtggcaatgcagcccatagtttcccgagcaagctatagacaagactgtgctgactattagaggggaatctgtggtcatgctggctccattcaaaacaatgattgtagaaaagggtcccctcaccctttctggatagatgccaggataatgcttcaggaagtgaaggccccaggctgagtatggtagctcacgcctgtaatcccagcacttcgggaggtcaacgcaggaggattgcttgagtccaggagtattttgaaaccagcctggacaccatagcaagaccccgtctctacaaaaaattaaaaaattagatgagcatggtggcacatgcctgtgttcccaactacttgggaggttaaggtgggaagatcacttgagcctgggaggttgaggctgcagtgagctgtgaccatgccaccacactcactctgggcaacagagggagactctgactcaaaaaaaaaaaaaaaagatttaaaaattttaaaaataaaaaagtgagaacctcacttcctgtgggagggtggagggtaggatcagatcagggtaacagctcagctctggacttctttttactaatgattgtggccttctcctggggtcccacagggagctcaaagaggcccatgaagcagaactcagtgagttggagaacaactacaaagcagccttgaaggcagagaagttggctgcccaagagaagctaggtactgctgggacctgggagaatgaccctggatgaaggtccaggcaatggcatttctaataagcttctagggtgatttccaaggcacacaaaggttttactaccttggtgatgagtttggggtggggaaggtgtgcagaagaactcacatttgaatttgaaaatgtgcatatcagaagactaatgatgatcctgttgttttccttttatccagaggagatgggaaaagaatacaagtatttgaagaatatgtttcgtacgtatcaggtgagatacacagctccctgttggattacaagagaaggaaggctcattcctggctaacattgggataaatctagagcttttgtccagaaaataatgtcctgagattcccagcatccttagacctaagtggcactagctgcacccagggggaggatgaacccaatggcttccatgcatgacaagtcaggcacccaaatcctgaagagcactactgaaaaatatgtttgtgattacaaaagtaatagcttctcattttttgtaatggagcaaaaagaaatatcaccacccaaagacaacccctgttaatatttgtactttgttagaactgcagttgagatcatactgtatattgtataacatctatatattttttatatgttctttatcaagcatataagaaacttttccctcctttataatgacttgatattatcctaatgaaattgccattgggttctaaaattttactgttcccctattattgggcatttgagttgtttccaattgcttgctgtaacagataataccactttgaatatctttgattctagaagtagagtgcttggtcaaaaggaatgaactttaaaaaaagtcaactttcattttagattcaggggatacatgtacaagttattgtgtgatgctgaggtttgggatatgaatgatctcattacccagctggtgagcatagtacccaatagttattccacccttccccctcttcctctctcccaatagcccccagtgtctacaagaacacgtggcacttggttttctgttcctgtgttaattggctttaggataatagcctctagagccatccatgtttctatgaaggacatgattttgttcttttttatggctgcatagtattccatggtatatgtaccacattttgtttatccagtccactgtcagtgggtacttaggttgattccatgtctttgctattgtgaattgtctgtgattaacatacaagagaaggtgtctttttggtagaaaaatttattttcttttggatatatacccagtaatgggattgctgagtcaaatggtagttctgttttaagttctttgagaatttccaagctgctttccaccggcaatgaactaatttacattcctaccaacggtgtataagcattccctttttcctccaacctcaccagcatctgttgttttttggctttttaataataaccattctaatgtgtgtgggctggtatctcattatggtttttgatttgcatttctctgatgattagtgacatgaagcattttttatgttttctgaccactgtatgtcttcttgttttttacacactattacattctatttatgacaagaaatatttacatgattggaaaaagtaaaaattggaggacaaaaagcagattagtatttaccatgggctggactgggactggggaaggggcttactacaaagggacaggagagaattactggagatgtagtggtggttccgtaactatccgtttgtcaaacacattaaaagtatactgaacaagggcacattttactcaattaaactgacattaaaaaaagaagtgaaaaagaagaaattccatttagaatgttgaaaaactgtagatttagttctagaattctggggctctataacttatttcaaaatataggttttcagcccatttttaacttatcaaatctttattcagaaatccaaagtttatatttaaaaatagctcatttaaatttgaccataggccggtgctgtggctgatgcctgtaatcccagcactttgggaggccgaggcaggcagatcacctgaggtcaggattttgagaccagcctggccaacatggcaaaaccctgtctctactgaaaatacgaaaattagtcggacatggtggcacacacctgtaatcccagctactcaggaaactgaggcgggagaatcgcttgaacctgggaggcagaggttgcagtgagccgagatcgtgccactgcactctagcctgggcaacagagcaagactctgtctcaaaaaatatatataaataaataaaataaaaaagaaataaatttgaccctaaagctaacacatgtaaaaattatataaaagaaaagaaaattgttccaacttttttactttggggtttttaaaaaagttttatttcaatagctttggggatacaaatggtttttttgttacctggatgaattatatagtggtgaattctgagactttagtgcacccatcatctaagtagtgtatattgtacctaatgtgtagttttgttttttttttatcacaagccactctcccacctcccccttctgagtctctaaagttcattaatgaatatgcctttgcatattcatgacttagctcccacttttaagtgacatcatacagtttttggttttccactcctgtgttactttgtttagaataatggcctccagctccatccaagttgctgcaaaagacatttcattccttttaatgactgagtagcagtctatggtgtatatatgccacattttatttatccactcattagtcaacgggcacttaggttggttccacatctttgcaactgtgaattgtgctgctataaacatacgtgtacaagtgtctttttctgtaatgactcattttcctttcggtagagatcaagtagtgggattgctagattgaatggtaaatctacttttagctctttaagaaatctccatactcttttccaaaaggttgtactaatttacattcccaccagcagtatataagcactcccttttccccacatccacaccaaaatatattgtttttttactttttaataatgaccattcttgcaggagtaaggtggtatctcattgtggttttaatttgcatttccctgatgattagtgatattgagcactttttcatgtttgttggccatttgtatatcttcttttgagaaatatctattcatgtcatttgcccactttttaatgggattatttgtttttttcttgctgatttgtttgaattccttgtagattttgattactagtcctttgtcagatgcatagtttgcaaatattttctcccattctgtgggttgtctgtttattatttcttttgctgtacagaagctttttagtttaattaggttctatttatttatttttggttttgttgcatttgcttttggggtcttagtcatgaattatttgcctaagccaatgactggaagagtttttctaatgtcttctagaatttttatagtttcgggtctcatatttaagtctttgatccatcttgagttgatttttgtataaggtgagaaatatggatccagtttcatttttctacatgtggcttgcccattctcccagcaccacttattaaataaagtatcattccccaatttatgtttttgtttgctttgtcaaagataagttggctatacatatttggcttcatttctgggttttctgttctgtttccttggcctatgtgcctacttttataccagtaccatgctgttttggtaactatagccttgtagtataatctgaagtctagtaatgtgatacctccagatttgttctttttgcttagtattgctttggctattctggctcttttttggttccatatgaattttagaactttttttctaattctgtgaaaaataatgttgatattttgatgggaattgcactggatctgtaatgcaagattactttgggcagtatggtcattttcacaacgttgattcttccaatccatgagcatagaatgcatttccatttgtttgtataacctattacttctttcagctgtgttttatagttctccttgtagagatctttcacctccttggttaagtacattcctaagtattttatttttttgtagctgttgtaaaagggtatcagttctttttttgattctcagcttggtcgttgttagcgtatagcagtgctactgatatgtgtacactgattttgtaaactgagacttcactgaattcgtttatcaaatcttagagtctttggaggagtctttaggattttctaggtatacaattatataatcttcaaacagcaatagtttgacttcttcttttccaatttggacgccctttatttctttctcctgtctaattgctctagctaggacttccagaactatgttgaatgagagtggtgaaagtgaaggtggccatcttgtcttgttccggttctcaaggggaatgctttcaacttttttccattcagtatgatgttggctgtgggtttgtcacatatggcttttattattgaggtaggtcccttctatgcctagtttgttaggagttttaattatgaaggatgctggattttattaaatgctttttctgaatctattgagatgatcatgtgttttttgttttcaattctgtttatgtgatgtatcacatttattgacttgtgtgtgttaaaccatccctgcctccctgggacaaaatccacttgaattatctttttgatgtgctattggggtcggttagctagtattttgttgaggatttttgcatctatgttcaacatcagtgaaattggtctgtagttttttttatttgttgtgttctttcctgatttggatatcagggcgatactggctgcatagaatgatttagagaggattccctctttctcaatctttcggaattgtttcagtaggattgtaccaattcttcattgaacatctggtggaattcagctgtgaatccatctagtcctgggctttttttgttgttcttggcaattttgaaattactgattcaatcttgctgcttgttattcacctgttcagggtttctgtttcttcctgatttaatacaggagagttgtacgtttccaggaatttgtctatttcctctaggttttccagtttgtatgcaaaaaggcgttcatagtagcctcaagtgatcttttgtatctctgtggttctgtgggttgtaatgtctccaatttcatttctaattgagcttatttagatcttctcttctttacttgtttaatcttttcttcttttcttggctaatctagtctattttattttttcaaagaaccagctttttgtttcattgatctttttatattttttgtttgaatttcagttagttctgctctgatgttcattatttcttttcttctatctttggacttcgttttttttgtttctccagttccttgcagtgtgacattgtcaatttgtgctctttcagactttttgatgcaggcgtttagcactataaactttcctagcactgcttttgctgtatcccagaggtttttttagtttttagttttttgagacagtctcactctgtcaaccaggctggagtgcggtggcactatcttggctcactgcaagctctgcctcccaagttcaagcaattctcgcacctcagcctcccaagtagctgagactgagactacaggcgcctgttaccacacccagctaatttttgtatttttagtaaagatggggtttcaccatgttggccagcctggtctcaaactcctggcctcaagtgatccacctgtttggcctcccaaagtgctagaattacaggcatgagccaccgaaccccacctatcccagaggttttgataacttgtgtcattatgattcaattcaaaaattttttaaatttccatcttgatttcactgtttaccccagatatcattcaggaatggattattttatttccgtgtatctgtatagttttgaggattccctttgaaattgatttttagttttattctgctatggcctgagaagatacttcataggatttcaatttttaaaaattaattgagacttgttttgtgacctatcatatggcctatcttagagactgttctatgtaccaatgagaagaacatacattctacagttcttgggtagaatgttctgtaaatagctgttatgttcatttgttttagcatgtcatttaagtccattttttctctgttggccttctgtctcaaagacttgtctagtgctgtcagtggtatattaaagtatcccaccattactgtgttgctgtctatctcatttcttaggtctagtagtaattgttttatgaatctgcaagctccagtgttagatgcatgtaaatttaggattgtaatatcttcttgttggattgatccttttatcattatattgaccatctttgtcttgttttactgttgttgctttgaagtttgtttcgtctgatataagaatagctactcctgcttgcttttggtgtccatttgcatggaatatctttttccacccttttcccttgagtttatttgaatcctttcatgttaggtgagtctcttgaagacagcagatatttggattgtgatttttgttatccattctgtcattctgtattttttaagtggagcgtttaggccatttacattcaacattaatattgagatgtgaagtactcttctcttcatcatgttaattgttatgtatatagcttttcttttttcattctgttattgctttatagacttcatgagttttaagctttcaagagattctattttggtgcgtatttggcttttgtttcaatgtttaaaactccttttagcccacctttctttcttttctttccttccttccttccttacttttttttttttttttttttttttttttgatagagtctggctctgttgcccaggctggagtgcaatgttgcaatcttggctcactgcaaactctgtctcctgggttcaagagattctcatgcctcagcctcccaagtagctgagattacaagcatgcacaatcacacctggctaatttttgtattttttagtaaagacagggttttgccatgtggccaggctggtagcatttcttgtagtttggtttgctagtgacaaattccctcagcatttgtttatctgaaaatgacttttatttctccttcaattacaaaacctagctttacaggatacagaattcttggctgacagtttttttctgtttaaggagattgaagataagaccccaataccttctggcttgtaaggtttctgctgagaagtctgctgttattcagataggttttcctttatagcttacctgatgcttttgtcttactgctcttagaattatttccttcatgttgagtttagatagcctgatgactatatgccttggtgaagatctttttgcaattaatttcccaggagttctttgagcttcttggatttggatatctagatctctagccacgccagaaaggttttcctcaattattccctgaaataagttttccagacttgttattttctcttcttcctctggaacaccagttattcttaggtttggctgtttaacataatcccatatttcttgaagactttgttcatttctttttattcttttttctttatttttgtctgattgggttagtttaaaaaccttgtcttcaagctctgaaattctttcttctacttgttctagtctattgttaaagctttctgctgcattttgtattccctaagtgtgtctttcatttctagaaattcttattgttttttcttgataatatctatatctctagaaaatttttcattcatatcctgaaatgctttttaaatttataatagttttcatctttctctgaaatctccttgagtagcttaataattgaccttctgaattccttatctggtattttaaagagttcgtcctactttggatccattgctggagagctagtgttatcttttgagggtgttatagaaccctgttttttcatattaccagagttccttttctggttcctcctcatttgggtagattatttcttctaattatccttgaattgatgtttgatttgactgtgtttctttttgtgtttgttttttaatttcttttttccacttaaggatgtgactttaatgcttatcatattatggcctaatttggtttttggtgctttcaggggtgaagactctgtaatagttccttggttatagagagtttttttatgtggctttcttagatgctggttgtagtagcaatgtgcttggtatattagcaagatcactgtctcctatggggctgtaatgataagaggtctcttaaagcttatctcattcccctgtggcatgcccttttttatttacgcattttcgtccagttttttttttctttttttttttttaggctgaatctcactctgttgcccaggctggagtgcagtgtcatgatctcactgcaatctccgcctcctgggttcaagtgattcttgtgcctcagcctcccaagtagctgggattacaggtgcctgccaccacacccaactaatttttgtatttttagtagagacagggtttcaccatattggccgggctggtctcgaacccctgacctcaagtgatccacccgcctcagcctcccaaagttttgggattacaggcatgagccactgcacccggccttttctccagtgttttatttactagtttgatggttccagcttcaggccagtaggggaggtgtccctgggtaggaatcagctgtggctaaagcaggtgggtaaatgcaatacccagtgatgggcagaggtctcagccttgacagaggtggctggaggagtgagttgcaatgaggtcttacctggggtaagggttggagccacctcagctcccctgccaggttagcaggaaagttatccctctcaaacacactcctgtttcagtgctccagcttttcatctccagacaggcacctcttttcatctgcaggaattttgatgttccaaatagagaaaaattgtgaacgtctctcatacaagcttgaacctagagggtgcccctcctatggggatgcagtcaccctgatgtcttccagaaagactgtctatagttgcactcacaccaagctccaatgggagaagctccaactgtgcctgcagtggtagacaatgggtgggggggttgtctgtctgttgggttagagctgaagacttttcctgctgagcccagcactgcaactgtgcctctgctgaaagaaacttcccactagcagaaagatctggttcttaagtcctgctgtctggattattttctcccacagggtgttctcttgatgtggtgcactccctgttcccctaggatcagggggatcccactcctaagggaacagggtctctgggtctagctgtccagtgaaggtaccacaccccaggctggtgctagggaatatctgcaagggatccagtgatgtgacctctcttcaagtctcccaacagtgggtagcagcaccagttctaatgggcgtggcagggtaatagactctgtgagagtccttggttattgatagccttagtgtgttggctttctcgaacactggttttagtagtaatgaactggtcatgtggacaaactcaggacctcctggttagccagaatggtgcaggcagtggtgatagctgagattacacagccatcttcttcctaggtgcgttgttattctaccaggagatgctgtaatggactgtgttggttggcctccagccaagaggtgatgcttacaaaagggaaacagctgcaatagtagcaataggacttttgcttgctttatgttgtccagaggggttactctggtttctcaggcaatgagtggggctatatagcccccaagagtttctgtcctttgtgttaaactaccagggcaggtgacggggcaaagcagggtgagggttggttcaggtggacttgcgctctgagtctccctgtgcagggcaagcagcagcccctgtggaagccaggggatgggagtggttctcaggccactgggttgatgttccaaaaggcagtgttgctggctttgccacacagaagggtttgtgcagagtggggagaagcaggtggctgtgagccccacacagatcccatgcacttggcaagacagatgcactcccacagtgttccactggcagcagcaagctaagttccagttagcctgcactcagaacttgcaactgtcccgagtcatatacgttccctgcagagatagcaatcacggctttcaggccaagcccctccctgtccactgcaaagccaggcacccagttcctgcactggcagctcctgcactcatggctgcagcccacttttcactctcctccaccctggccctggccaagggagttcatccgcacctaaggttatatcatgaaacccagttggaggcttctttcaacctgcgaccactgcctgaactttttggctgtcctccacagggttccccgtgaggaacagtaagaaatggcttccctctctccatgctgaaatctgggagtgtgtgcaagaatcttcctgccactgctcccacttttatattccacatccctccccaagtcagttcctgtgctgcatagggttagggctttctcccatggtctggactttcagggtccacagtgggggtgtgtattccaggagtaatgtagggtgagtcccccttctcacactctgggaactcacagccctttgcctgattcacagtgtaacctgcagcctcctgcttccttcaaagggtctgtagattcctttggttttcctgttcagtttctgcattgctccttgaaaaaagttcagtgtgaatctctacaactattttgtttttccaagtgggagaagtatgctagcaatgcctctaatctgccattttggaaaaacacaaacaaacttctgtcttcttttgagaagtgtctgttcatgtcttttgcccactttttaatggggttgttttttgcttgttcaattgtttaagttacttatagattctggatattagatatttgtcagatgcatagtttgtgaatattttctctttttttgtaggttgcctgtttactttgttgacgggtttttttgctgtgcagaagctctttagtttaattaggtcccacttgtcaatttttgtttttgttgcagttgcttttgaggacttagtcataaattctttcccaaggccaatgttcagaatggtgtttcctaggttttcttctaggattcttagagtttgagttcttatgtttaaatctttaaggcatcttgggttgatttttgtatatggtgaaaggtaggggcccagttttatttttctgcatatggctagccagctatcccagcatcatttattgaatagggaactccttccccaccacttgtttttgtctactttgttgaagatcagatggatgtaggtgtgcagctttatttctgagtttgctattctgttccattgatctatgtgtctgtttttgtatcagtaccaagctgttttggttactgtagccttatatttttttaaatttttttatttctatgggttattaggaaacaggaggtgtttggttacatgagtaagtactttagtggtgatttgtgagattttggtgtgcccatcacccgagcagtatacactgcactcaatttgtagtcttttatccctcacccccttcccactctttccccgagtccccaaaatccattgtgttattcttatgcctttgcatcctcatagcttagcttccacttatgagtgagaacatacgatgtttggttttccattcctgagttacttcacttagaataagtctccaatctcatccaagttgtgttgatgccattaattcattactttttatgactgagtagtattctatcatatatatatggaatttctgaatcaaatggtagttctacttttagttctttaaagaatctctatgctgttttccatagcagttgtactagtttacattcccaccagcagtgtagaagtgttctctgttcaccacatccatgccaacatgtattttttttttattttttgattatggccattcttgtaggagtaaggtggtatctcattgtggttttgatttgcatttccctgatcattagtgatgttgagcactttttcatatgtttgttggccatttgtatatcttcttttgagaattgtctattcatgtccttagcccactttttgatgggttatttgttttttcttgctaatttgttttagtttgttgtagattctggatattagtcctttgtcagatgtatagattgtgaagattttctcccactctgtgggttgtctgtttgctctgatgactgttctttttgccatgcaaaagctctttagtttaattaagtcccagccatttatctttgtttttattacatttgcttttgtgttcttggtaatgaaatccttgcctaagccaatgtctagaagggtttttctgatgttatcttctagaatttttatattttcaggtcttagatttaagtccttgatccatcttgagtttatttttgtgtaagatgagagatgaggatccagtttcattctcctacatgtggctagccaattatcccagcaccatttgttgaataagatgtgctttccccactttatatttgtgtttgcttagtcaaagatcagttggctgtaagtatttgggtttatttctgagttcactgttctgttccattggtctatgtgcctatatttataccagtaccatggtgttttggtgactatggccatataatatagtttgaaatcaggtaatgtgatgcctccagatttgttaggttttttgctttttgattttttgtttgcttgttttgctttgttttgttttgcttagtcttgctttggctatgtgggttcttttttggttccatatggatttaaggagttttttttctagttctgtgaaaaacgatggtggtattttgatgggaattgcattaaatttgtagattgcttttggcagtatgatctttttcacaatattgattctacccatcagtgagcatgggatgtgtttccatttgtttgtgtcatctatgatttctttagcagtgttttatagttttccttgtacaggtcttacaactccttggttaggtatagtccaaacattttatttttcttttgcagctattgtaaaaggggttgagttcttgatttgattttcaccttagtcgctgtcagtgtatagcagagctactgatttgtgcacattaattttgtatctggaaactttactgaattcttttatcagttctaggagctttttggaggaatctttagggttttgtaggtatacaattatatcatcagcaaacagcaatagtttgacttcctctttactgatttgggtgccctttatttctctctcttgtctgattgctctggctaggacttccagtactatgttgaagaggagtggtgagagtgggcatccttgtcatgttccagtcctcagtgggaatgcttccaacttttccccattcagtatgattttggctgtgggtttgtcatagatggcttttattacattgaggtatggcccttgtatgctagttttgctgagagttttaatcataaagcatgctggattttgtcaaatgctttttccgcatctattgaaatgatcatgtgatttttatttttaattctttttatgttgtgtatcacatttattgacttgagtatgttaagcctatatccctggtatgaaacccacttgattatggtggattatctttttgatatgttgttggattcagttagccagtattttgttaaggatttttgcatctatgttcatcaaggatattggtctgtagttttcttttttggttatgtcttttcctgtttttagtattagggtgatactggcttcatacaatgatttagggaggattccctctttatcttgtggaatagtgttaataggattggtaccaatccttctttgaatgtctggtagagttctgctgtgaatccatctagtcctggacttttttgtgtaggtaattttttaattatcattccaatctcactgcttgttattggtctgttcagggtatctaattcttcctgatttaagctaggagggttgtatctttccaggaatttatctgtctcctctaggttttctagtttatgcacgtaaaggtgttcacagtagccttgaatgatctcttgtatttctgtggtgtcagttgtaatatctcccttttcatttctaattaagcttatttggattttctctcttcttggttaatcttgctaatgatctatcaattttatttatcttttcaaagaaccagctttttgtttcatttatcttttgtattttttgtttgtttgtttgtttgatttcattcagttctgctctgatcttggttatttcctttcttctgctgggtttgtgtttggtttgttcttgtttctctagttccttgaggtgtgaccttatattgtctgtttttgctctttcagacttttttatataagtgtttagggcttttagctttcctctttgcactgcctttgctgtatcccagaggttttgataggttttatgtcactgttgtcattcagtttgaagaatttttttaaatttccatcttgatttcattgttgactcaataatcattcaggaacaggttatttaatttccatgtatttgcatggttttgaacattccttttggagttgatttccagttttattccactgtggtctgagagaatgcttgatataatttcaattttaaatttattgaggcttgttttgtggcctatcatatggtctatctgggagaaagttccatgtgctgttgaataaatgtatattctggggttgttggatagaatgttctgtaaatatctcttaagtccatttgttccagggtatattttaaatctattgtttctttgttaactttctgtcttcttgacctgtctagtgctgtcagtggagtaatgaagtccgccactatcattgtgttgctgtctatctcattttttaggtctaggagtaattgttttataaatttgggagctccagtgttaggtgcatatatatttaggattgtgatattttcctgttggagaaggccttttaccattatataatgtccctctttgtcttttttaactgctgttgctttaaagtttgtcttgtctgatgtaagaatagctactcctgctagcttttggtgtccatttgcatggaatgtctttttccacccctttccttaagtttatgagttcttatgtggtaggtgagtcaactgaaggcagcagatagttgattggtgaattcttacccattcagcaattctgtatcttttaagtagagcatttaggccatttatattcaatgttagtattgagatgtgaggtaccattccattcattgtgctatttgtttcctgtatgccttgggtttttttgtttttgtttttgtttttgcttttttttgtattataggtcctgtgagatttatgctttaaagaggttctgttttgatgtgtttccaggatttgtttcaagatttagagctccttttagcagtttttgtagtgctgccttggtagtggcaagttcttttagcatttgtttgcctgaaaaagactgtatctttccttcatttatgaagcttggttttgcttggtacaaaattcttggctgataattgttttgtttaaggaggctgaagatagggccctaatcctttcttgcttgtaaggtttctgctgagaaatctgctgttagtctgataggttttcctttacaggttacctggtgcttttgcctcacagctcttaagattctttccttcatcttaactttagataacctgatgacaatgtgcctaggctatgatctttttgtgataaatttctcaagtgttctttgagcttcttgtatttggatatctaggtctctagcaagggtggggaagtttccctcaattattgcacaaatgtgtttccaaacttttagatttctcttcttcctcaggaacaccaattatttttacatttggttgtttaacatcccagactccttggaggctttgttcatattttcttattcttttttctttgtctttgttggattgggttaattcaaaaaccttgtcttcaggctctgagttctttcttgtgcttgctcaattctattgctgagacgtaccagagcattttgcatttctataagtgtgtccattgtttcctgaagttttgttttttatttatgttatttcattgaagatttctcccctcatttcttgtatcattttttttttaatttccttaaattgggctttgcctttctctgttgcttccttgatgagttctttgtcaggtagatcaggggtttcttcttggtttagatccacatctggtaagctagtgtgattttgtgggggatgttaaagaaccttgttttttcatattaccagagttggttttcttgttccttctcatttgggtaggttctgtcagagggaagatctagggctcaaggctgttgttcagattcttttgtcctatggcgtattctcttgatgtagtactctcccccttttcctagggatgtgccttcctgagagcccaagctgtagtgattgttatctctttttagaatctagacatccagcagtcctaccaggttccaggctggtattgggggttgtctgcacagagtcctgtgatgtgaaccatctgtgggtctctcagctgtggataccagtacctgctctggtagaggtagcaggggagtgagatggactctgtgagggtccttagttttggtcatttaatgcactatttttgtgctggttggcctcctgccaggagatgatgctttcaagacagcatcagctgtggtagtatggggaggatcaggcggtgggtgggtccctagaactcccaagagtatatgccctttgtcttcagctaccagggtgagtaggaaaggaccatcaggttggggcagggctaggcgtgtctgagctcagactcttcttgggcgagtcttgctgcagctgctgtggggatggaggtgtggttcccaggtaaatggaattatgttcccaggaggattatggctacttctgctgtgtcgtgcaggttgtcagggaagtaggggtaaactggcagtcacagacctcacccagctcccacgaaacccagaagatcaatctcactcccaccatgcccccaactcagtagtaccaagtctgtttccaggcagtgggcaaacaggactgagaacttgccccaggctaccagcctcccagctgcaaaagcaagtagtgcttttgtgcttccctgcctgtggagtctgcacaccagattcatgccttcccccaagttctggccaggagatttcctattcagttggaattgttagaaaattcagctggagttttccttctccctgtgatgttttctgagttcctctggcagtcctccccaggtagccctgtgagacaagtcagaaatggcatccctgggaacccagagagcccacagggcttttcctgctacttcctttacccctatatttcacttggttctctaaattgactcagctccaggtaaggtcagaatcttctcccatgatctagaccttcaggttccccagtgaggttgtgtgtttgaaggtggacaatccccctttcctacttccacagtttgggcactcacagtatttggggcatctcccgggtcctacgggagcaatccacttccttcagagggtctgtggattctcttggctttcctgaattattcctgcagtagttctggagcaaaagttcacgatgcaagactccacatgctgctctgtccatccgagtgggagctgcagtctagtcctgcttcccgtccaccatctctgtagccttatattagtagtatattttgaagtcaggtaatgagatgcctccagctttgttctttttgcttaggattgctttggctatttagactcttttttggttccatatgaattttacaataatttttttctaattctgtgaaaaatgatgttggtagtttgacaggaatagcatttaatctcttaattgctttaagtagtgtggccatcttaatgatattgactcttctaatccatgagcatggaatgtttttccatttgtttgtgttgtctctgatttctttcagcagcaatttatagttctccttttacctccttggttagctatatttttagggattttattctttttgtgtctatagtgaatgggattacgttattgatttggctctcaccttggacattattggtgtatagaaatgctacttattttttgtacattgattttgtatcctgaaactttactgaacttgtttatcagttccaggagccttttggcagattctttaaagttttctaggtatgcaattatgttatcagtgaacagaaaaatttgacttcttcttttcctatttggatgccttttatttctttctcttgcctaatggctctggctagtacttccagtgctatgttgaataagagaggtgagagtgggcatccttgtcttgtgctagttctcaagggtaatgcttccagcttttgcccattcagtaggattttggctgtgggtttgtcatagatggctcttattattttgaagtaagttcctttgataacctaatttgctgagagtttttatcatgaagggatgttggattttatcaaaggctttttccatgtctattgagatgatcatatgggttttctttctaattctgtttatgtggtgaatcacatttatggattcacgtatgttgaaccaaccttgcattgtgagaatgaagcctacttgatcatggtgaattaacttttttttttttttttttgagtcagtgtctcattctgtcacctgggctggagtgcagcagcacaatcacagctcattgaagcctcaacctcctgggctggagtgatcctcacacctcagcctcctaaatagctgggaccactacacccagctaattttttattttttctgtagatgtggggtctcatatcatgttgcttaaactcctgggctcaagcaattctcctgactcaacctcccatagtgctgggataacaggtatgagccaccgtgcctggccatgaattaactttttcatgtgtagctggattcaatttgcaagtattttgttgagcatttttttcagtctatgttcatagggatattggcctgtagtttcttttttgtctttgccaggttttggtataaggataatgccggcttcatagaataagttagggaggagtccctcctcctcatttttttggaatagtttcagtagaattggtaccagttcttctctgtacttttggtagaatttggctgtgaatctttctggtctcaggatttttttttttttttagtgttagattattttattactgaatcaatttcaaaactcaatattgtctatttggggtttcaattgcttcttgattcaatctttggaggttgtgtttccaggaatttatccatttcctctagattttcttgtttgtatgcatacagatgttcataatgatctctgaggttcttttatatttctgtgggattagttgtaatgtcacctttgtcctttctaaatgtgcttatttggatcgtcgtttttttctttgctaatgtagctagcactctatcggtcttgcatttcctttcaaagatccaactttttgtttcattgattctttgtatgggtttttgaattttgattccattcagttctgttctgattttagttatttcttttcttctcctagctttggggttagttcttgttttggaatgaacatttttaaggcctttaatatatatggccaaattgccatccaaaaagaatgtatcactctgcactgccacaagcaaagcatggagtgctcccgtcatctcagaataaaacccatccatttaatcagctcatttgatgaaggcccaggaaaacaaagttagggcatgattcttactaggtagatgaagagagttaagagatggctagtggggcgggaaaggactgaagcctcaagccttcatcctgtttaattgtgaagtatagtgaccaactagttctagttggcctgagactttccaggttttagcactgagagtccagagtcccaggaaacccctaagtgtcaggcagacaaggacacttggtcgctctatcaaaagttaaacaccagtaccacctctaaagttctatttaccacttacaatttcagttttgagcctgtgtctaaaactcatttttttaagatattccttggtatattcagggaaaacatcatagaacagagcctaagacgtgtgagtggtaaatagaataggtcgggtgtgaatccttctgctaacctgaaaaataaggcagtcagcgtccttggaccctactagtgtcatccaggtccagggccttccccctcctaggattccatgttcatgaaatctgagccaagcaacagtattggtattagattaggcttatttaacctcaaccacaaaagaaagttagatttgctgagaaaaagtggacattctctgaaaaacatccccttattttctaagtgttcaaattaactactaggtatttcctttcttcttcttctttttttttttttttttttttttttttttttttttttttgagacagagtctcactctgtcaccaggctggagtgcagtggcgtgatctcggctcactgcaacctctgccttctaggttcaagcgagtctcctgcctcagcctcccaagtagctgggactacaggtgtgtgccaccacgcccagctaatttttgtatttttagtagagatggggtttcaccatgttggccaggatggtcttgacctcttgaccttgtgatctgcctgcctccacctcccaaagtgctgggattacaggtgtgagccactgcgcccggcctcctttcttcttgtgctattgaagagggatttgtgatttagggggagctaacatatgatccttcaacatggagaactctacctttcttcaaaggaagctcagttctagtggggcaaacactgtgcatagtttgcccttgacctttgggttccataagctctctgttgggctgggctggaatttacttctcaccagtcacccatggaggacccactcagtgagggccccaggtaagggaagatgcacagaacatggtgatgggccctggccactgtgcaatgccaagaggagtcctccctgagttgagttttacagcctctccaggtcaccttcattttaggactcttttcttcatggtgcctttgtacctccccaggacagtatttatgatgaaatggaagagaagtggtcaaaacagaaggcgaaatggaagaaggatgagaagttcgagcgagaaaatatcctgctacagcaaagtgagtacagaaactctagcttttttgatgacaagtgcattaaaaaactgccatgaagtttggtcttgacttgaggaaggtggccttgggcttaccaagggtgatgggccacatgctagatacctgaatggaaggtgcccagagttttcatgaaagcaaaatgacaacaagggtagggtcttttttgaagttcaggcatctgatctaagagagtctaagcctgtaccttctgaaactcatttggtccaagtttgcccatgatggctggaacaaatgttagaatccctgtagggagtgcagacttattatctagaaacagatgaacccaaagttccaagagttctttagttagaatgtgaaatgttcacttgcatgtgggcagggggcagataggaacaacacaatccattatactgagagcttctatattcccacgtcttccagaaggaagtcacacttggtaaatatttttaatatttccaacaattaacacagagcttgcaccatacaaagtattctataggtgcacctcccacccccattggacttgttcataaaaggaaaaaagaagagaatttgtagagactactccaggcctagaagactagttgaggtaggagtgggacctctacagacctattccgcattccacgccaaccacatttatttcagatttagttgattttaacaaattactcatttaaatgcagatactccatgggaaaattaattcacattctggtgggcactctggactgccagaaggtaatatgaagaccccggagttaaggctggggaacgggagggggagctgctcctgtctggggctttacctagaattctagtgcaatagaacccaagtcatatcccagattctagctactcatacgactctcatcccatgttgctaaagtctaagtaaagatgtaaccgccagttttggaagaccagaattcagctgctcaccatccagctcagtcagaggcttacgctgtcagaccagagactccctgtccatccccagaattgcaacactgaaatctgtgtttccctccacccctccttcctcttgtttgataatggggctctactggcaggtttcctgcccaggaaaagagctgaagcctacctctaccccagcactaagtacaggatgaattttattgctggcaaagtaatgttagccaagagctttattttaagataaggatatccatgatagcatagtggttacatcagcagagggaatggacaaaataaaaagcaacagattcaaaataaactacacacaaaagaaccagagatgttggtggtaaatcccatatgactaatgtgattgaggacaaccaccgtgctcacctcaccctcaagcaccttcaggtgagtgtcagaggccaaacaccaggctgcaatgaccttgagtctgacacagtctggaattgcttttatctttagatattctgggtttctcattgcacctgcttttcccatctttacacatatatgtgctttcctgtcacttccacagaaaaaaagatgaccaaaaaattcgaaatggagtcaggagaagaagataagaaaataaatgaatcctgcagtgctgtctttgagaacttcattcaagagaaggaggtaactcagcccaaagcaccttggtgattgaatgggtagtccaggtggtacacccaagtccccaggtgtgcctccataattaggtgatctttttgtctttctgggcataatcctcctctcccagctttctggaaatgtatgcaaatagactgacagtcttgctgtcctttagctgggcaatcttcccacaggctagacagtcttatcaaagggttcttagaacaaaaattttaattaactggaaataacagaatgctaaacatgcagaaactgaaattccttattttgccaaaatcccatctctgaatatccttttcattcctcactgtagctgttatagctgtagtgctattactgggcgctagggcaggtacaggtttaactttatgggaacttgccaaaacttattttccaaagtagttgtaccatttttttcttgcatcttagatatattggaattctagttgctgtatatcctccacaacaattagttttgctagtcctttaattttggccattccagtgggcatgaagtggtacttcattatggttttagtttccctgatgactaattatgttgggcattttctcatatgcttattggtccattcatatatgttcttccataaagtgcctgttcaagtcttttcccatttgaaaaagtaggaggtgcttacatttttatttttgatatgtaggagtacttttatattgtggatacaagttttttttgccagatatacatgttgtaaatattgtctgtcagcctgtggtttgcctcttcattttattaatgatatatttcgatatacagaagctttaaattttgatgaaaggcaatgatcatttttttacttttatggttacagatttttgtgtcctctctataaaatcattgcctattccaaggtcatgaagatattctattttttagaagctttaaaattttagcttctatgattctctgatctattttgaataatttttgtgtatgaagtgaagtgtaagagtcatgggtcatttttgtcttatggatattcagttgtcccagcatcattctttaaaaatactttcctttccccattgagttgccttagtgtttgatacagtttagatttgtgtccctgcccaaatctcatgtcaaattgtaatctccaatgttggagaagggggtctggtgggaggtgattggatgatggggacagattctccccctttctgttctcgtgatagtgagtgagctctcaaaagatcaggttgtagcacctcccccttctctctctttcttttgttccagctatgtaagacaggcctccttcctctttaccttctgccatgattgtaagtttcctgaggcctccccagccatgcttgcagaaatgtgagccaattaaacctcttttctttcttttttttttattctttttttaatttattatactttaagttccagggtacatgtgcacaacgtgccagtgtgttaaatatgtatacatgtgccatgttggtgtgctgcacccattaactcatcatttacattaagtatatctcctaatgctatccttcccccctccccccaccccacgactggccctggtgtgtggtgttccccaacctgtgtccaagtgttctcattgttcatttcctacctacgaatgagaacacacggtgtttggttttctgtccttgcaatagtttgctcagaatgttggtttccaacttcatccatgtccctacaaaggacatgagctcatccattattatggctgcatagtattccatggtgtatatgtgccacattttcttaatccagtctatcattgatggacattttggttggttccaagtctttgctattgtgaatagtgccacaataaacatacgtgtgcatgtgtctttatagcagcatgatttataatcctttgggtatatacccagtaatgggatggctgtgtcaaatgggatttctagttctagacccttgaggaatcgccacactgtcttccacaatggttgaactagtttacagtcccaccaacagtgtaaaagtgttcctatttctccacatcctctccagcacctgttgtttcctgactttttaatgatcgccattctaactggtgtgagatggcatctcattgtcgttttgatttgcatttctctgatggccagtgatgatgaacattttttcgtgtgtctgttggctgcataaatgtcttcttttgagaagtgtctgttcatatccttcgcccacttgttgatggggttgtttgattttttcttgtaaatttgtttaagttcttagtagattgtggatattagccctttgtcagatgggtagattgcaaaaattttctcccattctgtaggttgcatgttcactctgatggtagtttctttcgctgtgcagaagctctttagattatttagatcccatttgtcaattttggcttttgttgccattgcttttggtgttttagacatgaagtccttgcccatgcctatgtcctgaatggtattgcctaggtttccctctagggtttttatggttttaggtctgacatttaagtctttaatccatcttgaattaatttttgtataagatgtaaggaagggatccagtttcagctttctacatatggctagccagttttccaagcaccatttattaaatagggagtactttccccatttcttgtttttgtcaggtttgtcaaagatcagattgttgtagatgcgtggtattatttttgagggctctgttctgttccattggtctatatctatgttttggtaccagtaccatgctgttttggttactgtagccttgtagtatagtttgaagtcaggtagtgtgatgcctccagctttgttcttttggcttaggattgtcttggcaatacaggctcttttatggttccaaatgaaccataaaagtagttttttccaattctatgaagaaagtcattggtagcttaatggggatggcattgaatctgtaaattaccttgggcagtatggccattttcacgatattgattcttcctatccatgagcatggaatgttcttccatttgtttgcatcctcttttatttcgttgagcagtgatttgtagttctccttgaagaggtccttcacatcccttgtaagttggattcctaggtattttattctctttgaagcaattgtgaatgggagttcactcatgatttggctctctgtttgtctgttattggtgtataggaatgcttgtgatttttgcacattgattttgtatcctgagactttgctgaagttgcttatcagcttaaggagattttgggcagagatgatggggttttctagatatacaattcatgtcatctgcaaacagggacaatttgacttcctcttttcctaattgaataccctttatttccttctcctgcctcattgccctggccagaacttccaacactatgttgaataggagtggtgagagaaggcatccatgtcttttgccagttttcaaagggaatgcttccagtttttgcccattcagtatgatattggctgtgggtttgtcataggtagctcttattattttgagatacgtcccatcaatacctaatttattgagagtttttagcatgaatggttttcgaattttgttgaaggccttttctgcatctattgagataatcatgtggtttttgtctttggtactgttgatatgatggattacgtttattgatttgcgtatgttgaaccagccttgcatcccagggatgaagcccacttgatcatggtggataagctctttgatgtgatcctggattcagtttgccagtattttattgaggatttttgcatcgatgttcatcagggatattggtctaaaattctctttttttgttgtgtctctgccaggctttggtatcaggatgatgctggcctcataaaatgagttagggaagattccctctttttctattgattgcaatagtttcaaaggaatggtaccagctcctccttgtacctctggtagaattcggctgtgaatccgtctggtgctggactttttttggttggtaggcttttaattattgcctcaatttcagagcctgttattggtctattcacggattcaacttcttcctggttaagtcttgggagggtgtatgtgtccaggaatttatccatttcttctagattttctagtttatttgcatagagttgtttatagtattctctgatggtagtttgtatctctgtgggatcggtggtgatatcccctttatcattttttattgcgtctatttgattcttctctcttttcttctttattagtcttgctagcggtctatcaattttgttgatcttttcaaaaaaccagctcctggattcattgattttttgaagggtttttgtgtctctatctccttcagttctgctctgatcttagttatttcttgccttctgctagcttttgaatgtgtttgcccttgcttgtctagttcttttaattgtgatgttagggtgtcaattttagatctttcctgctttcccttgtgggcatttagtgctataaatttccctctacacactgctttaaatgtgtcccagagagtctggtatgttgtgtctttgttctcattggtttcgaagaacatctttatttctgccttcattttgttatgtacccagtagtcattcaggagcaggtttttcagtttccatgtagttgtgctgttttgagtgagttcttaatcctgagttctagtttgattgcactgtggtctgagagacggtttgttgtgatttctgttcttttacatttgctgaggagtgctttacttccaactatgtggtcaattttggaatacgtgtgatgtggtgctgagaagaatgtatattctgttgatttggggtggagagttctgtagatgtctattaggtccacttggtgcagagctgagttcaattcctggatatccttgttaactttctgtctcgtggaactgtctaatgttgacagtggggtattaaagtctcccattattattgtgtgggaatctaagtttctttgtaggtctctaaggacttactttatgaatctggctgctcctgtattgggtgcatatgtatttaggatagttagctcttcttgttgaattgatccctttaccattatataatggccttctttgtctcttttgatctttgctggtttaaagtctgttttatcagagactaggattgcaacccctgcctttttttgttttccatttttttgttagatcttactccatccttttattttgagcctctgtgtgtctctgcacgtgagatgggtctcctgcatacagcacactggtgggtcttgactatccaatttgccagtctgtgtcttttaattggagcatttagcccatttacatttaaggttaatattgttatgtgtgaatttgatcctctcgatatgatgttacctggttatctgttcattagttgatgcagtttcttcctggcattgatggactttacaatttggcatgtttttgcagtggctggtaccggttgttcctttccatgtttagtgcttccttcaggagctcttgaaagacaggcctggtggtgacaaaatctctcagaatttgcttctctgtaaaggattttatgtctccttcacttatgaagcttagtttagctggatatgaaatcctgggttgaaaattcttttctttaagaatgttgaatattggcccccactctcttctggcttgtagatagagtttctgccgagagatccactgttagtctgatgggcttccctttgtgggtaacccaacctttctctctggctgcccttaacattttttccttcatttcaactttggtgaatctgacaattatgtgtcttggagttgctcttctcgaggagtatctttgtggcattctctgtatttcctgaatttgaatgttggcctgccttgctaggttggggaagttctcctggataatatcctgcagagtgttttccaacttggttccattctccctgtcactttcaggtacaccaatcagacgtagatttggtcttttcacatagtcccatatttcttggaggctttgttcatttctttttactcttttttctctaaacttctcttcttgcttcatttcattcatttgatcttcaatcactgataccctttcttccacttgatcgaatcagctactgaagcttgtgcgtgcatcacatagttcttgtgccatgattttcagctccatcaggtcatttaaggacttctctacactgttttttctagttagtcattcatccaatcttttttcaaggtttttagcttgtttgtgatgggttcgaacatcctcctttaacttggagaagcttgttattactgatcatctgaagccttcttctctcaactcgtcaattcattctctgtccagctttgttccattgctggtgaggagctgcattcctttggaggagaagagtcgctctgatttttaaaattttcagctattctgctctggtttccccccatctttgtggttttatctacctttggtgtttgatgatggtgatgtacagatgaggttttggtgtggatgtcctttctgtttgttagttttccttctaacagtcaggaccctcagctgcaggtctgttggagtttgctggaggtccactccagaccctgtttgcctgggtatcaccaggagaggctgtagaactgcagatactgcagaacagcaaatgttgctgcctgatcgtttctctgaaagcttcatctcagaggggcacccagctgtatgagttgtcagttggcccctactgggcggtgcctcccagttaggcttctcgggggtcagggacccacttgaggaggcagtctgtccattctcagatctcagactccatgctggcagaaccactactctcttcaaagctgtcagacagggatgtttaagtctgcagaagtttctgctgccttttgttgagctatgccctgcccccagaagtggaatctacagaggcaggcaggcctccttgagctgtggtgggctccacccaattcgagctttccagccgctttgtttacctactcaagcttcagcaatagcaggcgcccatcccccagcctcactgctaccttgccattcaatctcagactgctgtgctagcagtgagcaaagctccgtgggcgtgggaccctcccagccatgcatgggatataatctcctggtgtgccatttgctaagactgttggaaaagcacagtattagggtgggagtgacccgattttccaggtgccgtctgtcacggcttcccttggctaggaaagggaattatctgacccctcgcgcttcccaggtgaggcggtgccccaccctggttcggctcccggtccgtggcctgcacccactgtcctgcacccactgtctgacaagccccagtgagatgaacctggtacctcagttggaaatgcagaaatcacctgtcttctgcatcactcatgctgggagctatagactggaggtgttcctatttggccatcttggaaactccccctaaacctcttttctttataaattacccagtctctcaggtagttcttcatagaaatgtgagatcagactaatatagtgtctttgctgtatttggggtgttaggactctccgttctgtttgactatttttccatacttaggtcaacaacacattgtcttgactactgaagtttgaaatcgggtagcaaaggttatctagctttgctattgtttttcaagattattttgcctttccacatgctttgtatttttacataaatgttagaactagcttgtcaatttagaattagcttatcaaggaagtttgctgatattttgactgggatttcattgaatataaagatcaatctgtggcgagattaattcttaagagtattgaatctatccactgacttaagaaaagcttttgatgaaaatataatttcttttaatatttgtcagtgagataaggttgaacataattaagattttcattaacttcaacaagtcatgtcactagtttataatgtgtgcttcattatagcagtgtctaagctttggtgaatattatattcctgaatcctagtctggctttcttaactccctagaagatgtgccagaaccacagtgctaaccttttcccaataaaattgtttttaggagctcttgaaacaacatcaaagtgacaccttgcaattagaagagctgagaaaaaccaaagaggtaagctttttcatcctttcctgtggacttggtatattacaaatacaccaataaaataacaagctgtcagtataatggaatcaatgataatttccccaaagccaataagaaatggaagacctaaagctgagtttactggattcaataagttaaaaagaatttttgaaattatctgtaaaataaagccagtgggtctttttaaagtctgatttgaacaaatagatcagcaatatactatgtgatcttcaatgttgaatgactttcatttctagcaaggttcaaaccacaaatgatctttcagttataaaacaccaagttcttccctttgagctctgaaaagtataaaactgtctcctttgaaactctgtcaccaagcccctccttaagctctgaatgtacctcacacatgataacttcctcagggactctattctggggcaaattatggcagtctgtgggagacaactgaagaggagccgttcaaatccacaaggtgatgtgtgattcttccatcactgaaaatttgacttggatccagaatggacacgtttgagaaaacattagtcattataaaggcattgtaaatgaattctatcttagagcccaggcagggcttcagcattatggaaaggcaaacagactgtggtgtcctacaagttcaagaaatgggctttggaggaagatatacccagtgtattataataactattttcatgagcttgtctacgaattctgtcatttgtgtcatgtctgggcctgtttctcttcattgatttttctcctcatttatggtcatatttccttgtttgcatgcctggtaagtttggcttggatgtcagtcattttggtgtttaccttgttgggtgctgaatatttttatattcctttagatattcttaagctttgccctgggatgcagttaagttgcctggaaacagtttgatcctttcaagccttgctttttaagcttcgttgggcagaactaaagcagtctttagtgtggaactaattttccccactattgaggtaataccctctgagtacttgacaccacaccctctgtatgagaaggattttctactctgcctggtgggaccatgaactattcccagccttgtgttggccctggggattgttccacctgctcctcgctgatgtttccttcctctaaccttgtctctttctatttcttccctacatcactccaccccagaggcacttgcctccttgctgttcccttaacaggccaggatgttcctacctgggggtctttgatgttctctcttcctgaaaagctctttcccggatatccacatgactaacttcctttcctcctcctgttctttattcaaatgccaccttctcagaaggtgcccgatttaagggctccgctccctgcccaacacttgcttttctccaaatgggatgccactggaggtttttgaggagagagtatcatttgggaaaataactgtggcagcaatgtgaaggagaatctgaagaggcaaaatgatgggaggcagaacctattagaagggtcacctcccctttacacctcaacctgacttctgctccaatcccagccatggaaactgttcttgttaaaatcacaagtaaattccaagttgccaaatccaaggaatgcttcacctcactggacatgagcagtatcaggtgcgattgatcattctctccttgcaacattcacctgtcttagctttcatgggcttctggtgtttccttcacctcattggtcacaccttctcaatctcctttactagaactagaactctgcttaaaacccttcaatggcaccccactgttctcccacctactttctaagtcctggagtattttgaggcttgttcccaggccccacttatcttctttatctcccgtttctcctttggtgagctcatctgttcacacagatgtaaaagccatctctgtactgataacttggtttgatacctccagccttgcctctctcctgagctccaggcttgtacatccaactgcccatttgacatttcaacataggtgacatacagacacctcaaaattaacatgcccagttccacactctcaattttccaccagagatttagcccccaaattgtcaactccctcagctgttctaagcctagacctgaagtcatccttgatttcttctttcctttcactctcccaaattcaacccagcagcctcagccaatcctctataacataatccaaattcatccacgtccctccaactctgttgtcaccttaccctagtccattatttctcacctacacgactgtagtattctcctccttagttccgttgctttccctcttgcccttccaatccatccccatggagcataatgtaaacagtaagatacgtgcattcacttctctgcttaaaacccttcagtaggtccccattgttcttaggttaccttgtcctctcaggtgccaccagacttccctgtatttcctcaccatggccctctatccttactatctctattccagccatattggtgttcctttgggtcctcaaacagaatgagaattttgcattttttttattatactgtaagttttagggtacatgtgcataatgtacaggtttgttacatatgtatacatgtgccatgttggtgtgctgcacccagtaactcgtcatttaacattaggtatatctcctaatgctatccctcccccctccccccaccccacaacaggccccggtgtgtgatgttccccttcctgtgtccatgtgttctcattgttcaattcccacctctgagcaagaacatgtggtgtttggttttttgtccttgccatagtttgctcagaatgatggtttccagcttcatccatgtccctaccaaggacatgagctcatcattttttatggctgcatagtattccatggtatatatgtgccacattttcttaatccagtctatcattgttcgacatttgggttggttccaagtctttgctattgtgagtagtgccgcaataaacatacgtgtgcatgtgtctttatagcagcatgatttataatcctttgggtatatacccagtaatgggatggctgggccaaatgggatttctagttctagatccctgaggaatcgccacactgacttccacaatggttgaactagtttacagtcccaccaacagtgtaaaagtgttcctgtttctccacatcctctccagcacctgttgtttcctgactttttaatgatcgccattctaactggtgtgagatggtatctcattgtggtttgatttgcatttctctgatggccagtgatgatgaacattttttcatgtgtcttttggctgcataaatgtcttcttttgagaagtgtctgttcatatcctttgcccacttgttcatggggttgtttgtttttttcttgtaaatttgtttgagttcattgtagattctggaatattaaccctttgtcagatgagtaggttgcaaaaattttctctcattctgtaggttgcttgttcactctgatggtagtttcttttgctgtgcaaaagctctttagtttaattagatcccatttgccaatttaggcttttgttgccattgcttttggtgttttagacatgaagtccttgcccatgcctatgtcctgaatggtattgcctagattttcttctagggtttttatggttttaggtctaacatttaagtctttaatccatcttgaattaatttttgtataaggtgtaaggaagggatccagtttcagctttctacatatgactagccagttttccaagcaccatttattaaataaggaatcctttccccatttcttgtttttgtcagatttgtcaaagatcagatagtgtagatatatggcattatttctgagggctctgttctgttccattggtctatatctctgttttggtaccagtaccatgctgttttggttactgtagacttgtagtatagtttgaagtcaggtagcgagatgcctccagctttgttctttggcttaggattgacttggcaatgcgggctcttttttggttccagatgaactttaaagtagttttttccaattctgtgaagaaaatcattggtagcttgatggggatggcattgaatctataaattaccttgagcattatggccattttcacgatgttgattcttcctatccatgagcatggaatgttcttccatttgtttgtatcctcttttatttcgttgagcagtggtcaacgaagaggtccttcacatcccttgtgagttggattcctaggtattttattctctttgaagcaattgtgaatgggagttcactcatgatttggctctctgtttgtctgttattggtgtataggaatgcttgtgatttttgcacattgattttgtatcctgagactttgctgaagttgcttatcagcttaaggagattttgggcagagatgatggggttttctagatatacaatcatgtcatctgcaaacagggacaatttgacttcctcttttcctaattgaataccctttatttccttctcctgcctcattgccctggccagaacttccaacactatgttgaatgggagtggtgagagagggcatccctgtcttttgccagttttcaaagggaatgcttccagtttttgcccattcagtatgatattggctgtgggtttgtcatagatagctcttattattttgagattcgtcccaccaatacctaatttattgagagtttttagcatgaacggttttcgaattttgttgaaggccttttctgcatctattgagataatcatgtggtttttgtcattggttcggtttatatgctggattacatttattgatttgcgtatgttgaaccagccttgcatcccagggatgaagcccacttgatcatggtggataagctttttgatgtgctgctatatttggtttgccagtattttattgaggatttttgcatcgatgttcatcagggatattggtctaaaattctctttttttgttgtgtctctgccaggctttggtatcaggatgatgctggcctcataaaatgagttagggaggattccctctttttctattgattgcaatagtttcaaaggaatggtaccagctcctccttgtacctctggtagaattcggctgtgaatccatctggtcctggactttttttggttagtaagctattaattattgcctcaatttcagagcctgttattggtctattcagggattcaacttcttcctggtttagtcttgggagtgtgtatgtgtccaggaatttatccatttcttctagattttctagtttatttgcatagaggtgtttatagtactctctgatggtagtttgtagttctgtgggatcggtggtgatatcccctttatcgtttttttttgcgtctatttgattcttctctcttttcttctttattagtcttgctagcattctattaattttgttgatcttttcaaaaaaccagctcctggattcattgattttttgaagggttttttgtgtctctatctccttcagttctgctctgatcttagttatttcttgccttctgctagcttttgaatgtgtttgctcttgcttctctagttcttttaattgtgatgttagggtgtcaattttagatctttcctgctttctcttgtgggcatttagtgccataaatttcccctacacactgctttaaatgtgtcccagagattctggtatgttgtgtctttgttctcattggttttgaagaacatctttatttctgccttcatttcattatgtacccagtagtcattcaggagcaggttgttcagtttccatgtagttgtgtggttttgagtgagtttcttaatcttgagttctagtttgattgcactgtggtctgagagacggtttgttgtgatttctgttcttttacatttgctgaggagtgctttacttccaactatgtggtcaattttggaatatgtgcgatgtggtgctgagaagaatgtatattctgttcatttggggtggagagttctgtagatgtctattaggtctgcttggtgcagagctgagttcaattcctggatatccttgttaactttctgtctcgtggagctgtctaatgttgacagtggggtgttaaagtctcccattattattgtgtgggagtctaagtctttttgtaggtctctaaggacttactttatgaatctggctgctcctgtattgggtgcatatatatttaggatagttagctcttcttgttgaattaatccctttaccattatataatggccttctttgtctcttttgatctttgttaattgaaagtctgttttatcagagactagtattgcaacccctgcctttttttgttttccatttgcttggtagatcttcctccatccctttattttgagcctctgtgtgtctctgcatgtaaggtgggtttcctgaatacagcacactgatgggtcttgactatccaatttgccagtctgtgtcttttaattggagcatttagcccatttacatttaaggttaatattgttatgtgtgaatttgatcctgtcattctgatgttagctggttattttgctcgttagttgatgcagtttcttcctagcctcgatggtctttacaatttgacatgtttttgcagtggctggtaccggttgttcctttccatgtttagtgtttccttcaggagctcttttaaggcaggcctggtgtgaccaaatctctcagcatttgcttgtctgtaaagtattttatttctccttcaatcatgaagcttagtttgactggatatgaaattctgggttgaaaattcttttctttaagaatgttgaatattggccctcactctcttctggcttgtagagtttctgctgacagatctgctgttagtctgatgggcttccctttgtgggtaacccgagctttctctctggctgcccttaacattttttccttcatttcaattttggtgaatctgacagttatgtgtcttggagttgctcttctcgaggagtatctttatgctgttctctgtatttcctgaatctgattgttggcctgccttgctcggttggggaagttctcctggataatatcctgcagagtgttttccaacttggttccattctccctgtcactttcaggtacaccaatcagacgtagatttggtcttttcacatagtcccatatttcttggaggctttgttcatttcttcttattcttttttttctaaacttctcttcttgcttcatttcattcatttgatcttccatcactgataccctttcttccagttgatcgaatcggctactgaggcttgtgcatttgtcacatacttcttgtgccatggttttcagctccatcaggtcctttaaggacttctctgcattggttattctagttagccattcgtctaatcttttttcaaggtttttaacttcttggccatgagttcgaactttctcctttagctcggagtagtttgatcatctgaagccttcttctctcaactcgtcaaagtcattctccatccagctttgttctgttgctggcgaggagctgcattcctttggaggaggagaggcactctgatttttagaattttcagtttttctgctctgttttttccccatctttgtggttttatctacctttggtctttgatgacagtgacgtacagatggggttttggtgtggatatcctttctgtttgttagttttccttctaacagtcaggaccctcagctgcaggtctgttggagtttgctggaggtccactctagaccctgtttgcctgggtatcagcagcggaggctgcagaacagcagatattggtgaacagcaaatgttgctgtctgattgttcctctgaaagttttgtctcagaggagtacccagccgtgtgatgtgtcagtctgcccctactggggggtgcctcccagttaggctactcaggggtcagggacccacttgaggaggcagtctgtccattctcagatctcaagctgcgtgctgggagaaccattactctcttcaagctgtcagacagggacatttaagtctgcagaggtttctgctgccttttgtttggttatgcctgcccccagaggtggagtctacagaggcaggcaggcctccttgagctgcggtgggctccacccagttcgagcttcctggccactttgtttacctactcaatcctcagcaatggtgggcgcccctccaccagcctcactgccacctcgcagtttgatctcagactgctgtgctagcaatgagcaaggctccgtgggcgtaggaccttatgagccaggcatgggatacaatcttctggtgtgccgtttgctaagactgttggaaaatgcagtattagggtgggagtgacctgattttccaggtgccatctgtcacccctttccttggctaggaaagggaattccctgaccccttgcacttcccggatgatgtgatgcctcgccctgcttcggctcatgctcagtgcactgcacccactgtactgcacccactgtctgacaatccccagtgagatgaacacgatacctcagttggaaatgcagaaatcatacgtcttctgcatcactcacgctgggagctgtagactggagctgttcctattcggctgtcttggctccacccctgagcattttgcattctaaggacctttgcacaggcttctattcattctttagtggaagtttgtgtgtttgtttcaagaagctactttttagagcagttttaggtttacagaaaaattgagcagaaagtacagagagttcccatatactaccccaccccaccctaccccaccactagtttcctttattattagtatcttgcattgggatggcacattagttgcaattgatgagccaatgtggatgcattcttattaactaaagtccatagtttacatgagggttctctctttgtgttgtacattctgtgggttttgcctaatatgtcatgtcatgtatccaccattatagtgtcatacagaatagtttcactgctctaaaagtgccctctatcccacctattcatccctcccttcccctccaaatccctagaaaccactaatcttttttctctctctatagttttgccttttccagagtgtcatataattggaatcggtagtaggtatttaataaagacttgcttagtgaatgaataactgattgccattagaaccattcatatgagctctggtgaggctgaagagaaggatatagatgggtgagacagagaggaggcaggactgacagggtgtgagtggccatgagtgatgcaaaagtagctcaggttgctccctttcatcatagtccaggtgccctggagaagagaccaaataaatagacattggcatgatgtcctgcaacagcttcttcttatgcaggtcatgcaggaagaattgcatgcacaagcccttatcctagagtcactgaacacaaacctctactatacccagttggaactccagaaagaggtgagtccctactggagtggggatgggggttgggggaagaacccaggtctccatccagctctgccatatagctctgccctggatggctctgggttggggaagatggctattaaaatgtatgtctttcagaaagctatagtgggaaatctggagaaaatgcttcaaaccaagtttgctgaaactgaagaaaagtataagcacaccatacagatcctgacggaagagaacattcatctgaagtgcggctgctgctgaaaaagacatagctgagttctctttaggagtgggaaggagtttgagtgaggaatgggttaggaagatagaccaactgctccctagttatgtcaaggcacaggtgttttcgggagggaggtatgtcactctaggccagtgacacaaagccagatagttcacttgaggtggagtggagatgtgtctatacttctcccattcacctgtgtccttgtttctatgcaaaacaacacaggacatttgtctcccagtttctgagtttgctcagttctatgactgagggtgggtttttaaatccatctcccctgggagtctgatggttttgccattacatgcagctgcttctggttcctatggaaatcacctttggatcagaaggtgtactgttacctgaagctgcatcttaaatcattaaaataaattttggtcaatactttaatagaagaaagttatttattgcattgatttagtagaaaattcctcatataggactttagtcacctgaacaccatacctcactaaattcaaaaccactgcaagtaatgagtgagagactgctgtggtgaaggaacgaaggcacatttctctccctgcactccaaatatcctataccctttctagcttttgagttgacattgatacatctttcctttctttttacaggcaaaagataatttctaagaatgaagaaatttgtgaaggatgttctgggagattggcctctattactgtttctaaggatgattctgacactgtgcaagatggtagcaagaaaggacaagaatcataaacaaaaagttgctctgcattgttgaagatggttggcacaccatttctgtaggcccaggaaactcctgggagggttttcttgagaaaatgcatataatgagtttagttcttgggttgctctgactcgctgaatgtctgaaaatgtttgaattctcatctgaatttcacagcttatcacggactcttcactgaaaaatgatgctctccatactgggagctgagctttctctgagttttgtactatttttcttctaccttgacgtatttcgttagaaagaaactgatttgaaggccttcttcatattgaacttttactatatttgggaggtgtacctttgtcccctggggcatttaggtagcaaaaaaagatgatgtgttgattttactctaaaatatttttctctcacacccatgccccctacttccctacctctcaatcatgttccctaacctatgacttaggaagggtttctgatgattcttaccacctcctctggaccatcaccagaattcagacacccacagtgcaggcaacataaataagtgaagtgggctagacataaggaaaacaattgcccaagcacagtgataagtggcaaccaacagcagcctcagtagaggggcttgggcagggctggggcacagcggatggggaagagtgacccacagagcactgtcccatctgaagaaggtgcttctcagacctttgccatgcaaaagcatgaggtcaatattgtcagatagtatgattttttaaaagaagttattctggtttttatgtgatatctcctaatttttaaacattgacaacaaattttaaaaatacaactgtgtgtgccgatcatgggagactcaagtagaacatgtctgtagtccagatgttttcctcctgtgagatgtcattggcagaaaccaaaaccaaacacaaaaaatctccaaggagcaataagatcaaattatattttattctattaaaaaatgtttttgaaaaaagatacttaaattttaaagataacttaattcctaatgatttaaaataatccaagcagagatgaaagagcaaatgcaaatgcataaaaagaccccagagcattgttagcaaaaagcaaatatagttagccaagcatatatatatcataaaagcaataagaaggcataaagcaagtttggggagagcttatttaaaacttgtaaaaatcatttgaatttttaaaagttttcaaacaaattttgttttattaaaaaaaaaattttttttgagacggggtcttgttctgtcacccaagcttgagtgcagcggtgtgaacatggctcactgcagccttgacctcttgggttcaagcaatcctcccacctcaacctcccaaagtgctgggattatagacatgagccaccatacgtggctactttctaatttttttaatgtggtagtgtggaatttagctttgaaagagaattaaagttaatagaatattaacagtgggcttatagttgatagataacaatctgaatcataagccctctatattcatagctggattttgtacgtgtctggtatttattgccaccagctaaaaacattcccaaagccttaagcataagagaaaggagacagtgttattgttgttaatatcctatttaactttagctcttataaaaaagtgcaaaacaattaataaagtagaaaatctagaaaattagtaaataaacatagtgttatatctaaatagtaccatcggccaggcgcggtggctcacgcctgtaatcccagcactttgggaggccgaggtgggtggatcacgaggtcaggagatcaagaccaccctggctaacacagtgaaaccctgtctctactaaaaatatttttaaaaaattagccaggtgtggtggcgggcccctgtagtcccagctactcgggaggctgaggcaggagaatggcctgaacccgggaggcggagcttgcggtgagccgagatcacgccactgcactccagcctgggcgacagagcgagattctgtctcaaaaaaacaaaacaaaacaaaacaaacaaaatagcaccatcaatcagaagggaagacaagtttttttcttagtgtgaaagtaggctgaggcatctgtttccccatgtttttcttgtcatccttgttgcttacttcatagttcacttcagtcaggatggtgagaatatcatcgcctctgaaatacatcacataacattgtgactgtctgtgggggaaagcaactgatgaactgtctcctctgctgtgctcagagatagttctgtagttctttctctcaaaatatcagtcatttgaaacaataaggtgcgaaaccaagacctaccccagctttcctggtaaatgggttgtctcagagcttaataacttacttttggtttattcaggaactcttttgaccatcagaaacctcggtgtcagtattagagttggtttctttctctcctgacctgtgtgtctctcactcttctccacgttacttggctccccattgcttcaatgccccccaatactctctgcctcgaattgacatcgcatctgcggattcatctttgatgcaattaaacttaaggcaagtgaaagtataacgtctcctgcagctactcccaccttcttctcaccaggatctcttagcatttttgttaggcaacctcttcttctaccttggtagctagccgcggaaaccttgcaggattcatgatctaagttacgaaatctaagttagattcatgatctaagttacgggaaattctcactcttcatatactcaaaacatgaaatacagggctagaaggaacctgctatttatctcccataatgcaccaagaggttttgaggatggtttgctattatagaacttttgacagagttggaggatgtttaaacattgaattgggttactgccttcttggaagatttccaaaactagttgaattggctcagtcatgttttggcctaaagacagagagctggagtatatgactttcctatcctttcctgctctgtgataccctgattgtcctttgaggtgctgaataaaggaataaagcatctcagcttttccatctataaactaaggatgttaacacttgccactctcccactttgtaactgacctgggaaatgcagctatgtgatctacagctagacatttagagttgaacggaaaccactccccttggacagttctctgacctgttaatgtgatctaaatcacatagcactttctaataggctctgaatatgagtagatagtagtgtgatggagtagggggggaaggtagtgtaacagtgaggagggctgagtaggcaaaacttaccgaggacatcgctctctcaggctctggcaaagtgactggatgtaccaggttccctctgcagggtttcggtaggaaacacagttattcacagtggccatccccagcagaaagtcagcctcatccgggatatatctcgtttgaggtgatgataaatccatttctaaatagggttgctcctctgaatcagtctcaacaggtatacctttctggtagttatccccctgacaagcctgaataaaaaacactttgggttttccagcaagggaagggcacttcaaaccagtgaactgagatgtcagctcatagatgggggcctcctgtccatcagtgccatagatgatgcccttgtctccatgggagaggatacagcagatgaagcagtccatgttactgtggtccatgagttggtagattttcaaaatctcatagatttgctctactgtgcagtcatcgtggggcttgatctcaaaatgaagctcttcaaaggtcgtggtcaaagcccctgaaaagtgaaatttgaacagtcacgttataccacagtaattcacagaccacagctggagagcacagtgggcataacattgatagataagaatttgaaccagaaattcaagagcaaaaccctctatattcgtagctggattctgcaggcttctaatatttattgccaccagctaaaaacattctcaaaccctgaagcaaatgagaaaggagagagtgttattgttggtctgttttctctagtaaactagtttacaagatgggtaagctatcatttaggcttactactgaaccaattttaaaaatgattatattatttacataatcagaaaaaaacaaaacaatttttgaataaaagatccaacttattttatcctaaaccttctcaaaattatttatgtatagcaaaataaaagatatgaattaataagatagaactagaagaccttatacaaaaggttatcccctctctatccctccccattacctagtcacattccatgaaggcaaccactttcagtttttaaccacttttttccacattgagctccattttgtaatgaatttgggtacactgctaattactcatttataaattttagactttcgcattgagttcttattatggagaataagcatttgggctcttactcaattatttacaagttttggttgaatccatagtaatatttttatttttttaattttttttagaaaaggtctcactctgtcacccaggctacagtgcagtgtcacaatctcagctcactgcaacttctgccccccaagttcaagcaattctcctgcctcagcctcccaagcaggtgggactacaggcacgcaccaccacacccagctaatttttgtatttttagtagagacagggtttcgccatgttagccaggttggtcacaaactcccagcctcaagtgacccacccaccttggcctcccaaagtgctgggattgtaggcatgagccaccacctccggcccatagtaatatttctattattaagactatgtaaacataatgttctttcattatgtttcctttcttattaacctttttgcctttcctggaacttgtaattgtattattttttcatctgctttgtttcctatatgcttaacactattttttctccaagtgctcaatggatctggccaaaatctttcaacattttcaggctacttgtctgactcatttttatttcttcctggaaaactttccatccagagcactgcatccttctgctgtaataccaactggctgttccataggccagatgaatttctcttctcctgggacatctctctgtctcttccatagtaggttccctgtttcctccatctatgacttcctctttcttatcagtttcctttgctggagcataaccatgagaagtacattttttgagcccctgtatgagtctttagtttatagagttctatttccaaagcatttttcctcagaattctgaaggcctttcttcacagtcttttagctttcagtgttgctagagagaagactttccatttctgatactttacatatttggcttacttttttctctttccagaagcttctagggtatgatatgtttggaagtgaatcttaatccattataccctttcaatctggagattgcgtcatttcgttcttggaaagttccatttcccctttctctgtcctttctttctggaactcttattgtcaaaaattggacatccttgatttagcttcaaattttcttatctttcactcctattttctatttttgtctttttatcctacttccttagactttatcttctactttattgaatttttcattttggtgctcaaatttttaattttcaaggagacttgcttgttctgtccctttttcataacatcttgttctttcatggacctttaactaactctctaagaatactaaataccaatattaagcattaaaaaaggttgcttttttctcaacattatctttttttcattcatattctgtttcatgtttttcttgttgtttgcattgcctctcatttatctagtaatttatttatttatttgagatggagtcttgctctgtcacccaggctggagtgcagtggtacgatctcagctcactgcaacttccacctcccaggttcaagtgattcttctgcctcagcctctgtagtagctggggttacaggcacctgccaccatgcctggctaatttttgtatttttagtagagatggggtttcaccatgttggtcaggctgggcttgaactcctgacctcaggcgattcgcctgcctcggcctcccaaagtgctggattttcacgccaccgtaccaagctacctctctttcgtattagagcctttcttcaaatgcctgctgacctttggttgtccattcataaattgactaattagtccattaaaaagtcgactgaaagctctgtgtttgtggatgtggcttgttctctgagggatttcatagcaagatgattggttggggacctgatcatttcattaggaaacctccagatgtcattatctgtatgtattttagctagagctttcagcttctccagaggtaagtctgtatctgctgccagtgtcttggaaccaagttggtttagagatctgactccatgccaccagcaggttttcttcagtctctctgtgttcagtaaaatgcttcattgcttcctttgctgggcctggcacaccgaagtgtagagcctctctggttcaattttatgagaaaacaaacttcctgttccttatgatggtagaataagaatagttgctggctctatgagagggaggtatgaatcagaggattgtataggcttatataggctttcaaagaatcttcctgttttctgctcattgcctcacctacactttgtacttccaattgctgaatttttccaggattctgtgggggtaaataggcttgcctcctttccgtgttcccctctgtaatcagtgaggttgtagctttctctgttaagtcaattacctcgactcttttttttcaactcccccaaattgttggaaacctttcattagctattgtctcctttcctgttctcttgatccttgttggattattccttttttattccttctccagcattttgtccctgtcagcacatcagagctaaacataagtcatcagtcaaaaggcagtctcagccaggtgcagtggctcacacctgtaatcccagcactttggtaggccgaggcgagtggatcacctgaggtcaggagttcaagaacagcctgaccaacatggtgaaaccccatctctactaaatacaattaactgggtatggtggcacatgcctgtaatcccagctacttgggaggctgaggcaggagaatcacttgaacctgggaggcagaggttgcggtgagccaagatcatgttattgcactgcagcctgggcaacagagtgagactctgcctcaaaaaaaaaaaaaagaaaaaatacagtctagcattaggaatagaaaaaaataactgaaatgcaataggcccttgttgatttggaagcactttggcaagactaatacagtgtgttggttctgtgaaaaaaattctgatcctttggaaatgtggaatgttgattaaaaaaatgactgtaaagcaagtctgaaggcactgaagcaggacagaagggagtctctcaggagaaatgacttctgcagctgggtctcctacttttactcattcagcataaaacataagaacaggaacagaaaaagcaggacacacagactcgaatgcctaccagagactagtcaatcatgggccagttataagaaaatgagctgccagaaatagaagcaaatgttattttaatagaaatgttttaattttaaaagaatacaaatcaagggtccaaaatatttttttcaataccaagcgcatagtgacgaatgatgtaatcaatggacttaatctctgtgcctttttaaaggcttagatttgcttaaataaacaaatcaaatgttagcagggaccaggtacaggtggctgacacctgtaattccagcactttgggaggccgaggcaggcggatcacttgaggtcaggagttcaagaccagcctggccaatatggcaaaaccccatctctactaaaaatacaaaaattagccatgtgtggtggtgtgtgcctgtagtcccagctacttgggaggctgaggcaggagaatcacttgaaccagggaggtggaggctgcagtgagctgagatcacaccactgcactccagcctgggcaacagagtgagactttgtctcaaaaaaaaaaaaaaaatgttaataggggccattacagactcctgatgattataatcagtctacattaattttctaaacttacctccatttgcaaaacaaatcaataattgatgttatgcctgataaacactatttccaaaagttctttgatcaaatcaaaattattaatctctcaatggtgatggatgatttttattttttgttgttgtagtcactttttatattcacatactacaaattgttttttcatttaacttgtaagttcttgatcttagcttaatttggctgagcaaaagaattgctaaccagtttaatatttaatacttgaaaatgctatttctgttaagaacccacaatttctgctgcacttaacagcccaacctgtaaaaatgcagcctctataagaactttgataccacagcaatttcatcgcctaatacattccacagaagcgctatgcatttagctgaattcaaaacaaagcttattactgcttttcattatgtcttttagtaagatttgatattttatatttatacatacattacttttatttaaaaaattaatttttaaaaaaagcaggaaactgataaatgtataagaatgttctttacctccacagggaaatatgtttaaatccattttcttgaaacatggcccttttggtatagcttttgttctctcccttttgatttaaaaaaaaataggcataagaaatattttacttttctcttttgggttctactgtacctgcatccaagtgtgttccattcctgtccctaatgctgtgaagtttgggcactttctcccgtgcttttgcaaaattgtgattgttgatgatcagacagtatccccgaggtttgcttttcatttggtaaactttgtccaaagtctggaaaacaaaaacccaacccaggagctgactctgtgggtcaaacactagagatgtaaacaaacaactccctagtaagaggacttgctttccattgcaccaccccaactcggggtcgtttcctcgaagaactagtttctacctatttccttcacacaggacctctcagacttctgccccatcgttgtaaagtcagtgtcccaatacctgggcctcctgagcactttgcacatatattaatattgttgtcatcacattgtattattgtttgttctcatttctgcttcccatactatacagaagactccttgaggttcataacatctgtgccagggactacggtgtattaacttgtgagagctcaatcaagagtcactgaatgaatgaatgtctttggctgcccccacgccatgacttgtgattctcttggctgtctactgaactcatctgtgcttcgtggctaacagctgagggtctcccattcatgcattgcacagtgtggtcccaggattttaaaggtgatggcttaacccagctctcaggaccacggtggctgctgggaagagatgggctggtcagggaggtcctggctacactgtaggttatggtatccaaactgtagtacctgatagtactggccagggatggcgctgtgtcctattcattctcctagggctgtttcagtaccgagaaactcagcatttagttggaggtctgcgtagccccttgaggtggagaaaaggactccaggctaggaagcccaattcctgcctctacttcaccttatgactttgggcaaataacctgttatcttaatatgttaactctaagatattaaatatttgattaagtttgtaccaagtatgttaagtttttattatttacagttgtgttctaagtatttattaagcatattaagtgtatttactgagatactaagacactaagatttggccaggcacggtggctagtacctataatcccagactttgggaggccaaggcaggaggattgcttgaggccaggagttcgagacctggcttggcaacgtagcaagacccctgtctcaataaaacattaaaaaaggaaaaagatactaagatttactaagatattaagacagtgtttttagctcttcagtggggacaatgcttgtagcatgctatactgtttagaaagtaccacattacttgggttaatccttgactttcagatgaaagaggtctggtaattttctcaggagcccacactagtgaataatctctctcaagcctacttcagatattcaggatttcctcttcttcctaccatgaggaggagcagatcgtctaataagtcaggatgtatttggtggattgttgattacataaagagaagttattatgcctaaaaattacatgtttctgctggttcactgagacaaaaacacagagatggctagattgtgagagtttgctgcttacacctcatcaccaaggagaagcatttttgaaacattaagctaaaggaaaaggcttggctttttccattcctgctagactctttctccaaaccactcccccatccaggctggcacggctgctagaagatttggtaggaggcttattaccccctccaccctccaactattccagtatcttcatctcgggtcttaaaataaaattcaaatgtatagaaaactgaaggagtcacattttaaaaattaagtcacatttttaactttttttgtgtgaattttttctacagttctcaaaattttcagtaagtttctgccccttgtcagtttatctggcagcaaaaaaaaaaaaaagctaacaaattaaataactagaatctgtaatgtaaaaaaaaggatttggaggtttccgtctacctgtgattcactatcctgttctcttggagagtccgagattgtcattaccccacacaactcctcccctgcaaacaacgaagagacacatctagaatgagacatggcaggaaaggtacactggtaatgaaatatgtagcacataggacaacataaggtcttttttaagatgaaaattcaagctgggaacaggggctcacgccggtaatcccagcactttgggaggccaagatgggcagatcacttgaggtcaggagttcaagaccagcctggccaacatggtgaaaccctgtctctactaaaagtacaaaaaaattagccgggcgtggtggtagccacctgtagtcccagctactcaggaggctgaggcaggagaatcacttgaacttgggaggtagtggttgcagtgagctgagatcgcactactgcactccagcctgggcaacagagtgagactctgtctcaaataaataaatgaaataaaatgaaaattcacagactgccatgaatataatctcctttcaagccagagagattctgcaagcagggcaattaacatgcttctggaaacacaagatcaagttgtctcctcgccaaagagaaaaacataccaagaaatgccataattttatattgctccacatggccaggttgaatttttgtggtatttgtgagatactcattaataaagccactagctcaggatgaattaatgatttagtactttactccttaaagtattcttaaggccttaggctcagcaggcagaggggaaagggaaggacagcctgcatagacattaatctttaaaatacatttgagtgatccaaaatgtattttacac

SEQ ID NO: 5 - DNA, 2994 bp, Homo sapiens
ctggaacttgggaccacggaagctaatcaagacccctcaactaccacgcaagaactccacagggagttccaagctaactcctcttgtaccagctccaaaaaatcacaattacctccaaccaacaaaacctgttgtttccccaaagaagtgatcaacgtgtcacctggctatcaacttgttcggaatcgggaacagatttctgtcaccttaggggatgagatgtttgataggaaaaagcggtgggaatcggagatcccggacaaaggcagattttccaggaccaacatcatttctgacctagaagagcaaatctcagagctgacagcaataattgaacaaatgaacagagaccaccagtctgcccagaaattgctctccagtgaaatggatctccgctgtgctgagatgaaacagaactttgaaaacaagaacagggagctcaaagaggcccatgaagcagaactcagtgagttggagaacaactacaaagcagccttgaaggcagagaagttggctgcccaagagaagctagaggagatgggaaaagaatacaagtatttgaagaatatgtttcgtacgtatcaggacagtatttatgatgaaatggaagagaagtggtcaaaacagaaggcgaaatggaagaaggatgagaagttcgagcgagaaaatatcctgctacagcaaaaaaaaaagatgaccaaaaaattcgaaatggagtcaggagaagaagataagaaaataaatgaatcctgcagtgctgtctttgagaacttcattcaagagaaggaggtcatgcaggaagaattgcatgcacaagcccttatcctagagtcactgaacacaaacctctactatacccagttggaactccagaaagaggtgagtccctactggagtggggatgggggttgggggaagaacccaggtctccatccagctctgccatatagctctgccctggatggctctgggttggggaagatggctattaaaatgtatgtctttcagaaagctatagtgggaaatctggagaaaatgcttcaaaccaagtttgctgaaactgaagaaaagtataagcacaccatacagatcctgacggaagagaacattcatctgaagcaaaagataatttctaagaatgaagaaatttgtgaaggatgttctgggagattggcctctattactgtttctaaggatgattctgacactgtgcaagatggtagcaagaaaggacaagaatcataaacaaaaagttgctctgcattgttgaagatggttggcacaccatttctgtaggcccaggaaactcctgggagggttttcttgagaaaatgcatataatgagtttagttcttgggttgctctgactcgctgaatgtctgaaaatgtttgaattctcatctgaatttcacagcttatcacggactcttcactgaaaaatgatgctctccatactgggagctgagctttctctgagttttgtactatttttcttctaccttgacgtatttcgttagaaagaaactgatttgaaggccttcttcatattgaacttttactatatttgggaggtgtacctttgtcccctggggcatttaggtagcaaaaaaagatgatgtgttgattttactctaaaatatttttctctcacacccatgccccctacttccctacctctcaatcatgttccctaacctatgacttaggaagggtttctgatgattcttaccacctcctctggaccatcaccagaattcagacacccacagtgcaggcaacataaataagtgaagtgggctagacataaggaaaacaattgcccaagcacagtgataagtggcaaccaacagcagcctcagtagaggggcttgggcagggctggggcacagcggatggggaagagtgacccacagagcactgtcccatctgaagaaggtgcttctcagacctttgccatgcaaaagcatgaggtcaatattgtcagatagtatgattttttaaaagaagttattctggtttttatgtgatatctcctaatttttaaacattgacaacaaattttaaaaatacaactgtgtgtgccgatcatgggagactcaagtagaacatgtctgtagtccagatgttttcctcctgtgagatgtcattggcagaaaccaaaaccaaacacaaaaaatctccaaggagcaataagatcaaattatattttattctattaaaaaatgtttttgaaaaaagatacttaaattttaaagataacttaattcctaatgatttaaaataatccaagcagagatgaaagagcaaatgcaaatgcataaaaagaccccagagcattgttagcaaaaagcaaatatagttagccaagcatatatatatcataaaagcaataagaaggcataaagcaagtttggggagagcttatttaaaacttgtaaaaatcatttgaatttttaaaagttttcaaacaaattttgttttattaaaaaaaaaattttttttgagacggggtcttgttctgtcacccaagcttgagtgcagcggtgtgaacatggctcactgcagccttgacctcttgggttcaagcaatcctcccacctcaacctcccaaagtgctgggattatagacatgagccaccatacgtggctactttctaatttttttaatgtggtagtgtggaatttagctttgaaagagaattaaagttaatagaatattaacagtgggcttatagttgatagataacaatctgaatcataagccctctatattcatagctggattttgtacgtgtctggtatttattgccaccagctaaaaacattcccaaagccttaagcataagagaaaggagacagtgttattgttgttaatatcctatttaactttagctcttataaaaaagtgcaaaacaattaataaagtagaaaatctagaaaattagtaaataaacatagtgttatatctaaatagtaccatcggccaggcgcggt

SEQ ID NO: 6 - protein, 412 aa, Homo sapiens
LELGTTEANQDPSTTTQELHREFQANSSCTSSKKSQLPPTNKTCCFPKEVINVSPGYQLVRNREQISVTLGDEMFDRKKRWESEIPDKGRFSRTNIISDLEEQISELTAIIEQMNRDHQSAQKLLSSEMDLRCAEMKQNFENKNRELKEAHEAELSELENNYKAALKAEKLAAQEKLEEMGKEYKYLKNMFRTYQDSIYDEMEEKWSKQKAKWKKDEKFERENILLQQKKKMTKKFEMESGEEDKKINESCSAVFENFIQEKEVMQEELHAQALISLNTNLYYTQLELQKEVSPYWSGDGGWGKNPGLHPALPYSSALDGSGLGKMAIKMYVFQKAIVGNLEKMLQTKFAETEEKYKHTIQILTEENIHLKQKIISKNEEICEGCSGRLASITVSKDDSDTVQDGSKKGQES

SEQ ID NO: 7 - DNA, 31337 bp, Mus musculus
ttcctttcctggctgtgacccttctgaggacacaattgttgtaacacaaataaggacaggtgggactttcctccaactgtgggtctaatcccagccatcagttctgttgtcttgtacattgcctggaactgctcagtcaagcttcgattgtgacacagggtaatagtaactgtggcaatcattgtggggtccagtctgtcttctcctactagatgacaacctccacatgctcaaaaaacttctcatgcccattagcatctctatcccatttttataggatatgttcaaattgcttgtacaggacaaacattcaaaaacttcatgataaaaactataacccaggggctggagagagggctcagtggttaagcgcactcactactgtttcagaggttctgagttcaattcccagcaaccacatgttggctcacaaccacttgtaatggggatctgataccctcttttggtgtgtctgaaaacagtgacaatgtactcacatacattaaataaataaataaatctttaaaacaaacaaacaacaaaaccaaaaaactataccctaggaaaggtaagagtctaccatggctgaggttcagggatagagtcagggggaaaagtgagggtttgggatctctgtagagcgaaagatggctttgggtcagacatactgaacttggttccctgctctgccattttctggttgtatgatttgatcatctcatcttatgatacatcacaacctcactggcttaaaccggtacatccttgccactttccagttctggtggttgactttaactctgagatgcagtcccttttagaggtggagagagtccatttcttcacctctccaacctctaagacctgaccttcaaaggctccatttgaccttcaaagccaacgttctgactttatttcctctacctctcctttgaggatctttggggttagaacagacccacctggagaaattcagaataacttgttttaaaaccatgtgtaacctttcatccccttccttgccttgggtaacctaacatgttcatcatagttagatgggagcatctgcaagggggccggcaggctgcctaccacaggactagagcaatgacgcaacctctggcaggctggatgtttataaaatggagttccttcagaaagtgtagattaggaatagacaataactgtattatttattactaagaatttacctcagaacttaatgggctaaaccaatgccatctcagcccgcacgtgggggaatccaactagagtgcagctcaggtgtgtggttctagttgatgtctttcccaaagttgcagacaagatatatatgaagccatctaagtttgactaaggctggacacttccaagatggtgcctttaacaggtgctggtagagaaggcttcactcttgcccctccgtgggactgcaagagtgtcctcaccatatgagcaggtgacatccctcgagattactgatcccagcaaacaaaacataaaccacaatgtcttttgtctatatttttgttatttaaaataattcagaaataataaaaattaactgtaacattacccaaaagattcagactactatcaagatgatctttttcggggccagagagatggttcagcagttctgggtggtagctgctcttgcagaggacccaggttcaatttccaactcacactctgtagctcgcaaccacctataaccctagttccaggagatccagtgccctcttctagattccacaggtgctgcacatacacataaatataaatgcttttagttaaagacaattctttctcaagttaaatgtcatatggggtgccaatatgtccaccagataccagacacggtgtctcaaatataatcaaggcctctcactcctctgcttatgaattgtcttaattcaactttttaatcaaagcaggacttcattgactttctctaacctagaaatcattacttttataaaacttaatgcagtaaaagagctccccccacacaacaaagtgtgtttttaaaaaatgaccctttactgtgacctcagaaatgtgaggcccaagaggctttgccacccaaagacccctcctcctgccagtgcccttgactttcatcagtattgacctccagaaaactgtgtaacattgagtcaaccccatttctgtctcaaggagccatggtactgttgcttagaagaaggcattttcagctagtcctgcctgcaccaaaccccagacctaccgctcaccgagtgaatggagactgtttaacctccctgagccttctgttcctgctgctgtaacttgaaaaagtgatgatctctgcagccatgccctgcaaacatggaaaaccttctaacacccagcacacaggaagaccccacattactagggcaacatttagagtcagaagagcttgtcaaatgtctttggatttttgctcacttctcccaggaggtgagaaaacccaccaaggatggaattggtgtctaaccagccaggaggaggctatttcccagcctgggttgcccaggcaaaatgaatggaaataattcatccactttccaagatgtgagccaaaaagactgctttcctctcccttctttctcatcttcctgctagtcaggagctagggagccctggaccagcagcccctggaggcaggaaagaagactccatgttgaagacagcaaagagccccaattaccaacagaggaaacaaagcgctatcttttctaagccaagccatgtatctttgaatctctctgctacatcaacttaaatgcaacaaggagtttaaagggtccagccattcagcccaatattcattatttaacaccagctgaccgtagcaatctccggcccacagagacaagaacgacatgggcaccaaggagggttcacacagcagcttctttacttgcggcttttttctcttacaactctctccccagcagcttcttctttactgtccttcttgcagcaactgacctcacctcgccccacaccacctcatccaatcagaatcacacacactccaggcacaagctcaggtggtcacagataggctgacagatccggatcacaaggaatacacatgcagttttactgcatgtttgggcaaggcagtaaacatgtggggttcacggggcctggcaatgggccagggtgctgtcttggcctatgtggccgcacccgcttcccacatctccccctttttgttttattagtagctctgggatcaacatctgtcttaggttgcccccttctgtgccacatccttacccgtcatgggagtgacaaactcactttcaccatcctgttttaggctggtatgcgcatgtgagggtttacccgtcattgattactaatccagcatgttgagccaacattggggggatgttcctgcttccaaggctgccatagcctgcactaaggctcgtttatcagccctatgccaccttcgcatatgtgccatccaccaaagcattcctccacacacaacagtcagcaggagcgcccaaaaggccatcccttcccaattttttaagaatcccacagttccctggatgatctccagccattgctttgcagttgcaatctccacacgggtgttgttcacagcagcaatcgatgctcacaattccttcatctttgtgtcgagatcatgactccaatttcctagcagcattgcaccaattgcacgcaaaagatttgcagctctggaaaaaattctgatactgaacagaggttacacacattcctgacatatgagtaatgcaggaagcaaatactaactgctccaacaacagcttgtgcagtttgatagggaaatacatgagcttggggttgattttcttcaacataaactattcccatgctgcctttggatccatcagtaaatacattaacagcacctgggattggctcagtctgggtaattctggggtatatcataggatttctcatgacaaactgaagccaattagtggaggcaagtacctcaatctgttttacatcaggttgtttaccaaaagctcctcgccccacctttatactcttaagaattagctgggctatgtgggactcaacctgagttacagtaaaggcagcctggaccccataagtcaaaactgactccttcaatctttgtacaaccttccaatccaggggttcatgatacttttgcccctgttgatcctgaaatactgggaaggcccccgcaatggcgggcacatttttccagacttttgcatgaagactacactttccccttttgtcttcctcatctttataggggggaggagaagacaatggaggggctgatggttcgggtggcctgctgcgcctcaaactccagcgggacatccgactacagacgttcatgctatcagtcctgtcgctgtcactagtagaccctaccgagctagattccttcttctctttcttatctttggtttgttgtctaagctgtttaggttttcagcagctagcctgagaagcaatctccttagcctcctcaagcgccgctgctccttcctctatttcagcattgtgctttccactggcgtccctcaagcacgccctgaccaagttccagatggctaacatttttactttcattttagtcgcagagttgaacccatgttactgaaattccctttgtctctattcctgagaaccttagggctccatccccttttttccggggaacctatcaggcctatgctttcctttttttttttttttttttaagagaaaaatcaaactttattaaaacaattttctgggaggtagaaagaatacaagtcagatgggggtagtgtgaaatgcagtcttttgttcactatatggctattatatccatgactttgtagtatttgtgattacctacattggattaagacagccaaaattctagcattaatggggtagatgatcttgaaccttcaccccttactgaggagttattgacagttgacagcttctgaggaagtagctatgctcatgtacacatgagcagcagtaactggatttaatgggctggagaaaatggaataatatgctcataactcattgtatatacgattgaaattattaagaataaagaaaaataacacacaaaaatttcttttatcaggtagacaacacagcccagaactcaaaactcttgatctttagttttacacttcccaagtactggaattataggtatatgccatcgcacacaggaaaacagaaaactgctgtgtttttcatactcaatcttccgattccatgtgcattgttgcatgtgggccgtctgaagagcctattcttagtgtatcatttttattcaagggttttctctccatactgttatctttttttttttttttttttaagacagggtttctctgtatagtcctggctgtcctggaactcactttgtggaccaggctggcctcgaactcagaaatccgcctgcctctgcctcccaagtgctgggattaaaggcgtgcgccaccacgcccggcttccatactgttatcttgcatttgcaaatggatcgaaaacacttcttcatgctatggattacacattttcatgaattttagacggtcaagtgataatgaagtgtttccacattttatatttaggatttctctccagtgtaagtttttccatgtttgttaaagaagcggaataaatgaacatttttctgtattatatccagaagtttttctccagtgtgaatccttccatggtattaaaaagaactaaggtcaatgaaagcatcccataatggatacaaaccttgggtttctttccagtgtcagctatgtcatgtatttgaaaagaatcagagcaactaagtttccccatatttattacactaacagagtctgttttctctatgagtcttttcatgtttctgaacgctactgtaacaaccaaaggttttcccacaacacttacaaatatagggtttctcttctgaatgaactacatcatgccttcgaagggaactggacaaagtgaaggctttcccacactgcttacatacgtaaggtttctctccagtgtgacttctttgatgtatgtgaaggtaactggattgagcaaaggctttcccacactgcttacatacatagggtttttctcctgtatgacttcttttatgtatttgcaggtggctagaacgagcaaaggctttcccacattgcttacagatgtagggtttctctcctgtgtgagttcttttatgtattcgaaggtagctagattgagtgaatgctttcccacaatgcttacacacatagggtttctctcctgtgtgacttctttcatgtgctcgaagggtactgtaggaagtataggctttcccacaatgcttacacacatagggtttctctcctgtgtgacttctttcatgtgctcgaagggtattgtaggtagtataggctttcccacaatgcttacacacatagggtttctctcctgtgtgacttctttcatgtgctcgaagggtactgtaggaagtataggctttcccacaatgcttacacacatagggtttctctcctgtgtgacttctttcatgtgctcgaagggtactgtaggaagtataggctttcccacagtgcttacacacatagggtttttctccagtgtgatttctctcatgggcttgaacattactctgtctcttaaaagatttcccacattgtttacacgcatggtttctttctctattatggatccttttatgattttgaagagaactgagatacttaaaggctttgtcacactgtttacaggcatagggtttctcttgtgtgtaaatttgttcatgcttcagaaagctctggggagaaccaaaagccactccactgtctttacatttacatggcttctctccgtgttctttatactcatgtgttttgcatctagtctgacctctgagggacacatttagagatgaatgaccagtgatatcttctccatacacatggctttcacagggcttttctccagttttctggctcaccacaggatctggaatctcattgaagatttcttcccattgactatcttcttcatactcacaaagcttctctaccacttggtatctatatcatgcaggttcctgatggtttctctcatcaccgctctgtaaagattttcctgtgaaggattcagcaaagtccactcctccagggtgaagttcacagccacatcctcaaaagtcactgactccatgtctgtgcccaggcctgccgcggctccacagaggctccggaacaggcactcacacggccgcggaggctcagcaacttggacttcctcagctgagagctgtgaggagggaagcgccagcaagaaagatgacgggtgagcaggcctatgctttctttagttgctgaaattcccttcgtctctattcctgagatccttaatgcttcatcccttttttcctggggaacctgtctctacttacctttgcttaccaaaatttccttaccactgcttactaaaatttccttaccgctgcttactaaaattttcaaaggcctgtactttctttacttacccttgccaaccaatgcaatgagttccccatacgggccaccactcaccacagtctccaacccacagagacaagaacaacacggacaccaaggcgggttcgcagcagcttctttacttgcagcttttttctcttacagctctctccccagcagcttcttctttactgtccttcttgcagcaagggctatactctatcctcaaggcaactgacctcatctcgccccacaccacctcaaccaatcagaatcacacacgcaccatgcatgagctcaggcggtcacagataggctgacagatccggatcatgaggaatatgtatgcagttttactgcatgtttgggcaaggcagtaaacatgtggggttcacggggcctggcagtgggccagggcgccgtcttggcccatgtggccgcacccgcttcccgcagctgacacttgcctttcatgttgcttcttgcaagcctccctctcccctaaaaaggataggtagggcctgagaaccctatgggccagtagactgttttctgatgacccatccacctcacaaaggtctcagagagtctgggaggcctgccacctctctgcctctcttgtcacactgtgcttcagtgtgccatgggctgacgaagaagagagtgcccatgactggccttttacaggtcctgtacaagttcctctgacagctccaattggagttgacctgatgagcagctgtggaggtgacagagttcacatctggagcgcctgagacctctgttcctttctcctccccaatttaggacattttcatacaagttggactagaaagcaaaagtaaagacctaagcaaggctttctgctttctgcccatggtaagccctgtctcccttctgcctcaggactgggtggaggtagctgagtttctggacaaaggctgaaaaccaggactgaacagacataatcactgtccaatctggttctgccaagacaggccattctggctttgccggaacttcccttggctttgaacattttagtgggagttcagctcagtgttttctggcttacagcttgccttcatgtttgttatttttatattaaaaaaaaaaaaacagacattttcaaggctcttgtttgtttgtttctgtttgttttgttttttgagtcaggggttctctttgtagccttggctgtcctggaactcattctgtagaccaggctgtcttcaaactgacaaagatctgtctgcctctgccttctgagtgttgagattaaaggtgtgcaccaccaccatccaggctacaaaactcattttaaaaagcaaattagcaaaatgagcaaattatccaactctcagaatcccaggtgtccagatcacatctggtctactgtttttaaaatgccttttttttttcttctaggctttaatataagaggtccatgtatagtctgaaagatgtgccttttaagagggggtgggggggggcggagctgggcagtggtggcacacacctttaatcccagcacttgggagtcagaggcaggaggatttctgagttcgaggccagcctgagttcctggacagccagggctacacagggaaagcctgtctcggaaaaacaatcaatcaatcaatcaatcaatcaacaaacaaacaaataaataaataattttaaaagtcggggaggggaaggagggagaggagagtgagagggaagaaccatatattattccagcattcaacatcaatttcctgtgttggaagattcctgagtaatagtaaagtggaggcccttggctgcttgaggcagaaggctgtaaggccgaggggtattgtgacatgctccagggaaaggcagtctttcctttggctaacaggggtcccaggccattgggacaagagaaccggacagacatggaacagaggcctggggagcagccctcaagagccccaaagaaggaaaagatcaaggagcaaccggagaccccaagtcagtccgtctcaggccgcggtcgggtgctgttaataagagagttcttcaagcaggatgaaagctacacgaccctgcccaacacccaagcaacagactgccaaagtagttgccgcagtgccagacggcgactcaagcgcaccagcgacagcttggcggacaaccccgaagccccggccgccaagcggcgagcaaagatgccgcagctctcgcgtctcaagaaggaggacttgcttggttgcgagaagccttgggctccacaagggaaccccggctctgaagccgctgagatcgccgagctaagctcagagcccggcaagcagctgctcctggtgctgtgccacgcatcggcgctggacacgcagctgccgcgacttcagctgctcctgcagcaggtacgggtccaggagcgtcgcccgccagccgcgctcgtcgggatcctggtgcagccgcggccggatgaggaggacgagtcgcgccgccgtctgggggacctgctatacagcgtcttctcttcagaaaacccgggggtcgaggtgcacacagcagtgttctgtcccagccgcccccagggtgtcctggacgtccagcgcgctgataaccaagcgcacatggtccacctagtggatcgccagacccaaacggatggtgaggggcccgagggtggagactgggactgttgttccccctgagaagtgagcaaatccctgacctcagagcccctgtgttggtgccttccagacgtttggggtacgatctgaatggtaatgaaccagcgtcctttccccaagatgtgtgggctgggacagtctgaaactgttccgagttaacccagagggttacctctcccgactatctgcgccccccgcccccaaacacacacacacacacacacacacacacacacacacacacacacacacacacagtgtaggagagaaatcatgcttttataacgtcctgagggatgttgtaggacctgtaatagcccatcctcctcctctccaaatgcactaacgccattcccaagttccttaggggactctctagtctgttacttctccaggggatagaatgacaataaaagcagcctattgtgagccagtcactgtgcgaggggctcttcacctccagtcttcacagcacctctctaaggttgggacttcaaaagagtcaactagcttttaccactgtgttttttactcaaagcccctagtaaacttgtgaccccggagggttaatttgtagcctagagtcactgagcagtatgttcttaacatggactttgggcactttctgtttccagaagccccttcctgggacagcataggacccagaaaagtgttctgagcacaggcacctcgatgttccattacagaggctctgctgtcctttcagctagttgccacagcaagctatctctctctagttagacccattcccctaccacatgacatgcaaggatgaaggactgcttgatgccagaccagactcagcacgtagaggctaactttgggatggatggtgacacactcactctagtgtgcagaacaccctgaaaggccagaacctaagggactgttgttgatggggcatggtattatcacactcaaagtcttatccttgctacctaacctccaaccttttaaactcactaccacatgacaaggcttctggtttaaaaagtccccactgatgagcccattccaattgagactctcctcggggactacaaaaatcctagcctgtctttggcaacaacctcttagtaagaaaatttctgcctagagtcttctgaagggccccatccttcccctttcactctctatcgattctgaaacttgttggctctccttgcccaaatctagggcaaggggaatgaaagctaagacaaagctagacataagcctaagctaagtgcactgtgactgtgatgtagaagagccagttcttggcaggaaactcttatgaggatttctccctgcttctgaaccatttctccttaatggtacaaacattcctcaacctgtattctgtcctctatctcccagaacacaagcttgtgtgtcccataccctgtggcatccctttaaggagaaatgaactggctatttcatggctatttaaattctacccaaatatgttcctgtcccatcagattcgtttaaaccggttgttttcaaccaggaaaaatgttaacaccttctccaagctctgggcatatttagccacatctggagatgttcttttccttacactgatggggtgctggccagtcaaagccagagaggctgcagagcttcctataacacacagaacagcctcctccaaaagatattatctagcccatagtgtcaatcaggactgagactgagaaactgatttcaatcaggttatgctcatcagtcaaagtctagcagtcactgaaaaggttccagcctgattctgaatgtcatcccttcaaatggcccatagatctttgacctcagaaactgccagcttcttgtagattcacctacccactgaaccgccttgctccaaaccaaccagacacagcctgagccatactgatctaagctgcactcccaacccatatctttctctaatcttctcatgcaagaaacttaatttttttccaattctttaatttcaaagtctgtataatctgattccccattgcctactggggtcataaagaaaaataaccctttagaacttaatcttgagtgtgtcaccaatcaactagaaatggggatttagtttgggaggtacttatataactgaatttctctgaacatcaatatcctttttgggataataataatagtgatgacaataatgtaataataataataatagtcagcaaagtctttgctggctctagaagcctgaaaatagattctctcacttcactgttgacatctggtctagcctttgtgtgtagcttgtctaggacctttctggctcactcgctctccctccaccctccttactgcatcctcaccccttccccagcttctggtgtctgagtagggcaggtgtactttacccacgcagcttacctacttcatggaggaagttctttctgggaacgcacttttctattgtgatgtgtgacaggctatcttttcaaaacacttttcactcttccaccctaaaatggaagttaaattgttaagagattcatagtttgtttgacctaaccagtgttttgggaggtaataccaatgaaatgaatttgagaaatttttcgttttctgagaactggcttaaggtagaattggccaaattcgaggattcttataaaagtttagacatacacacacactcatacaagcaagcactcgtgttcacatatattcagagatgacagaaggcagtgggttgtgggaggtaaaatgctaaaaaaggaagtcaaatcttcaggaaagttccctaaatgttaaccataatgtttgtgtttggggatagacacgtagaaaccagcaacggagctgagaatccttcctattcaggatgtcttcgaataaaaagtagctctcacggaccctggaacgtgcagccgaaaggtgcctgaggctctggtcacataatcatggatccagttctcttaggcccaaagactgtcttaattagaccatggaggaacaaggcagctgctgcctcctgccggttcaagcaggaagccctgggagaggaaaccggtgccagagccctagccacaggggccagcctggcttttgtgacctcacaggaggtatgggtgactcttgtctgtgggaccttgctgtggtcaaagatcagagacatacccacaggggagactgcctacctagggagggagccaggaaattcacagctccatgtagctccacggtgttactctagaaggatcaccatgaagaaggtcaaaaagaaaaagtctgattccaggcgccgcaggaattccatttcaccgcagactagctccgattcctcacagcagcccagctcagaaaccccgccgtcatgtccagagcccgcctcgccaccatctaagccacagccttgccaggagtccaccacaccacaccaagttaaccctgagcctaaaccgcaacagcatacaccacagcctctcccgcctccagagaaacctgcctcatctccgttcctggtacccatggaacctaaaccaattcttccaagcaggaaagcaggtgggcggacttcctgctttaaggcagttctagccttcttgctgatagagtcccagagctaccagaggtgggctccagtctggaggtggtggtgtatagtcagcatgctgcccggggctaagtttataagctgtggaggggatgattttttttcccccttaggtttttcaagacagggtttctctgtgtagccctagctgccctggaaatcactttgtagaccaggctggcctcgaactcagaaatccgcctgcctctgtcttccaagtcctgggattaaaggcatgtgccaccacgcccggccaagaggatgatttttatgagagagtagaatccctaggctatgtccttctgtagcatctcaggtctcgctgcaaacagccatggatacatactaacatttacggctccatggggggagaccctctcattaggagtcagttagtatccattcagaaattaaaagcaaatatagactaaaagaaaggaagcagtgatatgccttctggctaccttttattggttattcgagaggccagaccactccaaagaagatagtacagggtgatggaggtagatgactatggtacagcctttgagagaattgggggtttctgtttgtcagatggaagataggagttttgttttgtctttccatgttaccctaagagatctgaccttggactacagagaggatggctagatcaaaatataggactcctgactaactcctaacttcagataagccacaaataatgttataatccttagtatctgttccaaataggcatcctatatttctgcttgtcatcccttcccacagaagatactagaaaagggtctgcgcaatgtataaagcaaaccaaaaatgtaaaaacagtattttgtagccatcattttaatttagtttagctctgcctaatattaaatggctggccagctgtcaaaaagaagtctccatcttcttggatagccaatgagagacaaaactttggacagtatcaaggggactcaagtggagttggaaagctgggatgctccagaccactgaggataatgaagatagacaagtgaccattgaccgttccttccatgcctagtacttcattcatccatttccgtccatcttatctgacgatactgtagggaggaaatattcctttgtcctctggagcagcccttggtatggttgaaagggaaacttgagtctattctgattccagattccctacccttgaccacaactgaccttccaataccaagaggccagcaggtcctccagagagaaggaggaggaggaagaggggatctttctctgacctttccttgaaccatgaccaaagtactctatgtccttgagcaactcacactctgggccacagcaatcctaaaacagtctgagcagagaacgaacacaaaccatgagagaaccagagctctcaagccaaggaattgccaggacaatggtgactctgtgactggtgtctgtatgcaacatgagcttcaaccatgtagacatttctgggtgatagcctcagagctggtgtcagtagaaagcaaaaccttccagcaccacatctttaaacctttaaaacgatagggtattgaagaggcaaaggagggactgtccatggcctactgaatttgttaactttctcatcaccgtgacccagttatctgagaaattactgaaacgatgacttattcacgttggctcacggttttaagagtatccacgtatcacggcaaggtgtagctcacagtgaatctgctaggaagtggagagagggattatgtgaagggcccaaggcaagatataacccgcaaagatgtcccactgatgccctacaacacctgctagaatccgcctcttagcctttaccaactcccaataacatgacttctagaactgtcctagagactgtgtcccactcccaagaaccaggtgcagtcctcatctctctccttctctgtccagcagtgcctctgacctatgtggccccacgctcctgctcctgtgcagcctgcccgggcagctccgcttgctggcatcgtctggggctttgccatagccgaatctttgatgtcctcctacctcgggactggtcatccatgccagggagaggagtcccaaaccttctcaccttctacaggttcccgcatgaacgggagggctaaaaagccttgggtgtagagttcccagggccaggctcggtcctcagatctggttggcaactgtgtgtaacttcctccaaacatcataggcttttcaaaagcaaagcctttccttctaaataacaatgtctctggtttggtgggccagctctttgtctgttcctttttctatgaaaccgtcttctctgctgacagcaccctcccacccagcccattgtaaactccagagctgtgtgattacacattggttagccattcacttttttttttttttgacccataccatacacagggagtgtctatttattaaacggcatgttaattatctctggaactcaatgataaacctgatcgcgtaactcataggtcccttctgccaataatagcaaaatctgtcccacacagaacatgccatgcttttaccaggagtcctcacaggggccatgttttctagaccagtctattagcatcagctccttcctttatcatgacatcacccagtctcggtcctattgctcctcttccacaatgcctcaagagaaatgtcatatgtcatctacccactggcacccatgaaaagggttctgtccatgttaagaacagactgaaaatgtcctcactctttctgagtcatgtgttggggccaggagaggggcctctacccaaatgagccaccctgcttatactcaggacttcacaaaaccccttggggatctcatatcgctacatcaggagcacagcccaccatgccatcctcctctcttaccctttccagctccttctcttgaataataataataataataaaataataataataatacccacacagatacagagctatttggtgaacagagcatacctagagtcagagataccatctattgagtcccggccaggaagagtctgcccaccactcacccacacagtctgtctgtccattcatctgctgccagatggtgctgtgtgttcccctgggtgaaaaaatcaaatcctactctgggaagatgctaggtggtctgagagacacctaaacaagatcttcaccttccagtgtgttcagcctgtgaagctagctaagacctgtgcatttagaaacctgtgcacaaagcaagtagtgtgtggaacaggagggcttctgggagtttcagagtaagacaatagtaccatatcagggtccacagcattgtgtgcccagtgtgtgagccaactccaaaagtatccttggatccctctctggcttaggatggaaagaagggctattctaggctgtaggaaaagccaaaacacagttcagagttaggaatgcaagcgaaagaggcatagaaccccatagccagggcaagagtttatttttccacgtgagtccctgcttctgcagtctttaccgtctcagaggacttctactaggcatccatggagacaagaatccctcctttagttggctttttatcagactagataccacattttctgaatggcttcctgacttatactggttcactggttcctgacttatactggtttgctgtcccagtctttgtagagactgtaattaatatgttatttcctgatatctgaaaaatctctaaaatgcctcagagggttgctgtgaagcttaaagaggaggtgagtgggaggtgtctggaacaagacctggcacatcgtggtctggaccaacctcgtaccctgttgcccctctgggcatcagtcgcaggctaccgaccctcataccccaggggtctcgtaggaagttttgtggagagaggtgagagcaatgtgtccctttgggagaatgatcaggaggagactctaagttccactgtctcattgcagtacacagcctttctccccaacccccactccctttctgctttgctttgtagaaaaccgtcaaggaagtactgcgctccccgtaactctcgtgcttcaagctctcggaactgttgctgtggctctgggggccttgggagttgcctacttcatggctgaatccttgtgaattggaccccaggcccaccgtccggcaggtaggaggatcaccttgtcccttttctctagctagagaagactatctcaaggtggactaggcctttaggccttcagcctgtcagggaaggttcatgatcattcctacctcaggactctttcaagcctctctggagacctttgattagaaccatcaggacaaaggcccttcatacagccccgtcccctgacctatggcttccctagtcctagatgggaagaagtaggggaggggaagggtagagattatctcggataagccccactgctgaatccccaatttccactcacaccagtgttctcccgcctgtaccaagctcatgctatgcatgcttctttggaatgtgtgtgatctctgccactgctcatttatattacaccatctctgcatatgaagatgtcttcagtcaccactcctgtctcacctgaacccagaagcaaagacccaaacaaggactgggtgcaccagataactggaggaagtactctcaggacaaagcagggctgggtgggaggcaagagcaaaagcaaaaggaagaagggaaggcttcatccctgtggagtcctagaatgttatctgtacaacagatgctcttcctcaagagacacgaagcttccctttcatttccctgtgtcagttggtcaatatgtgactatgtgggtgtagggaggaaatttgagttctttgtgtaaaaagcaattctcctcgagttgagggcaagtccctgaaggaggagggagctgttggtcacctgcagccaaaagtcatcattcaaagagccaatggctcagtcaggaagggaactggaaagaggtggtcaccaagagcactcactcgtaggcatcccaacagctaggtcttcttcaaatggtcttgaatgcttaaaaggtgatggttgaggtagggagtgagagccaatggaaacatttcagtccgccccttccgtcctcccatcccatgcatgggaatggacgggggatggttgtagacaagcccgggtctgggaatcgatgcttgaaatgtataaacatccaaaccctgtgagagtacagcatcgcccctagagcgtctgatgactattcaaggatcatttgaggaataatattaaatattaaaccaccctgacctccaggagacagcacagcacttaagagccttgtcttcccttgccctggacttactgggagtggtgggatatttgttattatgttatcatgctatcatgtcagcatggtgtcagagaagatgctggctctggatttaaactgacaatctctagtctagacagtgccacttggaatctcagtgttaggggcatgattgtcaatgtcatgtctaatggagagtaagctctctcagaagatgacggtcatgaggatccaaagagagatattaagagttgaagtcccagagacggaatggaatgaggagtttattgtgtctactgaaccgatgatgcatataccaaatggtccaatggcaggctggcaggtgctgctgtacccctgtggtagcaggccttcctattataggagcctaatgaaaatgttgcattatttgtggtctggtatatttagtatgttcaaaggcctgttttttcccatctgacatagcatccaaaccagaagaggatcccactggccaggaagaagtgaggtggaactcaagtgatgtagggcagtccaaagttcccactgctatgggcaaaatgtttctagaaggttctatggtagtataagttcatagataccttgtaggtgtaaagcccagagaactaccactctaaaacatatacaatagagaagggctttatgggtacagtgacctttgaggctccttagtccctatgaaaggaaaaaaggtagctaggtatctctctgtccaaaatgaaccttcatcagaaaagcaaagctgcctcctcttagagaaagatgcttccagaattttctttcccaaatcttggagaaccagcctttcccatagcatttttcctcagctgacaatgaatcaacaaaagcaaaagattcctttgggacattgaatatgatcaaactctacaccatagccaatgtctgggggagggaggttccatctcagctgctcaggtctctaaggagtggggagttaacataaaaggtgctgacattggctgagcccaggagatgttctaggacttcacaaatagtgccataagccttgagttgaagcagtctgactgactttgaagaagcaaacaagaaaaaaggaagagataagtgaagaaggaagaggaacaggaggagaaggaaaaagaaaaggaggaggagaaagaaagaaaggaaggaaggaaggaaggaaggaaggaaggaagaaagaaagaaagaaagaaagaaagaaagaaagaagaaagaaagagaaggaagggaggaaggaaggaaggaaggaaggaaggaaggaaggaaggaaggaaggagagagaaagaagccaaatagaaggaaattgaattctaaaataatttacctttttgcaaaaaagtgtttagccattgaaccctcacaggtaagactatagagtggaaaactgatgagataggtcacaggaattgattaatgaagctaatgatgctgtcaattattatttattttttccttacagatccagtttccatcaaaggatcttacttgtcaccaaaatagatagagagaaactatcttgtctcttttcttcttcttttttatttttttatttttttgagacaaggatttgttatgtagcccaggctagtcttaaactcacaatcctcctaccagagccttcagaatgctagggttacaggtgtgtgccatcacacccagctagaaatctgtcttcagtgtgttttactcagaaacataaaagttggatctagcacagaatcgggaaggtgagggtgggctaaggacctactgtttctttacaaatggtcaaggtgggattccagacggaaaaaaatcagttcctgacaagggtcgtttttacttaggggttcatggcatggcaccccaactatgccactctgcgtaaggattattctaagaagaaagtcattgagaaactgaagctcgtctctgccctctctgatctacctgagaacagcataatctctgctattacaatgaggtgacgccatcccgggaagggtgaacagtcttgtccctgaagacagcacacaggaaaaccatcccacacaaagtctgccttgtctccatatcggtgtccttccacagtcagccaccattcacattcaaacctcttatagcttccctacaaaattcttgctgtttatggggatgtctgtacatcttttgtgtcatttgctctgtgcacaggcactgcctcattaataacttgtttttctcttgctaatctgccctttgtccatctaatttggaggacacagccaacaaacctaacacgggtaaatgaaaaagtatttctccctccatattagataggaagtttttcaatcccaccccccaaaatctgtatgttaaaaccttagccagtgcccaatatgtcagtatcagaaggtggagcctttggaacatgattaggtcatgaggtagtaccctcatggaatgattttagttcccatattaagtaaaaaataaaagacctcagagggcctggatgtagctcagtaggtagagtatttgctgaacatgtacaaagccccgggtttaaccatcagcaccacatagaccaaatgttttggcacacacctgtaaacccagtactccctaggtagaggcaggaggattacaaattcaagatcagcctccactacatagcaagtccaagagcagcctgagctccatgaaaccctgtctcaagcccatttgtatctctaaagagagtttctcctctgctctcctacctcacagcactcaagacttctgtgacctcatgaggaggggagacgtctcccccacagaaagtaacagtactgctgtggttgacacctctgggtctctccaatccagttctaacacgacctgcctggagacagatcctattgagagttcaggtggcaagactgcttctattccacaggttctagacccaggtcctgtgcctctgacccactagcataaatcatggtctctcccagccctcctcaaagttgggtttactaagatggctctaggaagccagggaaacatctttattagcttataaagatctacagaggaggtgggataaggaacttccctgtcctctcccagggcactatcctcggtgaactgtcatttggtcagctacctaggaccgccccatccttgtcttggatttttatggagatttcgttgcctatgcatggtggacgcacagacagctgtgcagagatgtgattggacaaaaggggtttgatccagtgctgaatggatcagggctgaggaggatagacacagcagggcctctttggatttttctcagactctgggtagtatatcaccctccaggcagttagatccctctggaatgaggaggctcccgaggcctcatgtagatcacaggcatctttatggccagctgcaaaatgggtaggagagagtttctatagcctaccttagggaaattctaacattatggcctgctctgggagggaagactcaaagtgacgagtataaatttaaaacacagcacaccgctagcagtatttttgagtagcagcgcaaatggactaataccccacactgtttttgtgtattctcaaatctttctatcatggtccactgatgagaaatccccactcttcactgggctgtgaaggtggcaccctcgaaaactggcattatagaaaagtaaggaggctggggagatggctcagcaggtgcagacgtatgcggcatggttttggggagtaaataagataaagcattagaaccaattcccaacatcgctcagcctgctttcttacagaactcaggaccactagctcagggatggcaccacccacaatgggctgggtcctcccccatcaatcactaagaaaatgccctacagctggatcttattgaaggcattttgctcaatcaaggttccctcctttcagataactctagtttgtgtgtcaataagatataagactagccagcacccatgccgatgactttgaaatgcattggggggggggagggtgtcaaagatggcacatcctcagccctgtgacccaaaatgcacacagcgtacctgcagcaaggcctaggacagcagtactggggaaccctcggatgcttggcttagtccttcctaggggtcacttcaacaggctgaccacaaactacagaaggaggacctgtgtcctgaggagtcataaataaggagagacacaagctaaggccctctgctttctcatagtggtctccaaggggtgctgagtgtggtgggtcaaggacctaccatgggttcttgtactggggccaagccactggtgaacacttgaaggtaaggtcttccttcttcaggctgtctcttgagagcaaagattagctggggaatctgttcaaggcagcatttataaattccacaggtaactcttaaggcaaaagggatgtagatgaaagccttatgaagagaaggtgaatcctattcaaacgggagcagtcaggccccacacaccaaggctcttagcctctctacaatgctgcaaactccttgagtaagaggaggctcaacgctgggaaaaagaggccttcttgggccttggctgcgagtttacttttcaaagctctgctccctggaaacctgcagggagaagtgactcacacacacatcccagcatccactgctcttggcaaaggcagcttcttgcctccccagcttggagctgctggggatgcagcatggatgctttccttcctagtccctggacggctcacacagacctcattcacaagccggctattgaatgcttgctggaaatgcaaattgctcagcagtgagtcttcttttcacacactaaagttgcatactcctgagagctgctaagcaggacaggcaagcatcccagagcaggaggctcccgaagaactaatgtttgctgttaaaggaagcagaacttggagctggcagccaagcaggacatgcaccccgctggcggttctgcaggtgtctggcctcttgccccttcgtgaccccgggcttgcctcttttgttccttcatttgagtgccacattaatcatgggtgactaaggaaggactcaacccaacagagttgttgcccatccacagttcaagtccaaaaagctggataagctactgagtgagccacttgctcccctccacccaagaacctgaaggctctgggtacagtctcccacccagactctgaggataactcagtgagcacgaggctggctgactatgctccctaccacgagtgctcctgacccagccctcacccagtaccttggggtcccttccttccccaaggttctctctgaagttgaggtgttctttcttctcaggcaccaggtaggagtcactgggcctgagataactgaagagaacaggctcttctcttctcttcaagcttcccattctccaccaaacaaaatacaataaaaccaaacaaccaccaccagcaacaacaacaaaaaacccacttggttaaaatgggtgtttaccctccgaattctgtagactttcataccaaagatttgtagcctgtttccactttccaagagaatcattccacataatctgtttggtggtgggatgttttgttttgttttgttttttgacaggatctcaccatgtacccttggctagcctgaaacacattgtgcagagcaagaaggactcaaacccatagtgatcatcctgcctctgcctcctgagttttggacatgtattaacatgcccagctttctttaagatagggtcttactatgtagcccaggctggcctagaactcatgatcctctggtctcagcacttccagtagcactggggtaacatgtgtgccaccatacccagacaatttctcatggttgcatgatgttcccgcatttacctggtttataatggatcgagtataaatcatccagacttaattagtatctggctcaccatatcaatcattgaattccgtctatggtgtcagttatagtcacacatgaaggagaggaaaccaggtctatctgccttggacaacaaggggaatatggcggtttatgtaactgtataatccacaagtagcaggctttggggtaggttttattcaaagccttttcttctccactccccattttgccttctgtggaattagtttcacccggtggctatgatagttgtgttaggggcagaaagatgcaattccctcctcacccatcataaggggcctgtcctacaaaggcagattaacaaaagcatactgcctttactgaatctgtttcatttaacactcaagcccttcggtactgaaaagccttggtctgttgaagcatagctttaatcccaccattagggaggcagaggaggctagtctgattcacataaaagagttccaggccagtcaaggctacacagtgagaccctgtctcaaaaacagtaaataaatagccaagccccaggcttaggtttgatgaagcgtagacagccacatcgacatgtcactggacagcataaaactcacagcctgaagacaaaacccagcaggacctgtcttctccgattcttattgatctcagggtagcatttttccctcctggctatggggcagaaccatctggaatgatagccctcgagggagatttacttttagatttttatgacttagggaaaggttcttggggaagacaaattcaggtttctatgactcttcaggagggagggagaggtaaacgggagaccaaaatggcagaaagtcagagctactttgcttctaagaccttccggcctgcttttatttagttcaaaggatcatcatacaatgcatcatactttggagtattgtcttctgagccccagcagctgccaacagtacctaacgctacaatagatctttgtccccatccagatagagtgcccatgagcctgtcatgccaagcagaagtcctgtgcttcaggcttcttggatcggcatgttacaggaacaccaatggctgggagcagggaactggggagactcagttgacttacacctctcagggcctgccgtgagttaggttggaatcatctatccttggagtaagtaggctgcatgagagaagacagaatcagaataaaaacccaggtattttaaagaaaaccatgaaatactgagggttttaacatgtgtcagtcctcagtattaggggtttttttgttgttgttgttttgttttttccaattgaaagattctttttcgagggaactacaggcttcttcagtgcttcccttttgtaaataccacaacgggcatcctccatagaaatgttggcaaaagccccttctcaatgctgttgccctctgagttctaggtcttttccctgtttgtgccaactcttcaaggttgccttaccccttctagatacattctaggtctctctgtctctctctctgtcttcctctctctctctctctctctctctctctctctctctctctctctctcacacacacacacacacacacacacacacacatacacacacacaagcaggctatctcacaccttcacgattattatctacccagactggtccagatggctttctgaggttagaaaattcgaaacttccttctcatcccaggacggtcaactgtgatggagatcactcacattaatcagaaatcctaatcagattgacccacccgccttgtgttttaaatctaattctttaatcactttaagccaagcacattctttttttttaattaggtattttcctcatttacatttccaatgctatcccaaaaagtcccccatacccccccccccactcccctactcacccactcctactttttggccctggtgttcccctgtactggggcatataaagtttgcaagtccaatgggcctctctttccagtgatggccaactaggccatcttttgatacatatgcagctagagtcaagagctctggggtactggttagttcataatgttgttccacctatagggttgcagatccctttagctccttgggtactttctctagctcctccattgggggccctgtgatccatccaatagctgactgtgagcatccacttctgtgtttgctaggccccggcatagtctcacaagagacagttacatctgggtcctttcagcaaaatcttgctagtgtatgcaatggtgtcagagtttggaagctgattatgggatggatccccggatatgacagtctctagatggtccaatctttcgttacagctccaaactttgtctctgtaactccttccatgggtgttttgttcccaattctaagaaggggcaaagtgtccacactttggtcttcgttcttcttgaatttcatgcgtttagcaaattgtatcttatatcttgggtatcctaagtttctgggctaatatccacttatcagtgagtacatattgtgcgagttcctttgtgattgggttacctcactcaggatgatgccctccaggtccatccatttgcctaggaatttcacaaattcattctttttaatagctgagtagtactccattgtgtaaatgtaccacattttctgtatccattcctctgttgaggggcatctgggttctttccagcttctggctattataaataaggctggtcaagcacattcttgatagagatttgtctagcaatcaagtatattgaccttccggtattcatgcaatggaaaagcccagaagtctgttgaaatatgacttggatggatactgtagtatgctgcccatggatgagctggctctccaggatgctggtatagtcactgctagccacttaacatctatacctctgtctgtgcattgtcttaactaaagaaagctgcctcacccaagatcataccacttcccaaaaggcaaggtaggttgaagaacaagaagcacatgtacggctaaaaacaaaacaaaacaaaacaaagcgaagcgaagcgaaacgaaacgaaacgaaacgaaacgaaacgaaacaaaacaaaacaaaacaaaaccctggatcctcagttgagaataatcctggaagaccatcccaaatgaatgaaaaaagatgaggacatgacagcccctaagtatagttgaggaagagtatatttgtagatatgaaggagtgcataagccagagacatctggaagggtccagactgaaccaggccatacgtgatgggtagggggatggatcatgctcaatgtgagggtcccaaataaccaaccaatcaaccaaccaaccaaccaatcaataaaaagtcacccccagcaacctagcaacttaaagcaacaatgtgttatttcccacaagaacccagggttgtctctcagccttgtggcttctctccacagtgaccagcgcctctttacacacagcagctgaattccaagagtgtttcaactgcacacaccacagtatacatccatgtttcaagctggcttgccctttttggctaatgtcctgttagccatgccccgagtcccatagggaactccacaggaatgttcttcctcaggggccaccagctcaataacctatcacaatctaccttctgactctctcttggtgatctataactacttgcaaaatgagtcaccccttagagcaaaactggacttccagggaatcttttaaaacagtcagatgcaggtttgaagtccaaagagtcactattaaaaggtgcttcaggtgaggtattccaagggctattcctggttaaagggctacaaaggcggactgtctccccagcacacagaggaaacacagcaggaggaacagagatggcaaaatacttcaggagtctcatccaaactgctgagtgaggacaagagggttcattataaccactagtccatagccaatttaaaaaacatctaaagaccttttacttagttggtggttcagtcaggggactgacctaggccctctgcacataggttacagttgtgtagcttggtcttcttgtgggactccccacagtgggagcaggggctgtctctgactctgttgcctgcctttttaggcccctttcctcctattggggtgcttcatccaggcttcctaggagaggaggtgcccggtctcactgcaacttaatatgccctcgctggttgatatccatgtcttcttctgaagaaaaacagaggagtggattccgggtcagacaggggtaggaagtgggggagggaggttgtgggaggagacagggaggaggggaaggagaataaacttatttggttgttattgttggtttttttttttcagacagggtttctctatatagtcctggctttcctggaactagctctgtagaccaggctgaccttgaactcacagagatcagcttgtctctgcctctgtctctcaagtactgggatttaagggttgtgccactacctccaggcctccgttagctttttaactaagcctcttggtgatagtcccagtattttttctaggatccaggataggcacctttcatttatccatgcccttgaactccagtttgcctggccagcccacctcccccaacccccatttcctcctatctggaggatatttggtgtgctagtgctccgttcaccaatcacacacacacacacttgagcagctacagaatgtaggaggaagttctgcttgtttgagcaatgttcctctcaaccttagggcagtggcccaggagacctccgtcctgacttctcccctgttcagtaatcacagatcctcataagcccttagcctaacctggcctttcctctgggtagactgagctgtctccacagagaatgggcagcttccagaacttctagcctcagacaacccagtagcatctggaaggaaagaaaattccagagagtagctgagggcaggggctgaagcaaatggagactgtggaaggcaagggtctgtgaggagctgcagttacagcggagctgcaaacaccagtgactgaagagctctagaaagctgctgagtcacccagaggagctaggagccaagggtcaagcaggccaagctcagagctgtgacactcggtgtggacactggcttcctagcactcaatgcctccggaagcctacagtgtacgtcactggcctgtgtctggccaaaccaagtggctttggaatcactatgatactaattaacaagccatctgtacctctttaagaagtcagatcctgacagattcccatgcaggtgctgctgacacactctctgtcattgaatgctgagtgtctctgtataggattgttccctctagctctcacaggtggtgcaggcacccatctgctcttcttcctgatattattcccgggcccagcaagaacacaataggggcttccttgagccagggatctgtcttataacactttatgttttgttttgttttattgattttttttaatgtttcaggatttgtgtgtgtgtgtgtgtattgcctgcatgtatgtctgtatactatatgcatgtctcgtacctgcagagcccagaagggagcatcagatccccctagaactggagttatagatagttacgagctgtcacacgagacctgggaatgaaacccatgtccctggtagaggattgctcttcagagctgtgctatctctccaacctctccccaaggcttctttacacagcttcatcaagaaaggctgagaggattgcttctttctgtatgaatgggagctggcatggaaatatgttttcctggtaccagattgaagccagccaagtagataaagaaacacttccaatactggtgcccagtctggccatgcagcggccggaaccagcccagggctagccactgaatgcttacggtccggtcaggatgttttcagtctgtactttcttcccactcaccttatttttctaggaatgaggtcctgtggcttctctgatttctactcaggaagctcccagtctcccagttctcacctgccactgcatggcccataacacaagagacagctcggagaaagagaggcaggaagcaaaggaagaaagaatggtggaagccattggttagcacatgcctttaatcccagcactcaggaggcaaaggcaagcggatctctgtgaattcgaggccagcctggtctacaaagtgagtccaagtcagccacgagaaatcttgtttctacctccaatccccaaaagtgaaaacaggcagaaagaggtgaagcaatgaagaggaaagaggcaccaaacaaaggggtgagaactgcat

SEQ ID NO: 8 - DNA, 1297 bp, Mus musculus
ccgcggccggatgaggaggacgagtcgcgccgccgtctgggggacctgctatacagcgtcttctcttcagaaaacccgggggtcgaggtgcacacagcagtgttctgtcccagccgcccccagggtgtcctggacgtccagcgcgctgataaccaagcgcacatggtccacctagtggatcgccagacccaaacggatgcagagacatacccacaggggagactgcctacctagggagggagccaggaaattcacagctccatgtagctccacggtgttactctagaaggatcaccatgaagaaggtcaaaaagaaaaagtctgattccaggcgccgcaggaattccatttcaccgcagactagctccgattcctcacagcagcccagctcagaaaccccgccgtcatgtccagagcccgcctcgccaccatctaagccacagccttgccaggagtccaccacaccacaccaagttaaccctgagcctaaaccgcaacagcatacaccacagcctctcccgcctccagagaaacctgcctcatctccgttcctggtacccatggaacctaaaccaattcttccaagcaggaaagcagcagtgcctctgacctatgtggccccacgctcctgctcctgtgcagcctgcccgggcagctccgcttgctggcatcgtctggggctttgccatagccgaatctttgatgtcctcctacctcgggactggtcatccatgccagggagaggagtcccaaaccttctcaccttctacagaaaaccgtcaaggaagtactgcgctccccgtaactctcgtgcttcaagctctcggaactgttgctgtggctctgggggccttgggagttgcctacttcatggctgaatccttgtgaattggaccccaggcccaccgtccggcaggggttcatggcatggcaccccaactatgccactctgcgtaaggattattctaagaagaaagtcattgagaaactgaagctcgtctctgccctctctgatctacctgagaacagcataatctctgctattacaatgaggtgacgccatcccgggaagggtgaacagtcttgtccctgaagacagcacacaggaaaaccatcccacacaaagtctgccttgtctccatatcggtgtccttccacagtcagccaccattcacattcaaacctcttatagcttccctacaaaattcttgctgtttatggggatgtctgtacatcttttgtgtcatttgctctgtgcacaggcactgcctcattaataacttgtttttctcttgct

SEQ ID NO: 9 - protein, 237 aa, Mus musculus
PSAHGPPSGSPDPNGCRDIPTGETAYLGREPGNSQLHVAPRCRRITMKKVKKKKSDSRRRRNSISPQTSSDSSQQPSSETPPSCPEPDPSKPQPCQESTTPHQVNPEPKPQQHTPQPLPPPEKPASSPFLVPMEPKPILPSRKAAVPLTYVAPRSCSCAACPGSSACWHRLGLCHSRIFDVLLPRDWSSMPGRGVPNLLTFYRKPSRKYCAPRNSRASSSRNCCCGSGGLGSCLLHG

SEQ ID NO: 10 - DNA, 48174 bp, Homo sapiens
ggtgaggtaatttgctttactcagcactcatccactgattcagatgttactcttatcaaaaaatactttcccagatacatctagaataatggctgatcaaatatctgggtaccgtggtccagccaaattgatgcataaaattatcctcccacttccccacccctggcccctccaaggccctccggggttctccgggagtctggctctccatctcctcctctttgccctccggcttccaggctgtgcgaccctgaggctcttccctgccctgttctacccaaaggggcctcaggggcttgaattcctccttcttggacctttttctctttccagtcagtggatcccatcactttgagggctcctggaatgacattttccccaagaagcctctcctgtataaaactgggggttgttggctgtgcccagaggatgggggtggcttccttgccctcttcaccccccacacccctgcccccttccccctgcatcactgccgggctggactgggggtgggggttgggggaatataagccctggattgggcgcccttatcttgctttaatttcctctagagctcagcgccatgtgaggttatagtagtggccgaccttgtttactctttcctaccggagtataagctccagggggcagggacttcatccccagagcctagcccaggacctgcacacggaggcactcagggtgtttgttgattgaatgaaaaacgttcactgaacacctctgttgtgccgcacacactgtgccagggcgtggacgaaagctcagctgcccaggccattgactatttctgagcatttccactctcacgttgtacacccctcatttctctcttcctggaggggctccctacctgagcgcgggaatcatcttccttcctctctcctggagtctgcctgacttggtgtcccaagacagggactgggtcccctttgagcccctggaggaatgtgaactgagccgatgaggagatgcctcctgtctacttggaggaaagggaccgggacacacagaggcgcagggggctgaaccctcggttccagccccgataactcatccggagtcacgcggttccgggactttgcagaggaaaggggcgcgggatgtgctttgggaatagaattccacctttgcactcggctctgcacctgtcctgccccccggagattccttgagtccacgtggatccgagaggagaagctgttgatcatttcctgtccgctgaggctgtgatccccggccgaccggaccggtagcccggcagcgccctctggtggccggtgacgctcagccagcgccgggaatcgccgcccaggccccaaggaccagaatcaggagcaggatcagggccagggccagggccagggccagggccagggccagcgcgggaggcagatttatcccggtgcacacctctaacttatccctcctacacaaggcaggactccggcttctttcccttttctgtgtatttcaaaaggaatgcacattgagcataaaaaatatatgtaaacaaaaagaagctcccagtcaaagctgtgatactgtgtcctggcaggaccagccaggcctgggtctcaatcccagacctgccatctaccagctgactgaatctgaacaagacgcttaactctccgagccacagtttctgcatctgcagcctgggaatggtgtgctctccattgctgggttgtgtatagatgacctatgtacccagcacctaggacagccccgactgatgggggcaattcttattagacacaaaggagaatctgttaaatgtccttcagtttctgctcaggtgttcccagggggtgagagatgttcccaaagatataactgcctgcctgatcgcccaagcagagactgtatttcccagattttctggcagccagagttggtcacagggctaattctggtccatggaatgtggctggaaatgatgtgtccaacttccgagtcacgccctgcaaaggaggttgtttcccctccattctgcttttccatcctcctgctggcttggaagtggacggtcctggatcagctgccctggagaaaggaaaggaagccacatattgaggatggcagagccttcctgacaccccagaaccactgacatctgcagaaataaatattcctaacccaacgtatctctggatctctttgttacaccaacttagatataatcgtggtgtttcaagtgcatgcccaggagtcttggtattcattctgaacaccagctgacagagcttctgcctttagtgccacttcttacctttagtgtctccccccaccccaccatgcacaaaaaaaagcccctgcaagggctggacccagggaaccctagggatggcttaactccagcctggtcatcccctccctgaggtcacactgaggctggcagccctgccatctggatcatcccctccctgaggtcgcactgagactggtagtcccaccacctctctctgctcctctccccgttccatggcttcagtgtgccaggggctgattaaaggtagtccaacgtgtcagacagttagtacaagggttcttcaatgactgtccaactgcaggttgaactgacaatgaacaagacagcacactagggctcctttaccccagtcaggagggacagagtagctcaaatccatgttttgggagtctggaacctctattccttcctggtactccccagtttaggatatgttgataaaagctggtttagagaaggcaaaaagcaagccccagccccaggtagggcctcctacctcccctagtaatctcaatcttgagactcccacactagggtaaacctgtggaaaggccaattcctgtatggtgaagttgtcaggtttaatttatcttggatgaaagtttagcaaccatccttccttttttttttttttttttttttttttttttttttttttttagaccaagtctgcccaggctggagtggcaggcatctgtagtcccagctacttgggaggctgaggcaggaggatcacttgaacctggggggtggagctcacagtgtgccaagatcacgccactgcactccagcagacttgtttagtctgtttttgagacttaggcttgctctgtcgcccaggctgtagtgctgtggtgtgatcttggctcactgcaacctctgcctctccaggtcaagcaattctcctgcctccgcctcgggaatggctaggactacaggcacaccaccaggctcgagtaatttttgtatttttagtagagatgggggtctcactatattgcttaagactggtcttgaactcctggcctcaagcaatcctcccacctctgcttcccaaattgctgggcttataggcatgagccaccgcgcccgaggatcctggagtttttagcgggattctagctcagagttttctgtttgacaccctgcttttcagagttttttatgtttatatttttaaaaataatttagcataacttggtaaagctcattttaagaaaaataacaaagggaacaactttccccaccgttgggtttccagtctctgtgaccgtccttgttccctccgtactgcctcatcatgacactctgctcaccccgcgtgctgggcagcaaacgagttctatgctttctgtcttgttttcctgaggacctttcctggcgttttgacaggccgctggtacccacagaagcctggaactgagggggcccaaaatcatctcgggcaacaccacccgtttatatcgtaatagcgcaagactccggcgcccgaatcacccagagagccgactggccgagccggggcccagccacccaggccgccactcttcgctgattctcaagagttgcgggtgcaatgagatctggtccactgctttttaaatgccccgggtgcataaaaattcgccttacttagagccttggggacgaagatttatccatggtataaaaggatgcaccttttgaaaccacaaaagtagaaaatggagaaactgaacacagtcggcgttataccagcgtccaacagcaacttcctatatattagatttccaaggaatagcggggcggaggtgcttggccacgacaggaaaaggtagggctcaggggtattgtgacatgctccggagaagggcagcttttccctcccaacggaagcccgagcccagaggggcgagggtgtcgggccggacatggagcagcggcctggggcccagccctgcagggcaccccaggagaggaaggcggaggcgcagccacaggccccggcccagtctgtcgagggccacggccaggtgctgctgatcagcgggctctggaagcaggatgaggacggcctgagcctgcagagctttccaggagacactgcagccgatcagctccccaggccctcgtccgcccgagccatgagcggccacaccagcgccagcaactgcaccgcacggcggtccaagcgctggggcgacagctccatgaactgcgacgactgcccggccacgaagtccaagcgcttcaccaagaagtcgcggcgctcggagcccaaggccgaggacccgcgcgaggcgccaggggctcctcctgggacccccacctccgcggcagaggacacagcgtctgcacgcggggcaccgcagcacccgcctgagcggggcgcgcagctgctcctggtgttgtgccgcgcgtctgcgctcctcacgcagctgctgcggctgcagctgctcctgcaacagcagcacgcccgggaccgacgtccgcccgccgcgctcgtggggatcgtggtgcagccgcagcaggaggaggaggccgaggcgcgccgccgcatggaggccctgctcagccgagtcctcgcgccgcacagcccagccgtggaggtgcacacggccgtgttctgccccggccgccccgagggcaccctggacttccaagcgcgccgccagcaagtgcacagggtctccctgatggatcgggagacgcagaccgatggtgaggggtcggcgcggggaggggggagccccggggcggagaacgctcaaacacgcagccctggaccccgaccctgccgccccgcggggtagaggacaaagccccggagtcacggcctctctcctggcgcctccaggagttttgggtactgttttgggtggtaaggaactagagttcctcccggtgtgctcactggggcaatctcagcgtcagaggtgttcgaattaattcggagggctacgacccccactcactggccccacatgcaacttggggcatcggttcccatgacttggggtcacgcttttgtaaggtattgatttgggactttgtagaaacggggccccactccctcctctccacatcctcctctcccttgcttgcttctttagtcttctccagggaagaataataacactaaaagcacgccttttgtgagtcaggcgctgttctaagggcttttcacctggatcctcatggcaaccctctcaggtggaactccgctagactagctggccgacttcaggattctccttcgcaactcttgagaccctttctgttatggagaccaggcctgtggcccacgggattaatttgtcagtctaaggtccctgggcagtgagatcttgagggagcgccaagtcccgcaacctacctgccagctccaccctgccaggggcagcaggagggactgaggaagtgctctgtgtggcagagtccaaaggtcaggtacccaaggtctgccactctccagctggtgaccagagcaggcatcctctctatggaccagtgtccctcctgtgtgacgtgaaggtgaagggctggttgatgtccagggtgccatccagctcagagaagtcagcttcaggacaaatggtgacacacttattctaggtgcccaggaaaccagaaccatcagagaccttctgggaggaaattttcaccccatcaagaccttattctgactatctaatttccaattcccttcccctacctagtctactgcattttcacatgactggcatccctagttaggaaactcccttgcccatggactagtccagctgtgatcctcagccaaggccagagaagtcccagtccatttttgaaaacacccccttggtgatgaagccttggaggtgcctgatcccacatgcccacctgcccccatcacagcttcctgctgtcgcagcttcctgctttctctgtcctaactttacctttattcagttccagcagcttgcattaagcccctactctggactgtggccttctgaggtttccaccatctggggttggggaatgagagggaaggcagagacagaaataattctaatgccgttcagaatatgaccagtctcatacaaagaggtgccccggagctcagcagcaagggaaggatggcttccagttggagatctcaagaaaggctttttttttttttttttttttttgagatggagtctcgctctgtggcccaggcttggagtgcagtggcgcgatctccgctcactgcaacctccacttcccgggtttcaagcaattctcctgccttagcctcctgagtagctgggaccacaggcgtgtgccaccatgcccagctgatttttttatatttttagtagagacaggattttgccatgttggccaggctggtctcaaactcctgacctcaggtgatccgcccgcctcagcctctcaaagtgctgggattacaggcatgagccactgtgcccagcttagaaaggctttatgaagagatttatccacttgagatagggcttgaccagaaaatgctttggtagaggtgcagagagggatgatagaggagaagggcttctgaaaatgcaggaatgttcagcctgttcatgagatctctgatgttcacggttagctagagctggacacaggtagtagtagtggctgataagcactgggcagtgggctgtggctgtattatggaagagccaggcttcctgtataggaacaggtgctcaaacagaaagcagtggggccaggcgcagtggctcatgcctgtaatcccaacacttacggaggccaaggcaggcagatcacttgaggtcaggagttcgagaccagcctggccaacagagtgaaaccctgtctccactaaaactataaaaattagtcaggcatggcggcgcatgtctgtaatctactcaggagcctggagcatgcctgtaagctactcgggaggctgaggcaggagaatcagttgaacccgggaggtggaggttgcagtgagccaaaattgggccactgcactcctggagacagagtgagactctgaaaacaaaaacaaaaagaagaagaagaagaaggtgggggctgcagggaagacgttctagcaaggagctattgagggaccattcttcctcattcttctgggacaacctctttccacaggtgccctctctctgcttcttgggaccactcttactaaagaattcacacatatttttgctgctgccacagagaaattccccactcctccctcggcctgccctctgtgcttcctccatctttctacaggaagacagagactcattctctgtgccctgtttggctccttctggtaaaatggaatatttctttcattgctaccaggaagttctacctatatgtgtctgctcctatctgattcatttacaccaacatggcacaatcaggggcaatgtggacacacacactcctaccccatctctaggggacatttagcaatatctggagacattttgggttgtcctggggtaggggggagtaaagactgggtaaagaccagggatctggtaaacttcctacaatacacaggatgacccgccacaacaaagaattactcagcccaaaaatgtcaacagggctgaggttgaaaaacactgatttaaaccaggttgaggccctcggccgaagcccattggtacctgaaaatccaactttgcagagattaatgccttaggagttcctgagctgtctgctagatctcaacagggttcccggcctcggtttccagtctctctgattctaaatggagtcccctcaagggttccattgctcttggcttcaggaaattaccagcttcatacagattcacttgctcccagagcctccttaggccaaggtcaaccaaacacaacccaatactcttgagctgagcttgccttcacttctgatccttcctgcctttgttttcttcaatcttctcgctcagggaccttttttttttttttgagacgagtctcactctgtcgtcaggctggagtgcagtggcacaatctcggctcaccacaacctccgcctcacaggttcaagtgattctcctgcctcagcctcctgagtacctgggactacaggcgtgcaccaccatgcccagctaatttttgtatttttagtagagacaggttttcaccatgttggttggccaggatggtctcaatctcttgacctcatgatctgcccgcctcagcctcccaaagtgctgggattataggcgtgagccaccgcaccaggccactgggggactttttaattcattatttcaaagcctgtataattatctgactccctattgttttctgggatcatgaaaataatgagccccaaactggaatttagtccttccgatgcccccagccagctgtgtgaccctgggaaagtaacttaatttcgctaaacctcagtgttctgaggaaaggtcatcattaaggtatttttaggctctagaagccctaaactatgtcctgtcatttcagagttcatgttgggtctggctttgtgtggcccaaagccccccatttttttttaagacagagtctcgctctgtcgcccaggctggagtgcagtggcacgatctcggctcactgaaagctccacctccaaggttcacgccattctcctgccgagtagctgggactacaggcacccaccaccacgcccggctaattttttgtatttttagtagagacggggtttcaccatgtcagccaggatggtctcaatctcctgacctcgtgatctgcccgcctcagcctcccaaagtgctgggattacaggcgtgaccgaagccctttttatctgcataggtctgctctaaaccttccgctggggcaggagctcctgcgcttgccagtcccacactcacccacctgtgacacactggcgatgaaagcagtctcctcaggtgaacacattttatgttgcagtcacagtatgagcttcagattgtcttttaaaaatacttttccttcttccatcctaaaacaaaaatcacatttaatgagcacattaaattaattaatctagagaaagattcagtcacctgtttaacccaaccaattggggtttgggagatagtctgtggttgccattgccatgagtttgagacaaatgttagttttctgaacagctgttatgttctcagggaaaattatctgccaaatgcaaaggttcttataaaagtcaagtcaacccccaaactcccctcccacagtgcgggagggcaggctttgggggaaggggtaagctactctgagatggtagcaggctctgggccatggtaaagccttcgaagaagctccaaatcttcaggaagctgacctgaagatgaatgcgtggggaacatggatttttgaggtgtaggagtagggggtatgtggaagccagtgacagagctgagcgtcacatccagggtatcttagagcaaaacaggtagctcacatggacccaggaacacgccagcagagaggtgtctgaaggcagcgctcaggtcgcagaagcatgaggatctggctgtcaccagccccgtagccagggctgtgaggaccagggcagccgctgtcccctgcctagcctggcagcctgggatgaaggaggacaccaggctggtgtctgcagagaagactgtcccttgaagccctgccataggagccaccctggcttttatgacctcacaggaggtgtgggtcactgttctctgtggggcctgggtccagctggaggcccgagccaggctcctagggcagagggcaaacggcccctccaggagggagccgggagattacgcagctccatgtaggtccacgtttaggttgggaggatctaccatgaagaaggtcaagaagaaaaggtcagaggccagacgccaccgagactccacctcccagcatgctagctccaattccacctctcagcagcctagtcctgaatccacaccacagcagcctagccctgaatccacaccacagcattccagccttgaaaccacctcccggcagccagcattccaagcccttccagcacccgaaatccgccgctcctcttgctgccttttatctccagatgctaacgtgaaggcagcccctcaatccaggaaagcaggtgggctgtcttctagcttcagcagttccagccttcctgctgatggagttctgggtcatcccaaaggctggttcttgtaggatagtgatgcatggttaacgtgtatcctggagctgtgctgtagagtgggaaggtttttgtttttgtttctacccaagagaccaggattcctgggttttgtcatttctcatcatcctgagtctcactgaagacagccacacatacatataaacatttaacttggttccatagtaatacttgctcactaggaatcagcagtgccatgcaactgctaaaaaataaaaaccaaggatgcatttatagaagtatatggtttagaataagggaggtgatgatactgctttattctgtcctcatcaagctatccttttgggctgtaaaagatgcctgacaaactagtccaaggaagatagtctgggttgatggaggatgagaaggatcagggagaccatttagtgtatgacagtcaattgaaggaattggaggatgtctgtctgtcaagtggaagatgtgaatagacttgttccttattgtcctcagagatctaagggtctgatgtggtttggctgtgtccccacccaaatctcttcttgaattcccaggtgttgtaggaaggacccagtgggaagtgattgaatcacgggggagggtcttttccgtggtgttctcgtgatagtgaataagtttcatgagatctaatggttttaaaaaagggagtttccctgcacaaactctcttctcttgtctgccgccatgtgagatgtgcctttcaccttccaccatgattgtgaggcctccccagccacgtggaactgtaagttccacaaacctctttcttttgtaaattgcctagtctcagatatgtctttatcagcagtgtgaaaacagacaaatacaggcccatggataggatagccagacaaaatacaagactctcagttaaattttaattttagtaaacaacaaataatatttttagtatgtgtgtccccagtattgcatgggcatcctatatttttatttgctaaattagcaatcttacccatggaagacattagtgacagaaagccttcggctcaacataaaaaacttcccaacaattagctctgtctgaaaatggaatggctgtcaggaaaagtggttccctgtcttcttgggagccaaacagtgtctgtataagcattggattgtgtagagggaattcaagtggagttcaggaggtgggctggtttatactactaacaataatggtgatagcaaactaacattatcactaagcatttactgtgtacctagcattcagatcaggtgtcttaattttcacacgtgataatcctataaaagttcttccatattatctccattttatagatggggaaactgaggctcataggagtcaaacaggttgctcctgagcagacgctggtagccctgagaagggaaacccactctattctgactccagaaccctcactttaaaccacagcactgacctttccattccaagaggcctaggagtctccacaagaggaagaacatctctgtccgagcatctcctggatctgccatgagccagtgcccacgactccatagccttgaacaggccacactccctgggccacagtttaccccccgggattgtgtgggcataaaataaataagtgatggagatgagagtgctaaatataaggcatgccatgccaatgatccttccatggccaggaatcaaacctttcttgacatatgatattgattttgagcaccatactatatgttgtaaagattgtgatcatcagccagtgagagaaacatttctgggttatgatcttcagaactggcatcttcagtactggtagaaagcaagactttccattcccaagtcttttaatgaacacatgtgactcatactcagagaagaatttggcccattgaacaggcaaagcaagaaagcaagaaatggtggtggctcgccagtggttacagcagacaccctatacttcttccaaaggaattctctgcgtagaaaggaatgttggagatgaaggatgagggcctgcaagtaaagcgtgccattttctaaaatccaagcctttttgtgtgcagaaatattgtagctcaagaaaatgccagtcttccactaggatgggtataatcagaaggatggacaataacaagtgttggtgaggatgtagagaagctggaatcctcatacactgtaggcgggaatgtaaaatggtgcagctgctgtggaaacagtctggtggttcctcagaggaacatgaagttaccttatgacccagcaattccacttctcagtatacatccaagagaattcgaagcatcttattaagcatattagaagcacaccaaaacttgtacacaaatgctcaaagcagcagcatttgtaatagccaaaaagtgggaacaacccaaatgtccatcagctgatgaatggataaacaaaatgtggtatgaaataccacagtacaatgagtatggtgaaatactatttggcaataaaaagagatagtgtcctgatacatggtacagcctggatgaaccttatagacacttggctaagtgaaagaatccagtctcccagaaacccacacatcgaatgattctatttacatgaaatgttcagaataggcaaatgtattgccagggactgggggaaatgggagagtggggagtaactgctcatggagatggggtttctttttggggaaatgaagacgttctgaaattagtggtgatggccacaaaactttgtgaatatactaaaaaccactgagcactctaaaagggtgaattttattgcctgggaatgatatctcaatttaaaaacttttttgtaattaaaaaaaaagacaagtcttgcctttagaatcccctctcctcattccgggaaagtacgtgtcgtgggcaagtctaagcagaaagtgtattgaatctgccaggttgaccacctgtttcatgcagcttagggtcagaagaatctgtagctctgtcaagaagacgcagggctacagataggaaacaggagggaataatccagccagaaattatcttgcccaaccacagagggcatcatctacattctgctgggatccataccagaggaggacagaaacagaaaataggatcgggactggaaactagagctgtggttgtcttctggatggatcagaatgctctagatcaatggaacgtggcagctccaattccaggaatgtcagtgcagcctctcctgaggtgagcagtcacctgaaattccattttcactgaattaaacgtgagaaagcctgagttgagaaagccaacttctgtaatctactccccaaaagggcatatcccttaaattagctgagcctcagtttccttatttgtaaaacaagaccagcagtatcccctttacaggattactgtgaaattaaatgagatgagcatgctaagtgcaaagcatcctgaaggtgtaagccatggcaccatcagcaccacctccatcatcatcatcgttgttgtcgtcgctgttgctactcccaggtagcaccagtataaaacagccattttcccatgcggtcagtcttctcttctgtttggttagagaacattttgtgggagaactgccttccttaggtagttcagtcccaaatcctcaatgatgccttggaaaaaatccagcgttcgccctggtaatcctgcagctgctgccgttgtggggggccttctcagactgtgttccagactcccccgccccagcctcccagggcaggtgcctccctcacctctctccttctgtccccacagggcctctgattcgcgccggcccgcattcctgctcctgtgccacttgcccctgcagctccgcttgctggcgtcgtctggggctatgccatagccgcatcttcgatgtccttctgcctcgggactggcagatggcgccagggagaggactccccaacctgctcaccttctacaggttccaagcgcgaggggctggagcctcggggcacacagtccccagggccaggctctgcccccagaccttattagcaatcatgtatcacttcctcttgggaatcccaggccgaaggaaagcctttctttccctctttgctttgcccacttcctggacgttggcaggcagggccctttctgaccggccccacccccggggtacccaccccgcctgtacagagaggtgccagttttcttcctcactgggattcctcctcaggggcttcctttttcttttctccagagatgccctcccctcctcagaacactctccccctcagcccttcacagagtcgctcaggagctttgtgtttaaacactgtttggccatgcacctccgtgggccctcagtggcctgtgtcataggcaggggccttaggttcctgatctgcctacgaatgtcgcccagaatttaatgataaaaaactacttgtaactcatatgcctcctccacacaatagcaagacgtcagcccccttcagactgtgctgggctctttctgggggtctccacagggaacatctgcccccaggctggtctgttggtggcggcccccatgacatcacccatagtatctgtccttccttcctcttcccaaaaagccaccaggagcagtgtcatggctgccaccgccctcataggaagaccccatccatgcagggaacagactggagatgttcccacgtttgggcgctgctaggttacatgcatgggctgggagaggggtcgccatctgccccacctgagggcctcacagatctcaatggaagaggcccttccacttggcgacctcacacccccaccccaggaactgaggccccccaacccccatccttgtcctgttcctcttcccagcctcttccctacccaatcccctctcctttctggagctgaaaaactccatctctcctacacatggagataagtaaatagataccggggcgtgtggggagaacacgcttggagccaaaaatactccaccacccagtaagctccgtcaaggaaaggtctgcctgccaccgttagccacaccctgcccacacgcttagtacttccatccatccatggccaaatcgtgccatgggttcatatcgttttaaaaccagcaagtgttattgagggaaacttactatgcagaggacatggggcactgtgagggaaaccagaacagggaactttacccctaaaattgttgcagtcgacatggagagctaagacccatgcatttagaaaccaagatgcaagatgcaaagagccttgtgtcctctaggagaggctccaacaggaacctctgaaaggttccaacaggaacaggctccaacaggaacctctgaaaggttcctgtcaacagcatgtgagccgagtccagaaggatcttgaagtcctctctggcttaagatgaaaagcgggagcaatctgggtgcaggaaaaggcaagcgtgaggctcagaatcaggaaagtgagcagggagagacagggtccatatctggccagggcaagacatgtagttttaattctgctccaattttagcactggcatgcttttctcaatggagtgtaatgttggctcttggctttcaatccacattcacattaaacaagaatccctatttttgtaggatttttatcaaaacgggtattgcattttttgaatgccctcctcacaattattgccttagtcatgttttccttgcctttgtgtgggtgtaatatattatttcccaagttcctttctctcaatggagtgaagtgatagaacttacctcatagggttgttgtgaggctggaagaagacactgggtgtgaggtatttagcacaaggcctggctcacagcagacttgaccaccttcctaacctggtccccttctgagtgttcagggcagctagcatcccaggccagctcaccctccgatcctcaggggtctttcagtagggacttgttggaaggatgggaagaattaaatgctctcctaagaggagtttggagagggggaagatgggtattcctgcaatcctgagggggccacataatttccactttctcctgttcgtagagaggcactgaagcccagcttcccaccacccccacttctgctttgctctacagaaaatcttcaagaaaaccctccagtcatcgtaacgcgtgtcctccaagccctcggaactgtggctgtggctctgggggctctaggagctgcctactacatcactgaatccttgtgaacaagcccctaggcccacagtctggcaggtatgttgagcgctctgtcccttcgaatggaggtggtctcttcaggtggaccaagccccggcctctcaagggaagcttgccagtggagtgactccctcctggcctcagggtcagccggcatggccctctagggaagacctgatgctctcagatgacgctagactcattattacaatcatctaaacagagcccccacctcctctgccccgggatggtgtccctggtcatggaccctggacaagaggaaatgggagggatgggggcaaaggtttctacccatctcggacctttcttggaactttctccctgcctggaaagcttgtctcctacccagtcctaccagtccatcacccataaagcccccttcttccatgaaacctttctccatcttcccaacttcaatgacgtcttccatcttctcaacccctgtcctctccacctgtgcctcctgtgttgtggatgatcctgtcgtttgcctgtggcctgtctcccatctgtcctgcaagacccctgagggcaaggggcatggctcatgcagccatcttccctcatccctggaagcagagcctgagactggggttgaatggacaggtttattgaggaggtgctctcagggagtgagggagtgagggaggcaagaagaggcaagggaaggagctgagaggcaggaggccagacctcagcttgaccctgtgggagccctggaacaagaatgatgacacagagttagtctcagcagaggggagagacttgccctctggtgctcctccttgtcagtgctttggctctgagtgttgggtagggactgcatgtctttgtggaaagagcagctccctttgggctgagggtgcttccctagaggaggggcagctctgagctattagcagcacattcacaactcacaggagttgggcagtggatgcaccagcccaaaaaggggataatcgtctgttttccttgcctttgcagtgggcgtaatatattatttcccaaggttcctctctcccagtggagtgaaatgatagaacctaccttgtagggttattgtgaggcttgaagaagacattgggtgtgaggtgtgaaggtctgggtggggtgccaagaactgccacgatgatccccttgccatgtccacacttagcaaatgcttaataagtgacagtggggatgatagcatggggataatgagaaacatttcaacccacttccagacctccaccagccccaggagttgataggtgatggcgctgggagaagatgttcagaatatctcaaaagccaagtccagaaggtaaactccagggagagctcactatcccctcatgtgctctgtgataccatgtcccatgtctgtggcagaggacatagtagttccttagctgctatgctatttcctgaggcgtttcctgagtggcaagaacctcagtttcctcatctgtaaatagggaaaatgacagtaccttcctcttgagcctgttgggagaggtgagataaggtgttagaggacagagctcactgctggggggtcccgttgctgttgtcaacatggaggtggtgggaaggatgccagctttggagttagagctgccggctcctttcttgactctgctgcctgatagctgggtgttagagacacgtttcttaatttctctgacagtgacatgtctagtggggacaataataactacctccacaggcaatggttttgaggattgactgaggggatgtgtggaagtgctgagcacaggacccagtgtcagggatgggtggatgctggccactggcaacatgacaaatgcacccgagttaaagcattttctcttcaaaattccttgcagcagaacctactggttgtgagctggagttctggaggcaggcaggcttgaggtcagaggcctcttcaatacccagtatttctgaggcctggggcaggttccctaactcctgatgtctcattttcttttcgttaaatggagataatcatagcacagatctcattggattgttgggggcattgagtggaaaaaatgcatgtaaaacacttagcacagttcctggcacaggataagcactcaacatagctacatcaccactactaccaccactgtcagcaccatcaccatcaccaccaccacctacctcatcaccatcacccaccggccctgcacctggcaattctgcacatcccttcaattaatctttacaaccatcacccttggaggtagttgtcatcaacaccattatcatcatcatgataatcattaccatttgttaaatcagtgttcccctaattttactgacttttgatacctgtaaaatcacttaatatttttctttaaatttgcttactttttggctgggaatagtggctcaaacctgtaatcctagacctttgggaggcccaggcagggggataacttgagcctgggagtttgagaccagcctgggtaacataccaagaccttgtctctacaaaaaaaaaaaaaaagagaaagaagaagaaaaaaagattaaaaaattagccaggcatggtcgtacacacctgtaatcccagctatttgggaggctgaggtggaaggattgcatgagctcagcagttggaggttgcaatgagctataattgcaccactgcactccagcctgggtgacagaactcatgagaccctgtctcaagaaaaaaaaaaaaaaaaaggccgggtgtggtggctcacgcctgtaatcccagcagtttggaaggccgaggcaggcagatcacaaggtcaggagatcaagaccatcctggccaacacggtgaaaccccgtctctactaaaaatacaaaaaaaaatagccgggcgtggtggcgggcacctgtagtcccagctactcgggaggctgaggcaggagaatggtgtgcacccaagaggtggaggttgcagtgagccgagatcgcaccattgcactccagcctgggcaacaacagcgaaactctgtctcaaaaaaaaaaaagaaagaaagaaaaagaaaagaaaattagcttactttttaactggccagggaagaactttagccaatgaaagctgcccgggcacctgtatgagagtcactgtaggggagggcgatggaggtgcatcgtgggggtacattaagtcgtgctgatcttgtaggctcagctcttaatcaacaggcagtttgatgtccttccctgtccagagagtgaagaaccatctgacgacagtgacatctttcctttttggggaaagatgcttctagaattttctttcctaaagtttggtgaacctctcccttggcatcttcctcagctgaaggtgaggccctaaaagcaaaggacttctttcccagccattttgggcgttgaatgtggtcaaaccactgcagtgtagcttttggggagtgagactccatcatagctgcaggggcccccggggaaggcgctggcaccgatgagctgagcaggagccaagcctggccaggcgcctggcaaaaggcattacagcctgaggtgtgtggctgaaagaaggagtgggtgcaaggaatggaagaaatttgaatcctaaataatttatttctccacggaaggatcacagctgctgaagcctcacctgtgaggctgtgaaactggaaagccaccaggattccaggtcacacggggtattgtctaagctgattggctctgtccttgtttttcttacagatccagtttccatcaaagggacctctcttgtcaccaaaatttaaaaaaagaaaaaaaaaacgagttctgtttctttagcatgttttacttagagacataaaagttggacttggcaaatgactaggaagggaggtctgggggccccagtgaccttttgggccacaggtcaagcagaactggtgcctgtcattcctgttcagggccacagacccccggtggagcagctttctctgcacacactcacagaacacagtgtttgctttagattttctcactctaaaggaagggattataaagcttaactcaatagctaacgtagttagtcatctgcacctctgtcccagggtaatcccagttactgggaataggaggaatgtgccggttcgcctccaggcctgcaccccagaggacagaggccctgtgcccaggaacactgtctctagaaacagcttcttttagggtcacctgtgatggggagcagcctgccatgcagccttgtgtttagtgctagtgatgtggctacacccagccagtgcctggtgcgattctacctctagctcctgaacaggcgactcgaaatcttagttcaaggtgatcccagcaaacaccaataggggagaggagtgtcaacgagggaaggaggctgggcctggtggctcatgcctataattccaagactttgggaggccaagacaggaggatggcttaagcccaggaggtcaaggctgcagtgagctatgattgcaccgctgcactccagcctggacgacatagcaagaccctgtctcaaaaaataaaaataaaaaaaaggaaccaccaaagaagggaggacagccagtactagtgagtcctaatgcagtggccattgagggcagctgaagcctgatcctgctggggcgtcgtgggatgggagaatggagaacacacaccacacagcatagtcatcccacctgacagggagctgaggcatttgtaacctgttggtcttggagaaaggctgcgaggagggaggtggttaattcctccacacttttgtccccttctggagaggaagcccccaggcaaagaagtgcagatgcgaggtttaggagtcagcccgcatgcactggaacggtgacagcggcatatggtgtaggggtggagggaggacaatgctgaatgcctgtgaggcatccacagacccatgcccaggtgacctcctatgactctaagaattagttagaccgggacccagcagggcagccactgggaaggcagggagctggtttacccacaacagcactggtgggattgggcaggatgggccaggctggagcccattccccacccctcagtcccaagatttcctttctgaaacaggtgtgggagttgcgtggggtcgtgttgtggtcctgtcctgcaggtcacaatgaagggacctatagacatggtggaagggactggggactccatggctgcagcttctggactgaagacacttcctttttctggcatattgaggtccccctttgttgtaaatgttggacaacctaacccaaactaggcttcagcaaaatgacaatgtattagctcctataaaagtcaggagagagttctggttcagatgtggcttgctccaggggcacaggccatttccctctctctgtagcagagttagttccattctagctacagcagcaacagctcccagcctacagagatcaagtctagcagagagggtgagccggcctgtctccccacagcaaacggcatcacagctctgactaggtcctgtgtccctcctggtacccatcactgtgcccaggaaaatgcagggggctgattggccaggctggagctgcacagcctcctttggaacatgaggataaaatccacagaaacagtgagcactgagcagggaagaaaatgattctccaactgcagtgtgggtaacctgttaccaaaagagatgggaatggacgctgggcagctaaaaacagcacatgctccctccagttggctgtgggtctgcatccaggacctgtgctctccctctgcttctccccgttttcctccaccaccaccacctcaccagaatgaatgctcaagtggccaggagagagaactcccagctgcctcaagcggcagacttgcagcagatcctggcagttggatcccccgggcagtggtgaaaactagccttccatccccggggaaatgtgtggggcgctgctggttgtcacagtgacggggggatgctgtgggctgttagtagtgaaggccaagaatgcaatgcacaagacagaccacacaataaagaaccatcccaccaaaaccccaagagcatcctcccggacagtcactgtcacctgggctcatctctcccacactggccttgcattgtggctcacgttgcctgtcgtgggccatagggatccctcttgaagagtggaaactgcacatgctaaacgaccacatgccggagtccctgtcttcatcctgccgagtgcagttctgttgacacatccgctactctgtggttaggtcctggaggcagagagcaggttttttcttctcaaatccttcccagcacattgcagactcatgaatgagtagacctgtcaccctcgggagcactttgggatacattaagatttggcttaggccattgtattcagagtgtggtataatgagtgagtgtgatattcagagtgagtataaatgtgatcactggagaggactattttaagtacagtcaatttcaagcaacagcccctgataggggctttcaagagggaagtttagagctggaaagaagagtgagcaggtatatttcctatcaatcaccatgcaataactaagactgctgtggctgtgagtttggggacagcctggctgtagctgagcctgcaagttataggggccaaggccctttgtcctctaaaggttcactgaaaactcatatgaggcaaattgattaataggagaaaggcatacacatttatgtgtacacatgggagccttcagaatgaagacccagaggtacagaggaaattgtcttcatgctgagtttcaacaaagatggacagccttgtagaaataggactggacaaaagggtcggatctaatgctaatagactatgtggggaacccagcaaggcctgtctgtctagattcttcttggcctctctgagcagcattccttcctctggggcatggggcaagatcttctctggaatgggggtcttatgactgactgcaaacaaggtaggtcagatcattttgttatgaccagttcttacacaaggctgggggaaaattcaagtaatacttttaggttttctgactagctctggggagaatgggttcttgtttctatggcatcttgggaaaggattgagtttgtatggctagccttgggggagatgggactgagagataggagggcaggagaagatcacagaaaactttcccttctgaggccttcattttgaggtattattgtctaagctccagcggagtctagcatcttcaccaggctgagctcagaccctggctctgaacattgtctcaagaccatcaactggcctggtgcagtggctcacgcctgtaatcccagcgttttgggaggccaaggcaggcagatgacttgagcccaggaattggagaccagtctgggcagcatggcgaaaactcatattttgtatttttctaaaaaaaaaaaaaaaaaaatacaaaaattagcacctgtagtcccagctatttgggtggctgaggtgggagggtcacttgagcctgggaggtcaaggctgcagtaagctgagatcgtgccactgcaatccagcctgggtgacaaaaggagaccctgtctcaaaaaaaaaaaaaaaaagaaaagaaaaagaaagccatcaatcaattggttattatgttattattatttatttatttgaggcagtcttgctctgtcgcccaggctcaatcttggctcactgcaacctccacctcccgggttcaagcaattctcctgcctcagcctcccgagtagctgggattacaagcatacgccaccacatctggctaatttttgtatttttagtagagacggggtttcaccattttggccaggctggtctcgaacttctgacttcaagtgatctgcccacctcagcctcccaaagtgctgggagcctccgcacccggtccagttggttattcttgagataggttggtccctgtatagtgatccatcgaagtgcagaagaaagtccaggaagccccatcctcctgcagctgcctgtctggtctgtccagtccactgtgccagggacacaggaccagatgagaggtccttggcttttcagatacaacctggtctccatcctccccacccccacccttgaggacagccaccctcccactggccatgaagcctggcacccaggccatcccgcagtcacagagtaagtaaataaccaggatccagggaaccaaactgccaggtaaaggcagccatgagactcaggggacacctgccatgcagcctgtcctgccaaggccccaggctcagggccatgttggagtcaatcaggcctgcagccaccaatgacccatcagaggaaggacagcacttcaggctgctattacaggctctggcttcactgggaaactcaggaagcctctccatccccaggcagctccccctctgtatgtgcaagcacagcatatacttattacacctcagccagtcacagggggtcgaagcagagatttgaactggaaaagtgcccttgccaatgtcccaagatgcattccggtcctaagccaggaggaactgagctgcgagctagcgaatgaggaggacagaggagctggaggtgcctgtttgttgggagtctggaggaaaggaggtgccaatcaccagcggcaagaaggaaagtgtccaaggcagagagccaggttggtcccagcggcagggctgagcgagagatccaggctcagactcctccaggaggggcctcgaggttgagaatttaaaaagaagagttctgttcaggtctgcgggtgtctgatctcatctgaggagtgcatcaaggagatgaatggagaagcccacttgtctcccattggggtcaggatgaagggtctgggctgaccagctccagaagaagctcacctttcgagaatgagttctcctttaaacctttctcctcctctgttctgcccttctcctgcctgccactgccagcagtcaagaatggactgtgtataccatattctggagaatctgattataccctggacactggtgtgtggattgcagtctgctgcaggatgacattagagtttagttgtttttttctaatggggctccattctgtgtgtctggtaggaggtgcttttaatgtgctgataaaccaacctcaggaaggtattatgtacagaagattcccaaggctgctgttgctgaaagagacttgggctactgccagggaactaggtgagtccccgtagctgaacagagctgcctaagagaagtggaatagaggatcatgtggtgtctgttttgtgcctttagtgatcggtgtttcatatgtatttggggatgttgctttctctgtgggaacaagcaaaagaatcgttttgttctgatgaaattaacaatgaatttggtgaaagaaacttccaactcccttgcccatctcccttcatcccattcatttggcaaaaccacaaccctggggcaaatccagttctctgcctcctgcgcacttggacttgtgcagctaaactttgggaagctcagccgtgcaggccagactcgcttgaaattcatgaccatgggctccaagtgggccttgatgctgccagggatcaaatcacattttattccccaagacgcttctcttctgtcctcagacttaccccttctcctccctgcttcaccagacctccaagactcaccaccgagtctccccacctaccagcgccctcttgagtatccatcccccttcccccaaggcaatgactgatttgattgctgtcacgacagacgcatagacacatgattttgcatgttctagaaactaacataaatggactcaatcagtttggactttttttacctggcttcttttgctcatcataatattttaaacctaaatcatatttctatacatatcaatagtttattcctctttatttctgagaagtatttcattgtgtgaatatgccatagcgtgtttatctactcacctgttaatggacattcagattggttccagtttttagatttttttttttttcttttgagaaggagtttcactcctgttgcccaggctggagtgcaatggcacaacctcggctcaccgcaatctccacctcccaggttcaagcgattctcctgcctcagcctcccaagtagctgggattacgggcatgtgccaccatgcctggctaattttgtattttcagtagagacggggcttcaccgtgttggtcagtctggtcttggactcctgacctcagatgatctgcccacctcagtctcgaaggcatgtttttaattgtactggcattttatcttggctaatttgctgtctattttattaacttttttggttagttaatatcagacataaaataaagggtaatttcttttttttttttttttgagggtctcactctgtcacccaggttggagtgcagcaggggcatgatcagctcactgaaggatcatttcttggtctaggctataggctggccttagaatcaactcacctggtgtcctattgtcagggacatcttaaccagggtgactgcacctcgaataaaggccagataaagccaaacttgctgggttacattccttgggggttagacacccttcatcacaagatgtttgtagctcaaagaaggggttaatgatgctaactagagacccagaacgtctgaaaacgtcctgatatttaaagaacaaagcatccttcatttgagaataagtttcactttaaaggtaatagtactctcataaattcttgctgaaatcaatagttacataggaaaataacaatgctaatagcctgtcacaagctgatcataagcctttgtttataaagtctactattcttagccttaacatcccatgtaagcaagtgctatgtttcagttagaggaattcctcctcttgctttctgaggacaccctattctgtaatagagtagtttctaataaactgttttatctttgctatgcactgcgactcaccctctttcccacatgaaatccaagaactcgctcttggggtctggagtaagtctcctttttccagtaacactgtgtgtgttcctggctttgaggggcatcctgggggacggaagctgcccatctggacccctcagctctgcaatcccaggtgcaagattgggacagcaacctggtggcatcgtggggctcctctggtactctgctggtctccatccttccaaaaggacacccaccaagaggctgacacaggccacagtgggagcactgggaggactgtgtgtttgtagagggtgagaatgggggagaggtgttggccaaacacttccatctttctcacagtgacctctcaaggtagccccctggggtaagccaaggaccttcagtgggctcttgtaatgggggtcaaagccttttgtaggtcgggtgttaaggtgcccttccttctcaaggctctctctgcctcttcagagcaaagatgatccagggatgggccaaagggagcaccagcaaaccctacagggagtcccaacttgggagagaggggagcaccaggaaatcctacagggagtcccaactgaggagagagggagcaccagcaaatcctacagggagtcccaactgaggagagagagagcaccagcaaaccctacagagtcccaactgaggagagagggagcaccagcaaaccctacagagtcccaactaaggtgcgaaggatggaaagaaagggagtccacctgagtggctgggactatcagcgcccgccaccacacccagctaactatcgttttggcttttttttttttttttttttttggtagaaacagggtttcaccatgttgaccaggctgatctcgagccacctgccttggcctcccaaagtgctgggatttcaggtgtgagccaccatggcccgccaggacctagtctttggaatgccaacgcagggaattaggggaggtgtgggtggtgaggcatagacagaaatgccccgtgtaccaaacagctgggctccgtcctcctgcactggccagcggcctcccttgcaggattgacccacaaggtcgtatcctagaggcaagaggaggcagcaaagcctggaatagaggcttgtggaattggaatcaggccgcatgcttaactcatgcaaagcagctccctggaaacctccagaggagaagtgactcaacacacacgtcccagaccctctgggcccctaggcaccctcggcctgcagctgtgggggcaatggaaagtgcctcctttctcttcttccccttgcattattcacagggagccacaaacacagaaaggcctcattcacaagctccaaggcctggccctctacggaaagctttctgaaaatgcaaatgtctcagaagtggattcttcttttcaaacactttaaagtggcatattcccacggagctgtgaagcagaccaagatttccctgggcaggagactccttaaaaataacatttgcatttcaaggaagcagaacttccagctgtgaagtccggcttgaaaatagaaggtgggagcctcacctctttgggcatgggcaggcgtgaagcccccactttccctgtctgtgccccatccccaccttggccttgcctcctccatcctttcattcagtgctagcttaggagtgcccatagtagccctgggtgactggggactcacaagacagaactgttgttcaccagaagctcaaatctaatgagccagacaagcctctaaatgagtcaattccacccccattccagggaccctgggcctgcctgttcccttcccccatagaaccaagaggttctgggttcagctctcctcagaggagcagatctccactgcggtgaaaagcacgggtcatttctgtctatgccccaccacccacacttccccgaattctctgccttggcatttcaaagactaggtcctggcggggcatggtggcttacacccaaaatcccagcactttgggaagccaaggcaggtggatcgagatcagcctggtcaacatggtgaaaccctgtctctacaaaaaaaaaaaaaaaaaagaagaagaaggttagctgggtgtggtggcgggcaccaatagtcccagctacttgggaggctgaggcaggaaaatcatgtgaacttggaaggcggaggttgcagtgagccaatatcgtgccactgccctccagcttgggcaacagattgagactcttatctcaaaaggaaaataaaaaacaaaggctaggtcccttccctggcttctgactcaagcctgcagccaggccttctagggggcccctcccacccctggaggcttcccctggaggagcgggtgccctctcctctctcctctcaggcatcagataggattcaagctgagataacccaggaaaacaacagactccttctctcctctcaatagctttcccattcaccatcaagacatcactcagttaaaatgtacatttccccaccctgatgatacaggattttatactacatatttgttgtctgctttttttcccacttctcaaagaaatctttctatgtaatatctcatttttaaacagctgcatggcgttgcatcatatgcctgtttcgtaattgatcaaatgagattctacagagcttaccttagtgcccatggtactgctcaaagaatcctggctacgatattagttagacccatttacagggagtggggaacctagctccatctggcttagacaataggggaacttaatggtttatgtaactgtaaagtctaaagataacacaggctttggggagagcttaatctgacatgctcttttctttcccactgcccccctttgccttccgtggtatcagcttccctcccctttggttgtaagatggcagagcctggcacagagccaaaagcacccacgggtacaatgggactttgtctacatccggagagagtgcccacaagcctgtgaatttcccagcattctgagcaagagtcctataattcactctaattggaccaactcagttgacatccccaccaatgactgggccccggggaactgggaatgtgttgactggctgaggccatgtgggggccacctaggggccacctgtgagtcagatttggattagcttcccttgaagtgagtaggctgtgtgagagaaggcagaatatccgaatgaaaattacattattttagtaaagaagtgtgggaaaccaaaatatgccacccaaaaatattccttggcatattttgggatggctattcagaggggctgcagacacaggatagctctggaaagctgtgtttttgtggggagttttgaatctgtagtagaaatctacattagtgaagtaaattgtggatgcaaacaggcttcctctgagacccctttatctgccttatccagatctctcaggagaaggagattagaagttctgacacttttaaaggtctgatagagaaactttttttttttcttttagacagggtctcactctgtcacccaggttggagtgcagtggcacaatctcagctcactgcaacctccgcctcccaggtttaagccgttctcctacctcagcctcctgagtagctgggattacaggagcacaccaccccgcccagctaatttttatatttttagtagagatggggtttcaacatgttggtcaggctggtctcgaactcctgacctcaggtgatccgcccgcctcagcctcccaaagtgctgggacaacaggcatgagccaccgcacccatcatgacggagaaattttaccacaagctgccatctgaactcatattgcaggaagaaagactgaagtttgtcaacacactggacatctctactctttctgcaggctgttgcttgtgagccttcatctgcataataagaaaaccttagctcaccatgcatctcctcccctctccttcccataacctattgccacctcccccgagatgctccaagtctctcttcctttccatatggtatagaaacttcagccatttggccctcttttagtctcatagtttgtgtggtccctatgcacatgttcttgttaatacatttgtgtgccttttctcttatttatctattgcccatttatttcagcagacttaaagactcaaaccttcagcaggggagggagagatattctacaccccagaatcaaggaatgctgagaaggccatcaacacatgtctgttttcagtattggtttttctttttttttttgaggtggagtcatcttgctctgtcacccaggctggagtgcagtggcataatctcagctcactgcaacctccacttcccaggttcaagcattctcctgcctcagcctcccaagtagctgggattacaggcacgtgccaccacacccagctaattttttgtatttttagtagagatggagtttcaccatgttggccgggctggtcttgaattcctgacctcaggtgatccacccgcctcagccaccgtgcctggcctgatttttctttttctttttttttttttttgagatggagtctcactctgttgcccaggctggagcgcagtggcacgatctcggctcactgcaagctccgcctcccaggttcacaccattctcctgcctcagccccctgagtagctgcgactacaggcgcccgccacaacgcttggctaatttttttttgtatttttagtagagacggggtttcaccatgttagccaggatggtctcgatctcccgaccttgtgatccgcccaccttggcctcccaaagtgccgggattacaggagtgagccaccgtgccaggcctcgatttttctttttttaactattctcctactaacagatacttaagtttattcaatctcacttttttttttttgagacagagtcttgcactgttgcccaggctggagtgcagtggtgcgatctcagctcactgcaagctccgcctcccgggttcacaccattctcctgcctcagcctcccgagtagctgggactacaggcacctgccaccacgcctggctaatttttttgtatttttagtagagatggggtttcaccgtgttagccgggatggtctcgatctcctgacctcgtgattcacccacctcggcctcccagagtgctgggattacaggcgtgagccaccgcgcccggcccaatctcacttttataagtagtattgcaatgaacatccttaaacacatatttttgccaaggattccttctcagtgccactctcctctgatttccagaccccctcaatatcctcctcagatttgccctgcacttcttgttccatgcttggggtcctaagaacaagccatctgatgcctctactatcattacctctattgggacccagaaaccaataccccaaaatatggtgcatggacatgctgaactgaagaagatgcctcaaggcaagttctctctggcctccccactcgactccccaccccactctctatcgtttgtctctctcaaaacacaggatgaagttgttctctgaagttcctttatctacctaaagtgtggacataccaaaggggaaaaaaaaaaaaacagttacctctggtcccatccttgagttttcattaactgaactcatatctcaggaagaaagaataaagtctgtcaacacactagatggacttttttttcccacaaaccattgtatctgctctgtgggcccaacagacttggtcccaggccacagtatattcttcaagcacattgaattcccctaaaaatcatttgctatccccctaaaatcatccacacttccccatcttcctttcccctaaaaagaaggttatataagcatctgcaccccattgggttaatggataattattctcctgcaattcccctatgctatgcatattaaaataaattcatatgccttttctccaattaatctgccctctgtgagttgatttttcagtgaactttcagagggcaaaggggaagtttttcccctggcccttactttccatagcctgagtaaggaagacagaaatgagttaggaggccttctctcttttttttttttttgaatcggagtcttgctctgttgcccaggctggagtgcagtggtgcaatctcaactcactgcaacctccaccaggaaggccttctaaaattgggaaatccaaggctcagttctcactccacaatggccaactgtggcagtagagtactcaactagggccagaaattctggtgagataccttccttggcccacttatgtgtctttaaactaattatttgctctttcctttaaagcaggcacagccttccaagaggttgtcttggcatcaaataaattacttttcctgtgtcccaccaatgggaaaatcatggaagtctccagaaatatgactgtagtgaatgctgtagtgtgctacccagatcaaggccctcatttccccagatgccagagtgctggctgtttgtagttatgcctgtctctgggcattgcccttggctaaagtaagctgcctcaccccaagatcacaccgcttccccagaggcaacatgaatcaatgacaggaccatgtaggggtaaaaaggcctggaaaaagtcttctcaaaattcatgtctcattttgagaagactctgaaagatcatcccatgatgttttttatgtgtttcagttacctaccgtcacataacaaatcacgccaaaatttagtggcttaaaacaaaatgatttgttatttttcatgattctatggattgatggggctcaactggctgggtcttctgctctaagcggtagagatgaagttactcatgcaaatgcattcagttgggagtttggtgggaactacagcacccaagattaattgcctctcatcctctagagtctctctctacattgccttcattgttcagtagtctaatatgggctgctttatgtgtcacagctgaattctgaagagtgtttcaagaggacaagccccactggggggcacttatcaaatctctgcttgcatcattctagctgatgtcctgttggccacaccctgagttaacacagaattatataccggaagggatagttcactggggctactaatgtaacaacctaccattgtctgccctctgactcttaataattcatatctgcttgcaaaatagggtcatccctaaaggcaaaaacagaacttccaaagtatctttctgtgacaacattaggttcaggcttgaagtccctgatttcgccatcaaagtcagatccaggggggacgatgctattcaggtaaggttccccaagtgttgttcctaggagcagagacctatgaactaaaaagaccagttatctactcctccaacacctgaaaaatactgtagagccaggaaaactgcaatactctcattcaaaaagttgaggagacagggaggcacataataatcaccagtccatagctatttttaagaaaaatatttttgtgtactaatgtaattgcatcacacaaattttggacctttatttttacttttattcaactaaacatattccataatgtcacttgtgaccgttttttagacagggtcttgctctgttgcccaggctggagtgcagtggctcaatcacagctcactgcagcctcaacctcctgggctcaagtgatcttcacgccttatactccagagtagatggaacgacaggtgcacaccaccacaactggctcatttttttaaatttttttgtagagacaaagtctcactatgttgcccaggctggtctcgaactactgggctcaagcagtcttcccaacacagcctccaaaagtgctgggattacaggagtgaaccaccgtgcctagcctattaaaaaaaaatttttttggagacagaggctttcacttatcacccaggctggaatgcagtggcccgatcacagctcactgcagcctggacctccgagcacaagtgatttctgcacctcagcctcctgtgtagctggaacttcaggcatacgccaccacacctggctaatttttttttttttttagtagagacaaagtctcactatgttgcccgggtggtcctaatctcctgggctcaagagaacttcctgcctaggcctcccaaagtgctggggttacaggcatgagccaccatgcctggcctgagcagtgcacttttaaataacctgtgggacaaattaaaaagtggcaaggcctttttaagtgttctggaactgtgatttcagctactccggaggctgagttaggaggatcacttgagcctggaaggtcaatgctgcagtgagcagtgatacagccactgcaccccagcctgggcaacagagtgagaccttgtctcaaaaaaaaaaaaaaaaaaagaaaaaaagaaaagagaaaagaaatatgttgctcaatttccacatattcaggaatttctagatatcatattgttattgatgatcaatttaatacctctgtgattgattactaatttaatacctcagaaaatgtactctgtgtattttcaatcctttgaaatttattaaggtttgtttattaagaggaccccgcatatggtctatcttggtgaatgtgcatatgatctatactggtgaatgttctatgtttttttacacagtctgtcaatctctgtctcttacataaaagtatttaaggccgggtgtggtggctcatgcctgtaatcccagcagtttgggaggctgaggtgggcagatcatgaggtcaggagatcgagaccatcctggctaacacggtgaaaccccatctctaataaaaatacaaaaaattagacgggcgcagtggcgggcacctgtagtcccagctacttgggaggctgaggcaggataatggtgtgaacccgggaggcggagcttgcagtgagctgagatcgcgccactgcactccaacctgggtgacagagcaagactccgtctcaaaaaaaaaaaaaaaattttaggtcattgatattagataactattactgtatggtcgggtttaccatcttggtttggttttctatttgtctcatgtttcttttttctttgcttgcccttcttgctcttattttgggtgaattggatatcatgtagtatgccattgacttcatttattaaattttagctcagcctcttggtgttgcttctagagttttctctagaaattgaaacatgcatctttaacttgtccatgatactaaactccagcctgcccgtcagcatatcccctctgcctcccatgtgtcacctccactgtggattgtctgtccctcgtccacaccatttctccagtcctgggatctgttcctgcatgcattcgcctaccagatacacacttatcgagcaacacactaacgcaggaagaatgtaccaaaaaatagaaggagagttggctccttccaccactagaagtgacaagtgacaaggcaatttaatcattaactattaactaaaagaccaatttgagatgatgctgttgatgtaatattattataaggataaagccaggccgggtgccgtggctcacgcctgtaatcccagcagtttgggaggctgaggcgggtggatcgcttgaggtcaggagttcaagaccagcctggccaacgtggtgaaaccccatctctactaaaaatacaaaaattatccaggcataggggcacacactggtaacctcagctactcaggaggctgaggcaggagaatcacttgaaccaggaagcggaggttgcagtgagccgagattgcaccactgcactccagcctgggagacagagtctcactctgtctcgattttttttaaaaaaggataaagccagcccctctctttcactcttccaccgtctcacaagcattcctggtcagatagacctaaatgtaagcattgtgggctactgcacaaaaagatcacccgggtgcagctgcagtcattgaactagaaaagccggaaagatcctgggtgatgtggaaccaatattccacaccggtgcatctgaggatgctttaacagcatcttgaaataataagaccagtgcacagatctatatttgtaaggatgtgcacagaagtgccttttataattgcataaaagttcattttattagggcactgattagaataaactatggttaatcatatgcataatactattcagccttttgaaataatgatgttggcctacagattacatggaaggatatccagaatgtgtatgtccagtgagaaaagcaggtcactgaacactatatactgggtgatccggtttgtataaatgtattatgggcaatgagatcacagtataaggcgtacagtatggatgacatctagttttgaatcctgctatattccaggacataacacagtgattaacagattaacacatagtagtttatcaataaatatttgttgaatatacacttaattaaaaatctggactgctaaccccctagttactagtaataggaagatgggtgataattttttcttttttaatgactttaagttttatttttttctacaagaaacgtgctgagaagaggactgcaatgactgctttcaaaaaacaccagaataaatacatacgtagtgtaagcaagcgaccactgttgtatcaaaagccctttgttgtatctgttggtggcggaggcagccagcggttaactgaggttctactgagctctgtggaccacagagttgtcttctcaagtttgcttctagggacaaattagtgactttatgatgtcaatctgtcccaagtccatggccaaagagaaaaaaataatgctgaaaaagtcaaaattcttagaattcttagagaattataaaactgcataggggctgggtgtggtggctcatgcctgtaatcccagcaatttgggaggctgaggcaggcagatgacctgaggtcagggatttgagaccagcctggcccaacatggtgaaactccatctctactaaaaatataaaaattagctgggcatggtggcgtgtgcctgtagtcccagatactcgggaggctgaggcaggagaatcacttgaacccaggagatggaggttgcagtgaactgaaattgtaccactgcactccagcctgggcaacagagtgagactccgtctccaaaaagaaaacaaacaaacaaaaaaaactgcacaaggatatgaatttctgaatagatttctgagtcacattccactatccagagaataaagataagttcataattatggtgtccagtatcaagtacataccagaaaaagactttttaaaggatgcaagtagataacaatcatgcctacgctcaatcactaccctagtgtagcatcttctgagacagagtctcgctcagtggccacgctggagtgccgtggcgcgatctcagctcactgcaacctccacggcccgggcgcaagcaatcctcctgtttcatcttttcaagtaattgggactacaggcgtgcaccaccacttccagctaattattgtatttttagtagagacagggttgcaccatgttggccgggatgctctcaatctattgacctcgtgatctgccagcctcagactcccaaagtgctgggattacagacgtgagccactgagcctggccgatgacaattctttctaccacagtaaacacaggagtggtaacaaaatgattattctcagactaaaatgaaaacttaaaaccaaataaaatccctgagcttccaggatcagagaatggcacagagagcagtataagaggccaggagaaaatataagattttaaatattttatgtgtacctttctttttattttcgactgactaaaaaataaaggaaaaatatttaagttaactcacaaaatactttttttaaaaaaagacatggaggacattaggaagaagggaaagaaaattaggtcgaaagaaataaagtgaatccagggatgagattaatacacaaaatgtttgccttgaaagtcctttacacttgctagatatgggtcacaatttgactcagcttcccagcagcctatgcaaagaaaaaacaagaccagctgtattactcacaatgtccattggataaaaacaaatccagtgctcagaagaagacaaattccaagaccagaaaggtatttcttccatgtgtttctatccaaatggcctgtgtcacgtagtaaacaaggccctaaaaccatctttacagtaaacaaaacaatgagtacctcgaggattgttaacctcccttatttaagttaacacattaacccatgtgaatgtaaataaagcaatcctacaggggtggaaagcatggggtcatccaagctgccatattcaatcccaaaataaatgctaatgaggaatggagctctctcgtgcatgaatgaatatgtgactgcccatgatattgtgatacaataaaaaatatatatttagtcttcatcccacgttcctggcacagagctcctaaaacccttggaatttctgagtgataggagtgaggagtatttgttacttatcataagccttcttcaaccaaacctgagtttatctaataagctgacacttggaggctggggctgatggccagaggaaataaccatgtattttaaagggttggaactttcagctcctttattccccattcccctgacccctactccccaaacacccccacctccagagagtggagaagggctacagattgaggtaatcattaatgaccaaagatttaatcaatcatgtctacataatcagaacctctataaaaaccccaaacgggccaggtgcagtggcttatgcctgtaatcccagcattttgaaaggctgaggtgggaggatcacttgaggtcgggagtttgagactagcttggccaacgtggcaaaaccctgtctctactaaaaatacaaaaattagctgagcgtggtagccttcacctataatcccagctacttgggaggttgaggcatgagaatcacttgaactcgtgggatggaggttgcagtgagctgagatcatgccattacactccagcctgggtgacagagcgagactctgtcaaaaacaaacaaacaaaaaaggcatttggagagcttctgggtgggtgagtatccattctgggagagtggtgcactccaacttcataaggacagaaactcctctgctcgggagcctgtgggacctttccctttgtacctgctcctcacctggcttccatctgtgccctttattgtatcccatataataaccagcaaacacaaattaagtgcttccctgagttatgtgagctgttagaaccaattacggacctgaggaagggttcataggagtccccaatttgtagccaagtcagacagaagtgtgaataacctgggggcccactatttgagattggcgtctgaagtggggggcaggcttgtgggactgagcccttaacctgcatgctttgatggaactctagtttgttcatgctagaattgaatcactggacacccagctggtatcctcagagaactggagaatttcgtgatatggaaaagccacgtatttggtgccagaagtgctgtgagtagagagcacgctttttctttgtactgccatggagacaagtcttcctaaatgtttcttcaattcgaccaaatgtttgctaagtattgaatagcagtgagtttgaggttgtggctctgatctaacaaggatccagaatattccacattgctggttaagtgtaaatctcaatgtttgaatagacagctgcgcagggttaacaacctcttctgaaattcaaggggcccaaatagaggccaccagaacccccacagagcggggccaagcaggacccagacaggccactccagtttcaacttcagactcacacacaaatgactgggccccaaattcttgtatcagtgttcctgaccttttcaggttcaggaaatatttttaatgctccccatgtgtataatagtaattgtactgttggaattggttgactgaaaaatatacacaatggccaggtgttgtggctcacgcctgtaatcccagcactttgggaggctgaggtggacagatcacttgaggtcaggagttcgagaccagcccggtcaacatggtgaaaccccatctctactaaaaatacaaaaattagccaggcatggtggtgggcgcctgtaatcccagctactcgggaggctgaggcatgagaatcacttgaacccaagagacggaggttgcagtgagccaagatcgcaccactgcactccagcctgggtgacacagcgagacttcatctcaaaataaaataaaataaaataaagtgtacacaatgacagactccttgttaaaatttatgcatgtaataaatactcattgtagaaaacccaaccacacaaaaatcaaagattttttttaaatcaccattttgcttacctggtgcccagatagatatcattctattggagtgggaggtcttttgggcaggtggggtgccagggtctatctacttctctctaaggaagccaacagggaatcaaatattctctcttccaggctctttataactagtacatagtcatgtgatctgagcttagccaatcagatgctcctgccaagggctttggattgtgaggaagtgatgcaaaggccctgtggtcaaccagagatttttcacaatggctgcagcagagtcaagagtccaataccatggtcctgaggggccagcagcaataatgccagggccagcatcccaagctgactgttcttggtctccctgattccagcagaacatcccagtggggattctttgatatgtcccttgaattaagtggctgccaggtccccttgagaaaagaccatgtgataacatcaaaaaaatattctctgttttagcccttcctttcccacaggggaactgaccatggaccagggaaactacagtggggaaagggatgatccagacctttgagggggtttgggacagtaactgtaaactgacacagaccccctggggaacagaacactactgacaaatttgatgggattcctgttcatggtaggcctgatggaatcctgaacccatcacttctccagtgcctgggtgtagagttggaatagatcccctaagctacaggtggaatctccacactggctctgtgacccaaaaagtaagggctattatgacagagggagcaaagggaagcccttggaccctccccagtcccttcaacaaaatagcaaatctagaggaacactgcgtccctgctgggaacacagatgttgatatcactgtgaatgagtcaaaaggggtgggtgtgtgtgtgtgtgtgtgtgcgcacgcgcgcatgtggaggcagtgggtgattcccctcacagctctacgtaagtctcccgtcttctggccagtgcagaatggtggctcctggaggggtggacagcagcacattgtctgcatcttgctcgtgggctctgtgctgggtggaccttagccacctcaccatcctgcaggacatcgtgctggtccactgcactgaccgtatcaggcctaggacttggtgaggtgccttagatgctccagaagttacttatattcaccaatggcctccttatggcttccaataggaaataagtgaacgggtagattaattactcagtgttttatacaaatagattggacaaggcttggctcttaaagacagcaatcccaaatagcggcaagctgtttagcttttttcttttctactttgtttaatatattttctaatcaaagtatgtaataatatgcataaatttttttttagggcaagtagaacagctttttacaatggaaacaaagccgcctcctggttttccttccaactctgagctccactccaaaaaggccaccgcttttttaatgtaaacttgttattaaggacataaatcataagtgaccagctcaatacatttttacaaagtgaacacacctatgtaaacaacacatacttttaacaactcaggtttgagtttttgggtggttacttccatgcagcaaaataagatcctcatgtactactttatttattttagtagtattattattattatcatcattattattttgagacagggtcttgctctgttgcccaggttggagggcagtggcactatctcagctcactgcaacctctgcctcccgggttcaagtgattctcctgcctcagcctcctgagtagatgggattacaggagctcaccactatgcccagctaatttttgtagtttcagtagagatggggtttcaccatgttggccaggctggtctcgaatttctgacctcaagtgatctgcctgcctcggcctcccaaagtgctgggactacaggcatgagccactgcgcctggccttaactttaataaacctatttttgagtagacagttcattcctgtggaacaaaattcaaaacaaacaaatggataggcagtgttaaatgtccctcccacccataaatcttaacctgtcatttccctttgtcagaagccatcctgttaccagtagcttggatttccttctaaaggcaatctattatttgacctattttaaatattttatttaataatttatgtcctatctcaatataaaacaatttaaggaagatgttgggttatacaatttgaagggcagaattcctctcaaagcagtgaaaactgacaacaccaaagaagtaaggtgttcactgagcttttccaaatatcgttaacaattcatagaaagatactaattcttttggcctttccctcatggtagcaagatggctgccatagctccaaatatcaagtcttcacacaacattctgtgaagcaaggaaggtgatggccccaaaagggcctgtcaacttccctagtcagggaaggaaatctttcctggaaatctctccttgtcttggactggctagaagtgagcagcatgcccacctcaagaccaatcactagcaatgaagaacagttggcttcatctattcacgcttcaacccctgaggctgggtccattgcttttacaccaaaatcagggctcagtaagcatgagtggccaatgagcagaaaaccaacagtgtctgccacagccagtacctttgtcctgtcactgtctaaacctgaaaaccaatctaaactaagttgttaatcaggccatggaaataaatcaaccttggaagagaatgatgatagcataccttctagacctgtgctgtccaatatgggagccactagccacacgtgccatttaaacttaactttacattacttaaaattaaacaaaactttaaatgcagttcctcagtcacacaagccacatctcagctgttcaatagcctcatgtgactagtggctactgtactggatagcacagatttagaacaatttcttcattgcagaaagctctactggcaaccactgcctgtccatctgccgctaccactgataagaggcttctctaaagtggtgaagcgagagtttctctaaagtggtgaggtggtgccaccttagtgtcattagcaacaccgccatcatctttgtccagtgcaacctgaaattggtaagctgaacatcctctagccagtgatcacagaagctccctgtcctgcagagtcacgtcagggtcagtcacagagctctgacaagatctggtgcagaggaacctcatgtttccatgcactcactgagcccatcttcctgaccgggttcttgatccacccctctgggaaagagaggcactggccaggagctggcttgggcaactaaggttatcataagattattttaatggtcaccttgttctatatcaggcacctcatgaacgatgatcatgaagtcacccactgcccattgccccaacacttgcacacttcctattttttcatcagccggggaccgaggagctgcagaaagtgaacagaatgagacatacaggtacaggggcagggcgtctgtggtgggcaccggccctcatgcccaccccacagatacagctcacattgtatttgatagtctataaaagggcacctgctctgagacttgggggaggaataaggttgcctccagtaataactgctctttgctccactttaacctcaatgggcctgacagttgaggtgccagcttgggtgcagttggtgcagccctgtcctgggggagggaaaggccaaccagggtcccattcaactcttagagaccatggtttcttcctggccaattttggctggtgccattctcccaggaggggaccttgggagacttacactgaagctctaacttgatctggcccagtagatttgaaaggaggcccaaattgagtggcttcgaagtcaccatatgtccttgctgcacaaatgagctgctgttctcctcctcacccctactggggcctcagatgctcacagatccccacgaagtcaccttgcagctgtggccaccaaggtgacaggtgtagacactctccccacagttatgtgccaggtgttggctgacggaggactgcccccactgtgatgccctcagccagtacaggtgtgtcctgggggcctgcctgcccctcctcctggcaccactgactagtccagggctcagcaggagcatgataggcactgaagcctggtctctgcccgtcagcatttcctgcaggcttcttcaatcccatttattcctagtgttccattattggaacgctaagcatgtgggagttatttatttcctgctgctcaaggtcattgccaaggtctgatttttcacacatgtctgcaattcaaaaaattgcaacctcctgcataagtgggttaacaaaccttcaccagacccctaaagttcaggcgaaattgagatatttgacccccataagaacaccagctggcacagagatctgcattcctggtgccctcatgggaaccagcctgggcctggcagaggaggaaacgaagtcccagcacaccagcgagcaggcctgctccacctcaggggcacccagcacttgttagacccagtttcaagtttccagcccctcttcccacctcagcctctttcctccgtgggtcctgggggctcctccaatttcctttccctctgaggtcttcctcatgttaaagatcttcctccctccacccagctccccaggaagccagaaagtctccccaggtccagccttccttttagcccccaaatcaaacatcttagggaaaaagcggaaaagtacagggagagaagagaggaaggaaaggaaagaagagagaaagggggaggtggggagaggggaagcggggaaaggaagaaagaaggagaggagaatagggtgacagagtgtgagtaaagagggaaaaggagctggcaagcaactagagggagattactccttgttttccaaaccaacactttctggtcacttttttttttttttttttttttttgagacaagtccttgatctctcacccaggctggagtgcagtggcacaatcacggctcactgcagcctcgacctctcgggctcaagccatccacccaccccaacctcccaaggagtaactgtgactagatacacactgccatacccaactagctgtttgatttttgtttgtttgtttatttagggatggggtctcgctatgatgcccaggctggtctaaaactcctgggctcaagaaatccttccacctcagtttcccaaagtaccgggattacaggtgtgagccaccacaccagtctcttatcacttgattcccaccaaattctgtttaaatgaacatgaagaggtaaagtatttcaaaaatcccagtttactttatatcttcattgaacaccagagaaagaagaagtccattaattttatgatgtttttctaaggtgcggtgggagaggaggaagaaatattcttggcatcttgcctttttttaaaaaaaaaaaaaagatctttgcagtttcctgttaatttaataccagaacctttgctgtgtaaataacacagataaagataaactttactggccctggactccaaccttcgtttaacattccacccccctctgatccatcccgcatcccgcctatggaaatttgtaattagttgtggagatttagaggctgagaatatatagttcaggaggcagagcatgttggttttagacaagccttgtaagaatgtgctaaaaatcccagtatacctgacagtgcttctctagaacttgtctttctctcttcctcagaggtgacctggatggggttaattccctttctggtcaacttgtaggtttcaccctggctctgccacccaccctcccagtttattatacccacttaggctgtgctttgctggcatggccttgcactgttatttagacaagtgatttaatccctcttacttgctattattgagcactcttagttcctctttttttttttttttttttaagatagtctcactctgtcacccaggctggagtacactggtataatcttggctcaccgcaacctccgtctcctgggttcaagcgagtctcctgcctcagcctcccaagtagctgggattacaggcacacaccaccatgcccagctaatttttgtattt

SEQ ID NO: 11 - DNA, 555 bp, Homo sapiens
caggagggagccgggagattacgcagctccatgtaggtccacgtttaggttgggaggatctaccatgaagaaggtcaagaagaaaagggcctctgattcgcgccggcccgcattcctgctcctgtgccacttgcccctgcagctccgcttgctggcgtcgtctggggctatgccatagccgcatcttcgatgtccttctgcctcgggactggcagatggcgccagggagaggactccccaacctgctcaccttctacagaaaatcttcaagaaaaccctccagtcatcgtaacgcgtgtcctccaagccctcggaactgtggctgtggctctgggggctctaggagctgcctactacatcactgaatccttgtgaacaagcccctaggcccacagtctggcaggaggtgcttttaatgtgctgataaaccaacctcaggaaggtattatgtacagaagattcccaaggctgctgttgctgaaagagacttgggctactgccagggaactagaaacgtgctgagaagaggactgcaatgactgctttcaaaaaaca

SEQ ID NO: 12 - protein, 98 aa, Homo sapiens
RRSRRKGPLIRAGPHSCSCATCPCSSACWRRLGLCHSRIFDVLLPRDWQMAPGRGLPNLLTFYRKSSRKPSSHRNACPPSPRNCGCGSGGSRSCLLHH

SEQ ID NO: 13 - DNA, 546 bp, Homo sapiens
caggagggagccgggagattacgcagctccatgtaggtccacgtttaggttgggaggatctaccatgaagaaggtcaagaagaaaagggcctctgattcgcgccggcccgcattcctgctcctgtgccacttgcccctgcagctccgcttgctggcgtcgtctggggctatgccatagccgcatcttcgatgtccttctgcctcgggactggcagatggcgccagggagaggactccccaacctgctcaccttctacagaaaatcttcaagaaaaccctccagtcatcgtaacgcgtgtcctccaagccctcggaactgtggctgtggctctgggggctctaggagctgcctactacatcactgaatccttgtgaacaagcccctaggcccacagtctggcagacctccaccagccccaggagttgataggtgatggcgctgggagaagatgttcagaatatctcaaaagccaagtccagaagatccagtttccatcaaagggacctctcttgtcaccaaaatttaaaaaaagaaaaaaaaaacga

SEQ ID NO: 14 - protein, 98 aa, Homo sapiens; identical to SEQ ID NO: 12

SEQ ID NO: 15 - DNA, 855 bp, Homo sapiens
agctggaggcccgagccaggctcctagggcagagggcaaacggcccctccaggagggagccgggagattacgcagctccatgtaggtccacgtttaggttgggaggatctaccatgaagaaggtcaagaagaaaaggtcagaggccagacgccaccgagactccacctcccagcatgctagctccaattccacctctcagcagcctagtcctgaatccacaccacagcagcctagccctgaatccacaccacagcattccagccttgaaaccacctcccggcagccagcattccaagcccttccagcacccgaaatccgccgctcctcttgctgccttttatctccagatgctaacgtgaaggcagcccctcaatccaggaaagcagggcctctgattcgcgccggcccgcattcctgctcctgtgccacttgcccctgcagctccgcttgctggcgtcgtctggggctatgccatagccgcatcttcgatgtccttctgcctcgggactggcagatggcgccagggagaggactccccaacctgctcaccttctacagaaaatcttcaagaaaaccctccagtcatcgtaacgcgtgtcctccaagccctcggaactgtggctgtggctctgggggctctaggagctgcctactacatcactgaatccttgtgaacaagcccctaggcccacagtctggcaggaggtgcttttaatgtgctgataaaccaacctcaggaaggtattatgtacagaagattcccaaggctgctgttgctgaaagagacttgggctactgccagggaactagaaacgtgctgagaagaggactgcaatgactgctttcaaaaaaca

SEQ ID NO: 16 - protein, 220 aa, Homo sapiens
LEARARLLGQRANGPSRREPGDYAAPCRSTFRLGGSTMKKVKKKRSEARRHRDSTSQHASSNSTSQQPSPESTPQQPSPESTPQHSSLETTSRQPAFQALPAPEIRRSSCCLLSPDANVKAAPQSRKAGPLIRAGPHSCSCATCPCSSACWRRLGLCHSRIFDVLLPRDWQMAPGRGLPNLLTFYRKSSRKPSSHRNACPPSPRNCGCGSGGSRSCLLHH

SEQ ID NO: 17 - DNA, 847 bp, Homo sapiens
agctggaggcccgagccaggctcctagggcagagggcaaacggcccctccaggagggagccgggagattacgcagctccatgtaggtccacgtttaggttgggaggatctaccatgaagaaggtcaagaagaaaaggtcagaggccagacgccaccgagactccacctcccagcatgctagctccaattccacctctcagcagcctagtcctgaatccacaccacagcagcctagccctgaatccacaccacagcattccagccttgaaaccacctcccggcagccagcattccaagcccttccagcacccgaaatccgccgctcctcttgctgccttttatctccagatgctaacgtgaaggcagcccctcaatccaggaaagcagggcctctgattcgcgccggcccgcattcctgctcctgtgccacttgcccctgcagctccgcttgctggcgtcgtctggggctatgccatagccgcatcttcgatgtccttctgcctcgggactggcagatggcgccagggagaggactccccaacctgctcaccttctacagaaaatcttcaagaaaaccctccagtcatcgtaacgcgtgtcctccaagccctcggaactgtggctgtggctctgggggctctaggagctgcctactacatcactgaatccttgtgaacaagcccctaggcccacagtctggcagacctccaccagccccaggagttgataggtgatggcgctgggagaagatgttcagaatatctcaaaagccaagtccagaagatccagtttccatcaaagggacctctcttgtcaccaaaatttaaaaaaagaaaaaaaaaacgag

SEQ ID NO: 18 - protein, 220 aa, Homo sapiens; identical to SEQ ID NO: 16

SEQ ID NO: 19 - DNA, 674 bp, Homo sapiens
agctggaggcccgagccaggctcctagggcagagggcaaacggcccctccaggagggagccgggagattacgcagctccatgtaggtccacgtttaggttgggaggatctaccatgaagaaggtcaagaagaaaaggtcagaggccagacgccaccgagactccacctcccagcatgctagctccaattccacctctcagcagcctagtcctgaatccacaccacagcagcctagccctgaatccacaccacagcattccagccttgaaaccacctcccggcagccagcattccaagcccttccagcacccgaaatccgccgctcctcttgctgccttttatctccagatgctaacgtgaaggcagcccctcaatccaggaaagcagaaaatcttcaagaaaaccctccagtcatcgtaacgcgtgtcctccaagccctcggaactgtggctgtggctctgggggctctaggagctgcctactacatcactgaatccttgtgaacaagcccctaggcccacagtctggcagacctccaccagccccaggagttgataggtgatggcgctgggagaagatgttcagaatatctcaaaagccaagtccagaagatccagtttccatcaaagggacctctcttgtcaccaaaatttaaaaaaagaaaaaaaaaacga

SEQ ID NO: 20 - protein, 164 aa, Homo sapiens
LEARARLLGQRANGPSRREPGDYAAPCRSTFRLGGSTMKKVKKKRSEARRHRDSTSQHASSNSTSQQPSPESTPQQPSPESTPQHSSLETTSRQPAFQALPAPEIRRSSCCLLSPDANVKAAPQSRKAENLQENPPVIVTRVLQALGTVAVGALGAAYYITESL

SEQ ID NO: 21 - DNA, 561 bp, Homo sapiens
gtcgtgggcaagtctaagcagaaagtgtattgaatctgccaggttgaccacctgtttcatgcagcttagggtcagaagaatctgtagctctgtcaagaagacgcagggctacagataggaaacaggagggaataatccagccagaaattatcttgcccaaccacagagggcatcatctacattctgctgggatccataccagaggaggacagaaacagaaaataggatcgggactggaaactagagctgtggttgtcttctggatggatcagaatgctctagatcaatggaacgtggcagctccaattccaggaattcatcgtaacgcgtgtcctccaagccctcggaactgtggctgtggctctgggggctctaggagctgcctactacatcactgaatccttgtgaacaagcccctaggcccacagtctggcagacctccaccagccccaggagttgataggtgatggcgctgggagaagatgttcagaatatctcaaaagccaagtccagaagatccagtttccatcaaagggacctctcttgtcaccaaaatttaaa

SEQ ID NO: 22 - protein, 114 aa, Homo sapiens [sequence omitted]

SEQ ID NO: 23 - DNA, 393323 bp, Mus musculus
  misc_feature (1)...(393323): n = A,T,C or G
atcatttcacatactgagaaacagtctatttagatgttttaatgaatcaaaacttattatttgaaagcatagctatatgtacagggttaactcttcttgttccctaaaattctctcctcagtttgattgaaagtttccatggcccttaccatctctttcgtttcctgttacttgtgcatttaagaaagttaacatagatacgtacatttgtatttcattgttaaaacaaatttaaaatcacagagtttatcctaaaatcgaaattcagtgatattaaactctagtaaacttgagtgaccaaacttcaaacacttaagatagtttgtgcagagtggtgggaatcaggggcacactgataggcttcggtgagcactgtggtgttgactacatctgcattaaacacagttgtacagacaaacatgaggtgtttgtccatcaataaataacattctcataataaaaaataagatatttctaccctttcaagttattactaagatgggctttgttgtctcatgcttatttttgttaggatacaaacaaaagtattaaaaaattaaaagcaattaaaacgcacctcacatgctagtaaaattccatggcctatgtaatgggtccagccgacttgtaaacagatcactacagcgtgcctttaagacaagtttgagcatgctgctcagggaacacggaggaatgagcagcaattagcctggagacctgaacacttattggtatgtttaagaggagagattccagataagcaccgaggagacacctgagctttattagggattatatagtttacttttctcattatcactttctcttcccgttggaacggcaaaacctttgtgaattaggcacacagcctcttaggtatattcaggtttccactttcagaagtagatttcctgaatgcagacaaactcaggttattctctgtcccttatttctagttatacacattcacatacatgtacacatacaagttgtacacattcacatacatgtacacatacaagtctgttgtttgcatcagagacttagaagaagccgccccgggaccacatttttatgtgtgcatagggcagtgcataggcgagcaatgtcgtccatcatagaggataaaatgctatgggagcgattcaaagtaaaaaccatttgttattttagaactggggaaactgcgatgctgttttcttgctctctgtatcaggcggagccattgctgttggatgtgatttagtgcaaaatgtcagggagctctgttttccctgtgatctttcccaaggttgttgggagagaaagactgtttactcccaggcccaagagttgtcttttatctagtctgcctggttatcatccaccaagcaattatgttactgactagcttagtgaaacctaccactctgagttttctttgcttgtagggcatttgggtttgctccctgcctcctaactgctctgctaagttgggtaagcactttcaccttctctaaatctgtagaggttttcttcatgttacgttccaattagaagaaacacattagttcctgatgtgtgtagggactctcagtgacctcttatgtctctctagcttatcttgtctgctgtcaactatcttttctttccctatgactactaagacaacataagggcagctaggcttgtccaccctatcctagctttctcgggagccctggacctcattctccttggtgttgtttccccacagctcctttttccggtgatactgtgaatttgaagggactgtgtgttatggggcctgtctctattctgtgccccctctgatgacagtgactcactcacagttactcactgagaccactgagacctgatgcttctcctttttcgttactgctcggttcctttagtgtgtcgtcgtccccccacccccccctcgccacagtgttgccaggggcagcaagcacattgttacattgttgctttctgtaggagtacctttgtgccaggcaggtcaagagtctgtctggactctttctctacctctccttactcttacctcctcatctggggtgtggtgggggtgggggtacttaggaattcctagtaactagaacatggtcttaccggaatcctcagttgactcagctatagttttggggaattgtgggacatgagaattggacagaattttggaaataaagtaattttagtttacagataaggagatgtattgaagctggaagatgtgcaagggctaatgtcagagcgctctgtgacggagggagcgattgctgccgagtgtgctgtgtctacgtctagtgctgtttcaagtatttccagtgtctttgagagagcctatataaagggttggcatttctgtggagttgttctccttgctccctctgagcaatgccagctgtccatgtagggagaggggcttgaagccagtattcttccaaagctgtctctctctccagagaaagaagttcagttgaatacatgacattttcagcccatggcagaccctgctttgcccttgctgctctgggtagcctgatgcttcagaacatgattgagttcgctgcttccctagcaattgtgtgtaattttcagcccgcctccttcttcggtgctgcctgcccacgcttccgtcacatgctgcagcgtacctgctttgtaattacgctgctagggacttacctccacagcgtggaaaaggtttgcctaacgtgcttatttacttgcacacagtaagtcttgattgataccttggtaatcactgagattaatctgagacttcctcccacaatggggagggtcagagaattaggaaacaggtgtcaaggaaagggagaaaagagagttgtgcttcctctgatgagctgagaggaaaattatagatgatttgtgatctccagacctaactttacttgtttttttaaatagttatcttgtcaggatttcttcaaaattcatgtaagcagattcacgtatagaatcccctcccccattcaactgtggcacagtcagacaaggacattcgctccctaagtgtaaaagttgcattgcagcctcctgtctgagctggaagctggttctgaactatgaaggtcaagcaacctccagccaaatactgctctgtagtacagggtgaacggctatacctgagacatctaagcacatccttacatttaaaaaggtaacaatagttctgggatcagcccaccaagcacagtgctctgtgttcagatcctggcatgggaggcagttgaaaaggagaaggaaggagggaagaaaagcctctttgaattgcattgaaaattccttattcaagtcaaaatgaccatcaccaaacacaaagaactaacactggtaaggatacaggtgaagaggagccgtttcacataagtaccactggctcatgaaaatctcttcaaaagccatagaacttgcgtatggccaagctgcacgatgctgtgtatagacctgacctcttctcgctctgcctacagcagagagacagctccgtactcagtcattacagttcagttcacacttaggcaagttatagagtcagtctctatgctacccaatgaaagatgggaaaggactgtaacatatgcatacagtggggtttcattaggctacaaagaccaaagattatttctaggaaattgtgcacaactaaagatcatacatgtgtaagggacaaagactagattcctagggctaacaccatggttttcatggatgtggaatgaaaaaaggaatatgtaaatagacagagagctatatggaggaggaagggaccagggggaggcagggcaagaaaataacaggaggattgaatatgttcagagtatatataaaatgtatgaacttatcataatgaaatccagtgtttgtataatcaataatgctaacaagaatcttacagcaggggtttggtaattctagcaaggcactgacattttcatggggaggccagtctcagaaaaaccttcatggtttaaacaggaatgcattgtttaagtcttaatgcttgttcaaataaagagtctgttggtgatagacatgaatgttcaactgagtccgccatgcacttttgctgtctcagctgcagcttgtcagttcctacaccattaaattagtgagtattaatttctgttctcccccttaatctcatcagcttgctgagcacacattgacagagcagttactgaggagctatgcaaattagagattaatgtgaacgttttataccacttactctcctctctggagtcagaacgtctatacaaagagtcttggcctatgtcttagtggtctagtgctagcttgccaaacactagaacctttgaatccccaccagtgcaaggtaaataatcagggagatcccacacaagcttagcttggaggtcgttttagaacccacaatttgatgcttatagcaccagatgttgcataaggccatatagcaggtggttggtcttcagtaatcttagaaatgcttatagaattgcatgttaatttggagaaaagaaaaagggaaatctgatcaaatatcagttctttctgttcacaaataccagtgagttggcatttatatacgcaagctaaggcttcctcagcatccgctggccctcaggtctccttcctcgacagggaaggggccgatcatcagtttgctcctttgaataccttgccttctctatggctgggatgtgttgaatattgtcttcatcagcctatgattgtggagtatgagagaaagaatgttttataatcactgcaatccttggtaagtatggaggtgccaagattccaaaccactcatttcacaaagatagaggacagcaaagaaaacacattcaagctttttttaggtttgcaatttgttagcgggttatcttaatcaatctgtgtaactccttagaaccttactttgtgtgtacgtatgtgtgtgtgtgtgtgtgtgtgtgtgtgtgtgtgtgtgtgtgtttgttggggttatgggtctaggtattgaattcaaggccttgcaactacaattcaaatgttctgccactgaagtcgttccctgaccccaggcttatgttcttgattttgacctgcaggtcatggtaatagatccccagatagcagtgtgatgagtccgtgggcattacaacaatctcgtcacaaacagtcagacagccctcaggaaacacttggtatttcttgttaatctgtggctttgctgttcctataattgctggggagagatgacagcgagccttagagaatatgatcagtgaaaccatgtcggctcactgtacttgctttgcatgtagcccagaccttggagggatggggcggggcacagtctctaactttttagcagcaggcgtgttgctgggatcagggctgtttcttctgcttgctatctctgggtgctgtggcttcattttcagtgtcaggagaggactggggaaggatcctctctttcacttcttgcttcagaggttctaagcctagagtgaaacttacctcagggcagaggaagtaagaccagggttggaaggtacagcaaagcccactcttaccctgcctgcttgtactttcactgggcctgtctctgagaagctaaggaggggtcttgactggtttttgtcagttcatgcatttctcagactcttttatcagaaacaagtttaagatttagacgtagaaaacaaccataaaccataggagtggttttgtaatttacagatgttcagttgtccaactttagatatatatatttttgtgttaaaagtcactctaatttaactgagattcaaattagggccagagggactccatgttcatactgttggatttattattttcttggatccatcttgcatgaactaatatccctatgtccctcaatatgctttgatttgtttcacttttcttctctctctcccttcgtccttccctccctccctcccttcctcccctttcctccttccttcgtccttccctctaccctttattctctccctgtccatccttatgtctataagtgtatatgtgtgttgggttaggtaagaggagaactttcgggtgtcagtttccctctttgaggcagtatcatttttttccccactgtgaggaatatcttagatctcctggggacaatgctgtccctatctgccatctcactgtagtaacactgagatcacagtcacacactatcgtttcctggcttatgtgtagtctgggaatttgaacttgggtccttacatgtgcatggcaagtacatttcccactgagccatcccctcagcccctgtgttgttaattcttgtcattgttctccctcatgttatatttcacaactgcatagccttctaagtcccgatgggagctgcctctcccagcctgcactagttctttgacagctcctccagtttctcagtatagcatcttttctaggctactctccttccttgcatttagatgaatgtaactcccccagactatactttttgagtgaaggaggggaatctaattcatctagagaactagtaacagacatataagtttatttgatccttaagttaataagtgttttcattgagttcttatcatgaactagaccttggcgttataatatggtaaggagttgtgttctccaggattggggagtttactttggggagcatgcatgtagctgatcacctgaccattgtgtgcagcagggtaatgtgctggtgttgagcagggtttgcagctgagcaaaggattaaaagcatcctttacatcctgaagacctagctggaagtaatccccaggacataaaggatgcattatggataagaaattatttgtaactaagggatagcttgtgagaatgggtaaaatcttgtgcagaaaatgaattttctggaagatataaatgctatcacattatcttagaagtattatcacaacagctattagaaatagcttttagtatctgttattaaataaagtagcatcgcatatagaagtatttttattgaattacgatgaacctttaaagatcagattattcagggtcattattaagttaggtgagattgcactcggatttaaaacatctgggcgaaaaactaataataaaagaaaggaaagaggccaagagcatgccactgctgacctttgacctcatgcacagaatataagtaaaagttttaatttttccatgagtttagcaaagcaccgtgtttgtgacttaggctttttttcttcataatattgaaaaaatattttaatatctagaaatctatcaacaggattcattacataccaagtaggaggcaaagtgattgtgctggtagatgccaataggggaggagaggtgtgctgtgggtgctgatggggagggagaggtatactgattgatgctgatggggaggggtactggttggtgctgatggggagggagtggtgtgctgattgatgctgatggggagggagaggggtactgattgatgctgatgggaaggggtactggttggtgctgatggagagggagtggtgtgctgattgatgctgatggggaggggtactggttggtgctgatgggagggagtggtgtgctgattgatgctgatggggagggagaggggtactagtggatgctgatggatgctaatggggaaggggagatgtgctatacagttgtaaggggctgcatggagatatgtatgtcagacagtatcttatgatagtacaatgagaccatccaggaatttccaggtcattgtagcatgcatgtagattgataaattgctttttagcaaactaatattagtatggaaaaatactagaagaatccagtcaaagaacctgctgttactcccctttaggaggactcattcacatgcaggaatctgagctggggcaacataaaatcagggagtggggcttggtacccagggattggaaggaaatgcagttgttcatagtgggcacatcataaagatgggctcagaagcatgaaaattcactgtaagccttggggcacagtagaccagtggaagatgctgtgatgcttatctctatctagatgtggccttcatggtgggcaggcccagagtgccttctatatagatgtgatcctcatagaggggaagcccagagcgcttcctgtggagaagcaggcatcatcagcataagtcacattgccatgggggacagagatgactatgattttcatactgagtcttggatttttacttttaattctgtcccaatagttacttgtttctgtatgtttgtgtcagttgtaagtaatgtagaattggtctgcaggttttcaactttgcttcagagaccattacacactgtatgagattgcattgaaaaatttttgttttggaataagtctagatttacagcaaaggtgtcaatgatgctattaatccattttaatatatacagttgaaatctattctacgaatatacataaagcaccagaattttttcaataatttattgttttgtagtcacagtagtcacattgaaagtaaaaatagtaccattattccaatcccataaatgataagctccatcaataagaaaaagacttttttttttcctctctgctccatccttagagaaaggcttagttttggtctctttacatgattctaaatgtcaactagatttaaaaactctgttctttattgattttgtggcataccttactggtaattttaggatatctaaaatacagtccctgtctttttgtataggctcatagttctctaatatttgtatttctgtgcacatacacagggaccgagaaggaagagtgggttctgatgccagagggaaaccagtatcaccattggcttcaagcccctatgtctttatctcttttctttccctttttaaaatccagagttgttaccatagagtgacacctgtttcctgctatgtaaaatgaccaataattctcgctcattctctatgagaatagaggtacacccaccccactttcattgcaatggacagtatatgcataaagtcctttaatgttattgtattggttttcttaaaatctctgtgattaaggaggccaggaatgtctcagtcataactttgaccaggccctcatttagggctcctgatcatactgcttgtccgtggagtgagaacatgtgaattcccagcaagcatgctactgtgtcacctcctccttctctcgcaattgctttgtgacatgctgaggtcttcatttgttcctccatttgctgcatgctttgtcgctgtagacatctggagataatcatgtagccctcttaattaattcagttcaattaataaattacaaggtagatttggggctaggagtgggtaccgggcaccttccggcctccctgtgctggagagctcttgcaatcaggcctggagagctctcctcacctagtctgtaagactcttccccagcaggtaggctgccggcagtggtgattggcgtatcctgacagagaactcaactttctcttcacaccgagtggatactctgatggagcagtgtctgggctgggttggttatccctcatggagttaaagtaattttttccagtttctcagcttagttaggtgttactggccatttccctgatttgcaggttcaccattggattgctgctgttgaatattctttgtctattcatatacatgttagtgtatgtctcacgtgttttggcaaacagtgcctctgtgcccctgcccctttccaagtgcctcttagggttggggatggggcagagcctgcattatacaaaggacattttaaagtatgcttcatgtatctgctaatgaaataaatgttcactgtttctctaatgcccgctgggtaaatcgaggatcaactctgtgtgcagaggtgtccctggccccatcacccattccagcactttgatcaactgccttccttttcatatggctctccagccacactaaacacagtgttgtctgtttttctgtttttctaactgcagatttccacaatgtctcacccatcttggctgccacccaaaagcactggtgagcctcttggccacgtgcctgcacggatggagaccacccattcttttgggaaccccagtatctcagtgtcaacacaacagccacccaagaagtatgctccagttgttgctccgaaacccaagtataacccatacaagcagcctggaggagagggtgagttctggtgactagagtgggaaatgagcgtaaaagatgtgatttgctgtagagttgtgttggtcgtttctcattatatttcctacagtttatgaagtgtccggttttccccagctccctattgtcagttacaccaactgcatttcagaaacaaagaggttaaatctcacagagttgggttcgtaaagtaataaatatctaggataatacatatccattgctatttattactctaaaacagaaacatgaccttttcaagtgtgactcagaacctttctatagccttatactcatccttccctattcttctgtggggatatgttcaccacccagtgtagctatcaggcaagtgccaaaatgtcaccaagcaatagtccagtgagaaagcattaggacacaaaccctgtgaaatccctgggaccctgctgctgcttactctctccctgggagaagactgtccttggaggccctgggtgttgaagtcctagatggttcagagcaaaccttagttgcagtggtttttactagcaatgtattcattttacatcaagtggattttgaatgtctagatgagctgagcatccagtgtgtggttatactgtggctctcacattaacaaagttgagcagtacagtctttgtggtagaagagactccgtatttatcccagtcatgtcacgagctccttcacacccatgaagcagtaacctaagactaatatatagaacagtgtaagacttctagaagctgagaacagaagatgtgcgctcacaagatttcatctctttctcgattttgtgccccatctatcttctcaaaaatgactgttctgtttctacagttgccatcattgtgttcttagatacatcttttgtatttgttgtagcaatgttgtggggacctatgttatgccctgtagtgttgcctcttctctctgttttttttttttttttttttattttgagtccttcccacctcccagcaaccacatcattaatccacccgtttacctaggcctttggcctcctggtgttttaggactcttttcagaaacaagatacacatgtcttgcttgtgctaacaagctgcaggctaagaggttatgagaagaaaggccaggcctctctctatactgggtgttgtggatctttaggagtctctgtgtgtccttcccttcgcattgtcaaggcatgagcatgcctttctggaaaacgtgcttgctgtccatggacttcctgaccccagtgtctgggctggaagcttccacacccatgtaggacactgaacttctgcaggtgactatggtccttgtgaagctggtttgcactggcttattctcctctaagggctgtagggttcatccttactgaagaggagggagagccaaggggtggcttcctggtttgtttccttaccatttccttttgtgtgatttagaaggcacctttagttcttctcctattgaggaattcaaatagacttcttactaatcgggagagaacaaagacaaagtattaacacagaaaaaggtgtccatgaggaagcttgtagtggatatgggagttaattatatgcccagaggttagattgtgactagagtctgcatgaaaacacatgggccatcaggggaaaaaaaaacatacaatgatgtctctttcatttcttctctctgaatgccattgagtcttagtgagacaagcccttagttgtcctctgccttgccctgctcctggctcgtgatgcccctgcctctactccatatggcaaggccactgaattgccctcaccccactcacagcttcttgtcccttgccaccctattgcatttgttgcctgcctggatcctgttggtagccctttgcccacaatgtttggtgcatcctgaacgagaagcagtcacttccctctccgcaagcatgctactgtctccctgcagcatggctacacttctcactaatgctccacttgtctgcacttactgagcatgtagtgtatgctgtacactgcattcctcctcctgcacttactgaccatgcagtgtatggcacacacactctctctctctgcggtattcagctgcctgttcagagaaccctctgaactagcttgcacccacatccacaaggacattgaaactttgagaggggagatggccctcactgtattttctggttagggattatgtgtgccaaggctgttgtacagtgtgtacctttactctgtataattctgtttcatttttttccgtgagcttttcatttgaggggttgtctaaacactgctgccttcaagtagtgattacactgctccattactattatgtctgtgatctctggggttggctttcttatttttttccttctgactgtgaaagtagaaaggacccacatgctttccacatcaacttatatttatgtgatacccatatgttataattttcttgtataaaacaccatgctaataacctttgtgtaaagggttttgacacacagtgggtgtgtttttttcccaggcagtggttctttaggccttagccccttgattttcataaaatttaaaagaatttgtattttctccatgttttgaatgcccctacatttttaccttctctctatccagtactgaatgctgagctgtgttctttgtgtgtgtgtgtgtgtttgttgttgttgttgtagtatgttacagaatgcatatttaaatatatactatatagtatatctatatatcaatatattgatatagatagatagtaaagttctttggtttccattatgagagtttttttcctcaagggaaatgatatgacacaattttgttctggttcttaaagtgcaacctcaagtattctttattttgttttctggcctctgccttcagaacaaccaggaaaactgtaaggcagaaccagagccatgaaccttaaactttaacggtacaggaatctgaaattctttttctgctcttcacgggttgtgaaatatatggactttcctatggttttgcttatctcaaatggttttgaggttattctgttgtctgcctgcccgcctgtttgcctgtttctgtttctccatcgtctgaaaaagacaagtttgtatagttggagttgtcttgtggtgtagaattatctttctgtaatctctaaaattccgttcacaagacatttttgtatttacaagtgcaggtgtagagtgcaggtgatggaggggcagtcagtcaggatgtagagtgtaggtgatggaggacagtcatgctgtagagtgtatgtgatgtaggggcagacagtcatgctattgagtgtaggtgatggaggggcaatcagtcagactgtagagtgtaggtgatagaggggtagtcagtcaggctgtagagtgtaggtgatggaggggcagacagtcatgttattgagtgtaggtgatggaggggcagcacctttcatgttggtttagtcctttgcagtttacttggcatttgcatttcattttttgtttttaaatttccaaagataatttttactactgctttctctggcagacagaacagatgttatttctatttactgattgctagaccacagaaatgaaacagcttattaaagaatgatttaacgggctgagtatatagttctgaatatagtgcctgcatacctgcatgcatgcaaatgcacacacatgtgtggatgtgtgtgtatgggtgcatacacactcacacacacatcatatgataaagaaactgtttctttgtaaccacattcatgtttatctttaagatttttaaacttttaaaagaactttaatattttaatttacatgtatgagtgtttgcatgcatggctgtctgtgggttccctagaactggagttataaacaattgtcagatgccatgtgtgtggtgctgggactcaaacccaggtcaatgttcttaacccctgagccatcttttcagttcctgattataagattttaaaatactttatccataagctatttatctaggcaaccaccaccttgatacaactccagtattttattatttcatggttttttttgacgtaaattcacaggttgaacatttccacgaactgttctttaatatattcccttgtgcacgtctatgcctctatgtcataagcaatgcttgtgctttccttgcttgacctgagcttttgaaggcagaacgggtgagctgaatggcatcagtgggaccgctcggctgctcggtttcctttcccactcttatctcatgttagtaaatccgcaccatgcagaggaaagagttttacatcaataacgtgacatagtaaccaatggccccagtaaccttaagaactggatttccctggtagaaattagttcatgtttagttcttttctgtgttcatagttgggccattttaggcaaattaatatggagtttttgagtattagaaataggaagggtttgaaaattgttttgcttagcccttcccttttattggctgaggaaacttcatcacttagatacacaagttccctaccagctgcactccatcataccctaaagcacctatgctagagcacggaggtgtcctatatagactcataaagtcctagccccgcccaagagtcgctttgctcttcaggcaaggtcatcttgtatgtgtctttggaactacagatagcaaacatcttttcatatgcttattaaatcatcagtgagttgcaatgtgttagattttggttatatttctgagtgtgccttaaggatcctcattattcactgaaatgctattaattctcctgagcctgtagttgactgccatgccccttctcaggagcaatgtagggatctcagcctcatctgttgctatggcgtgcaggacatggcttctaattttctggttctcatgggcaaagaggaccagctgtttcttcatttaggaattacctactaattgtgttaatttggtctttacatcttcttgaagaagaaagtatttgcaattcatgggatgttatcagatcagaacaggaattgctaaccctccctgctacctagcttcatggcacagcacaaagcggagggtctgtctaggccagcagtttttaacctgtgggttacaaccaacccctttggagatcatatatcagatatcctacatatcagatatttatattccaatttataatagtagcaaaattacacttatgaagtagaaaaaaaccaaccaattttatgattgtagattagcacaacatgagggacagcatcaaagggtcatagcattcagaaggttaagaaccaaagagctaggcacttacactcatgtcatggttttagaacacatttggacagagtccttttcttcttcagttttgttttacaaagggacctacttgggaatactatcattaagactttcagggtccactatgatgggaagtatgagatatttttaaaggcagagtatttcacaatctcagcaagctgtcactctgtgcccaacacacaattacataaaacgtaggtatttgtgggaaacactcttcttggggctgaagtaatgaaagttagcaatatggagattctttgcagagagaatgtattttcttttaaaatagacatgagttattgacactaatattttgtaaccttgataatttataaaatattatttagattacaagtataggtataatcacacaatactattgctagtaatcctaaattatgagctgtgatacttagtaatatgaataatttattaataatggcctccataagtaccaatagtattcctaagattatagtgttaaaaatcactctgcctaaatgttacaaacagaaaaaaattcataactccaggcaggcagaatccttaaacttatcctcatttaatttctcatttcctaaataagaaatgattcttaaatctcttcaaagaaaatacacagacattgcctgggaatgctgtacggtgagattgaccgttgagcaggctggagttattatcctggttttagagactcagatcgtcctgagtgacttgttgagctgaggtgtggacgtgtgggataccttcaatgattatgcgagttgtgcgtcacagatgcatttgtgatgacttgtttggaagctgccccgagaactaagatacaacacgagcagagtagattagatgttttcgcacaaagagatgttcatgtaattggtgacaaaattctcattcattttgtagtctgtcagcctaattaactgttgaagtgaatttgtaataaggtgatggattcacaatacttaaacagtttgaaaaacagtgattaatgctgatttgtatgggaggtaatttttatttgtctccactttaaaatatgaaaatgtatatcattctaggtgtgttttgaacttgaatagctatttttttttctgtaagtaaaaatggagaacaggacagtaaggacttattcaggcataggcaggtgaagtgaaagatacacttatgggaatgagtccacactgcatacctccatccccagacacttttgagatgagaaacctccagagatgagtgattgctcatggccagagatagaaagagtgggacacaatgcaggtgtcttgccaacaggcatcagaagtcttcttgtgtggcgaatttgggtggttccaagtatgtaatcctgcgacatgttgcatagagcttaccctggtgggtagaagcccaaaatgctggagtggactgagagtcatccagtgcagtcttaagttctccatttctggtcttggtgattcacagtagctatatgctcggttgccatgggaagaagctgggcatgctcctccttagattttatgctattttgggaaatttctgttagtccatattttccaataatatttttaaaaacgtgttataaagaagtacatgattttataaaatctatatatttatgataacttacataaatcatacattttacggtcattgttatggctagtttaaacttagttttcaatggtatctggtcttcccaaaacttgaaagacaacagaaaagcaatccatgtcctaatcagttatttttaataaatagtattcccaggtaattctgagtgtattcaactaaagcaccgtcatcaagaatttagcccaataccaccaaggtcctgatttgatgctagagtacgcctcctgttgctctccccttggtcatggccagtagctgtgaaatcttgagcatctgttctgtgagcagctgttgagaaccaaaatccttcttcctaatgctgcacctatcgctctgaactctcttctctggtattagacgtttacataaggttgtttaaagaattttgcttaggatacaaaagcaggtttaaaagtaaaggcatagtgtccttcctctaggatggctttatgatactcaaccttctatattccaggtcttttactattttgttaacttcttatagtgatgtctgaaatctccgctgattttgggtcatggcaagtctatgtaaatcatctattaatggattcattatgactactattaaaaaaaaattcgacactcgagcctttgggcaaatagactatatagagaaactgtggcctagaatcatgattgacccaaggagctgtaaaattattcattgtatggtatttgtgtcatccttccttaaaaatactcagagactgggctgttgagaataaaacccaggtcataggagggcatatcccagggatgtggtaccctgaggctccctgcatttccccgtcaacattctctgaaattctgtcccattttccatgtgtttctgtattcaaggttagatggtctgcggtcctgaggtatctcatacagaaggtcacattatttaaatttagtgttatgaaagaattagagtgacctgttataggaacactgggaaatgctctgcagagatgtatatttgattgacatctgagagaaagagttcaggcttcaccaggcaggaaagcatgccagtctttgcggccaatgaatgcacaagcagagggtagagctctcggttacacttggggcattagctgctctttttctaatgtcctcaaaagtacatgggaacccgtaggggcttctcttcagtgagaacagagcgaattcattacgggcagagccatgttaccattaatctcttcccttacgtttaagctgagtaactacagagagcaaagcacattcctgtcccacagcatgtcctgatgcatgtttctggtgtggtgttaagcagaggatgggcagtccttgcttcatctctggtaccttatgctgaaatgtttctgtgtaaatggatgctaaaaggggagccattccgggtgattttcatgagactgaagacagactttaaccgttttaagcatacaccctctagaaagcgaggcaggatcaaacttaaaccttttgatctatcgttctttcttagttatccacacacttggcaatgattctgagaaaagaagcgttttgtttctaaatatttgctactactttaaagattgtgtatacaggtacagttttgtgtcaccatctcactctcctggttgaattttcaaagggccctcaaactatattattgtcttcacaatgacattatcattgttcctagtaataagtgagtaaccggagactcagcaggcccacagggagactaataatgtggaagccacatgcaatcaaatattagtatttcctcatattaataatttacacaagccagtgtataataatcatacatgctagcaagtgttctatcagaggcctttatctcagtcctatccactgacttgaccatttgtctcttgaataatgtctacaggatgtaaatctctttttgttggatgtatactccttactgtatgtgaagtcacaccttttctgtaaagaatactgccacttgtggacaacagagaaaatgtacacacgatggacacagtcacccagggtaaaactgtgacttgaatctttgtcccttattctaaggccatgtcttttccatgcaccaaattctaaattaatggtcttgctatgtagttcattagaatgagcaacatttttcactgttacttcctcgctgactaactgagagttactagacattcatccgcatctttacatatgacgtcaaacccctggtcacggacagggatgcggtatagtcgtgtctaccagtcagagtaatctgaagttactgccaaggagatattgttacagaggatcttgggaactgctgcttgcagtgtccactaatttaagtgagttgtggcatcttgtttaaacttctcaggtgacattggtagttgtaatgacattagaatgaaagcaaaatgacattttaacctgtcattatttcatattggcctgttaattttgatggtagtgatttcagttttatgaagtgcttcctcttctaaaattactgtcggtaaaagaaatctacaggttgtatgacttgttcctggaagtgtcatctaatataggatctcttaaggagattcgactttctcacatcttgaaatcatattaatacccttctatcattaattctagttcagatctatatgattttttttatagttttcattctttttgatcccggatctcactgtctattcctgtctggcctggcattctctacatagaccaggctgacttcaaactcacaggtatttttctgccttgatgtcccaagttctaggattgaagccatggtcatctcaccgcacctgtcaatccatttttagttaacaatgtcacacaactataacttaagccattcccacaccttgtaaaaactttacatttttatgagaaagttgatatattaaaatgaccatttggctaagaatataaagatttagttataaagcccctgtttggaaaatgacttcatgtttaactatcagagaaatccgaataattagtttgcttgggtacagactactggaagactgacagaatggaaacagacatgggaaaagctcttgtctgctgtatggactccagtgaaagagttctgagctctacttttgccttcagactttaatttctctggggattgctgtgctcggctgagtatacaaagtgctattggttgtgattgtggagtagagatgcaagcatctcagtcagtcaggagccttaagtggggcaagagtcggcactgcatctgaggtagaacagtagtcagtagatggtgccacgagcatctttgctgttattaaaattaaagcatgaatgttactctggggctcttagtccattacatttttttttatgtttataactacaactggtaccatacaattcatcctggcagtttaattcattattctgtggtgttcctttgcatgcgctatatactcggtgcctgggactttcaaattggtttgggttttgtttctcctcgcattatggcaggtagatctgtctgttgtatgctttcagttattatgaaattcagtcagtctcccgtctccacttggtccactggtgtccccagatactcaagtacttcccaagtagtcactgctttcaaatgagttatattagtgttgtttaaataataactaggctcccttctcttctcctcacccccatattttgtgcatagtatataagaagaggacttgatagttggtgctagtcctggagcttcataattaggaatcaccaggaatatgcgtatatatacttctaatgtggttttgaaacaattcatattttttcttgttttttttttttttcagttgagaaggaatcacacacctcccctggtctatgtctggcttataagacaggataggaatggatgtcctcagagacttcctgctgagaatcaggccagagaggaattcttacctccactgcacaggtagccagcctgaggtttgctttaaggcattggtgcctatccgtgatcgtaggaagtagtcaaggggagacccacgcacagctcttaagactccaaacgagcatcttaagcactaacatgatttttgttgcctagcacataagtagtacctgtacattttaatttattcctcttacatgggaatttaaaatgccatatttttttctgcttccattattgtagttttgagtgatgattcatcagcgcaatggcctatttaagtgaaccacaatagcttgggtagaaagaaaaaaaaaaaaaaagattcaacatactcaggaatggaaagcagccatctttttatagctaaaattgcaaacatctggcaattaccctcttctacctcccctccaaagcgaagaattgtcccttcaaccggagcctgctgctgtgtttaatcaagacagctatgcaagccttaaggagcaataggttttgattcaaggaggccattgcctcacccacttggacagagaagctttggaaaacacaccgcgtaatgttccccatatgctactgtgttacataatgatactagtggtggcatggcagttaataactatagaaagccagcccggctactcagtccaactttcttgtgtggctctctaagcagttgtcatatttgaaatgtttactggtcaggtcaagttcgcctctctgtatcttcttaaaccttttgtgtcctgggtcaaagagtctactaaatcaacccagctaatagtttctgacttgattgttttataaagcggtctagggatgttgaaggaataaatccatgtcctttgaacacttggccttgccctttcagtgaaacatcttactctcctaccccaccctcatctcttcctctgatcattttttatgaaactacttcttccttgactggcaaaagccgtctctgtgggcaagggaagtgagagaggctggtggtttgcaatagatgctgagaatggtgacttcctcatctttctttttctcagggctgacccgtatgttcactgtggccctggcaatgcctttcttttctgttcccatgtatctttcctgtcctctgggtctctgaaggctagaggtgaacttcacctttcacatcttgggctgttcccattcgtcaaaggggatcatgggaaagatttttacttatcactggacaaggtatagtaggaacagaaatcaaggttcagtgtcctggtggttctcaaaaacagtctcacatactaaaaataggccattctcttgtcctagtattatgctgcctttagtcatagacttactgtgaggcctttgagagctttattcccttgctatatgttatttcaccttggtaccactgcattgaatgattggaactagagctttctccctggctttactaggccatccattcccaaagtctgagtgaaatctgttaacacctcatcaaactaagtctgatttgggaagagtgaatgggcaaagtttctagcttaaaaaatgaaggtagggatgggaactttaaataacctaaagtgcacaggttattcaacacagttactccatgtaaagtcagataaaatgatggtgtctgtaacatcaaaaagaatgtgctcacttctgtcagtccttgcccatttatatggtgatcaccttgttctaggtatgcatcttcaacttgaaatactttattatcaccagtattgtcaccatgacatgtttccttcatactacatttattcaatgatccatcccacatttcacttttaccaacagagttacagtctataaactcatttaaaaatatttatttagttactttacatcccagtctcccagccccttgactccttccagtacccctgcttacatgaggcaatgaacttggactcttttgggcttccctagactaaaggttcaagcaagcgctcacagggctgcttgttaagttttaggttgttcaacctttgacctaggttatcttgtttgccagttcagatatctcttagtactttgatatttcctttttctttttatgaaaataggataattatgtctctcctctgtctgtatcagtcacttgtaatgttcctatcatagttacacagcatcgggacttgtgtatagaggaccaaatccacaggctggctggaaaagtgatcatgtctttggaagcttgcatgatctcagtacagaggcagcagtagctgttgctctctgaccctttgctgctttggtctttggtgtgtgtttggagcatttcccatccataaacacctggagtagacgcatgatgaggactccttcctaaaatgtaggaaagtctctgaagcaacctatgggaacagacacataactcaaagcctgatgtttaagcacaagtttgatcaagtaaagatgcttttacagtgtgcttgacaatgttggtcttctctcttagcatgccctggattcagatttttgatatagatttttatgtgttccatccattgcataatttgaaacacacacacacacacacacacacacacacacacacacacaccaggtctcttagcttcttaataattttattatttcatagatctgcagacataattccattaaatagaggactcttctgagaaatcttttgctaatggtaaatttaaagctttttgttgttgttgttgttgttttctgatcacatttctctgggttgaattaatccatatataaacattactagttttatagtgaaattgccatctgccatcatgttgtcttatccttcaacatggtctagctgagaccaggtccaaatcttggctaagtctctgtctggtgactatagagaatcttcattcttttgtacaacgaatttggcacatattatcatgccattaagtggaagtggttttggaagtggaaggagaataaagctggagccccaggggaggatggagacttggagaatgatgggtaccatgcaggtggcatcagaccacccttactaccactgcttttcccactctttgaagaataatggtttctcctaactacttagagccttttcaagtttggctttgttctgaacagcactcctagatcgtcttcatgcatgctcagtataaaagactgtgggtgggaaagatctaccaggcttaatgctgatgttttgtcttagtaacactgactagaaggtggcatgcagccagatagggttaacaggacatcagggaggttgtggaaatgtgtgaaaatggacaaaacacaccagtaatcacaatagttaccaaacaatgggctagttttctcagttgtcaaaacagtgtgacagaacaactcagcttcatttccatccagatctaaactgtaggatggtgctattcactttcagcaattgtttgacaatggtttactcctgaaagacatggaatcaaattgtttccacaaaacacaaatttagttatgttataaaattgacctttggatgtctactctgtgttccctgtcagcagtcccatgggttaatgttttacttgttctttctccaaagtctttgcacagtgtatgttcacatgcttaagtgtatctagtttactagtgagatctcattaagcatgttccggtttcttgttatatcctttttatagcattattacagcttggcactaacattttttgttttgaaacaaattaaattgaaactcagacagataataaacaagctatccaaggtcttgtggcttacaaaaaaaaatggagactttgatttgagtacagctatgtctaaatgccagttccatagtctaatgttccgacttgtaaagtctgtgtaagaatttttttgttgagtgtgcacacactgaactatggataactgtgtggctataggtagatagatatcaaaattggaagggaacaaatttgtttttgaaagtgtgtcagagtggaacccagccaggacaacttcaattttgataaaaattaaaaccttaaaggaatgaatggaatttgagtaataaaagctcacagtgatggtgacggaaactgtcagcctgctgtctttgtaaagatgttatagattatcctatgtgagcttgctttgaagctttgaatgtagaaaaggtaactgaaaatgtctattgtttagaaatgttgtaactgtgtgtgtgtgtatgtgtgtgtgtgtgtatgtgtgtgtgtatgtgtgtgtgtatgtgtgtgtatgtgtgtgtatgtgtgtatgtgtgtatatgtgtgtgtatgtgtgtatatgtgtgtgtatgtgtgtgtatgtgtgtgtgtatgtgtgtgtgtgtatgtgtgtgtatgtatgtgtgtatgtgtgtgtgtgtatgtgtgtgtgtatgcgtgtgtatgtgtttgtatgtgtatgtgctcttgcatgctcatgcctttgaatgtgtttctgtgtgtctttataactcatggaattcagttctctttgatgctttggttttgttgattacattcaggtcaacaagctttgtgcttctacctccagggcccatcttgagagcccaataaaaaaatcccaggttgactcttcgatggaggaattgatagaaaagtagattaaatggttgcatctttccagctgtctgaaggaaatatcaatccaggatagcaatgatcccccttgagaatctttactcgtatcttatatattttactgtcttctccttgatttcttggtctgttcagaggtctccttttgtaagaaactcctaactcttcctgaagctttaaccactggggtaaatgggtgggcaagctgaataggagactcagggaagggaactgaagcccaacacttagttgtacacacattgagcaaacacatgggtttttcatgttttctgccctgagctggttaggattggaaacagaaaaatgtaatctttgcctggctctttatagtagtaaaggaataagaaattaaagcctgaccaagaaggatcttaagagaccttatccaagatggagagatgaattcagaactttcccacaaatgatgtaaggaactattgtcttaataggtaactcagaactcttaaagaagtacattgcagtgtatcagctgctgcaggaatgggtactgggcaaccgccatagcccctcccttaaaggaggataaatcctttgactccatgtgcaaaggagctcagggaatactgatctgcagcagtgagagggttaaaaaagtccatcattgtataagaggccctgcgatcttgtctgaaccatgtcaggatgttgcctgcacgctgtctttgctgatcacagtaatccggtcataagagaaagagaagtaataagagtgtctcttagcaaccaaccccaggagaaagagaaaattactcaaactgagccattcagctagggaagtagaaagaaaaatattctgaaagtctgaaaatgctcaagttcagtcttcaatgccgcagacagaggtggcaggctggggtgggtgtgttagtaacaaaaatctgtgagaaattgaaatgttctctctttcgctttccttctgtttcctgccacctcaccctataagatacaggagtaagaaagggtgagccaaagaaggctaaaaagtccttctttcccactataggacctgggtggttgaagcatgggagaagagaaacggaactcactcactctctctctctctctctctctctctctctctgtgtgtgtgtgtgtgtgtgtgtgtgtgtgtgtgtgtgtgtgtgtgtgtgtgccatgcaggtgctaatgcatgcatgtgcctgcatttgtgtggtatgtgtgctctggcctgtttgtgtgctcctgtgtgtgcagagatgcatgtgtgtgcacatacacaaacacatctacgtgtgcaagtgtgtatggcagaggttcatttacccagcttgtccagtggcgatcaggattgctctttagagggagaagtgtgaaatctaggggtgtgattcctttctgaagacttgctttgcccttactgcatactaattggctctgtaatgtgtaggtgtcagctgtgaagctatgtatgcttgtacactttgttctatgatagttttaaccctgcccccttttcttacaaatatcagtaagaggtacattttacactgacagttgtgcgtcacacatgtatgtaatttgaagtgagagtttctttacatatgcttttaaggtatatgttattcactgtactttctattgtctgtcattttcaagtgctgttgaagcccactgaactgatattgtggtccttcatgagtgagtatcttttcccctctgatgaaactagagggtaaatttagaatttgccttaaattttgatttgatcaaagtgtcacaaagcaagtatagtcatggagaagaatcctggggcaaaactgtaatattcagggtcatagttactttaaattcttttttttttctgttaagtcaccatatcctaatagcttagctggcttccatttatggaagtaaacccaaggcacttcctctagactgtcagtgtgtagaagcaagtcacgaggtagccaggaatcactgcgttgggtaattttgcacgtcactccggtttgtaacatactggaatctggagcgggaagtggccttgcaaatcattcagtcttatgcatttctaagattcaatttcagaaaaacactgattgacttctgcctctctataaggatgttatgaactaatatttataatttagttatattaataatattataggggaatattagatatatgtatatacatgtatatatataaagttatagatatacgagtgtgtgtgttgtatgcatgtgtgtgagtatgatcttcgggaaagtgcgacttgttgaaaactatgtgtggtggaaaattcaacgtgggaaaaaaaacagaaaagagggtttgaaataatagtctcaaggttgcaaaagtctagaaagagaaagcctttgtatcaggtcccctggacatgagaatacttggagaccatatttgttagttcatggagagagagagagtcaagtagagtacatgtcgtaagtaatttgaaaagggaaattctttttgctcccttgagtttgttgcagtgatttcacactcatcagtttcggtatttttctatattgtgtaacgtattttgtcccctactagcctgcatgtctcattgccagctgcttgatggcaaggtggggtttcattagtagtgggcagtatgactggctcttggaaaccattcttacataaagatatggtgtacatgccctcggagttggaagaaaataaacagggacctacaaattaatatctgttgtctttttgtaacaaatgacacttgaattttgttgctgcttttctattttcttaaggcagaaattttatttgattgcactttttagtagtttattggccacagaaagaccctctgttagtgcgtatgctagagatattctcaagtgatgtccccttctgagccagactgagctttgtaattaaacgagaattagcagaagtatgtcgtgcctgtattcctactctgctagtaccttttggtgagggtgctccaagttctcatatatctaacactactgtctagctcttcctattatcgcagtggagtagacagacagggatgctgttttctcatagcttggtctctgactcagttccttgatagaaatttattctttattctttattcttcatctgtctcaaacataacattaacggtgacagaagccaagaaaacctttcagtattgcatggtgtcttataacacacatggagaaccattactctatttgatctttaggactctttgatatctaaatgccaggggttattctcattttatggagcttgaactgagtctacacagctgtttccacatagtatcactggctataaaattgcagagtggatgatcagaacggccagtgtttggaacctgagtagactattttaggaagtgtaaaccccctaaaatttgaggccagactttgtttcaccttttacaatgctgttcacataatatgacttagaaaatgagatgatgatgatgatggtggtggtggttgtggtgttggtgttggtagtggtagactttctaagtcccactccacactgctgttttgaataaggttttgtcccagggatgtctctccagactttctttatgagaggtctctgagaagactggaacctctgttcaaaacccctgcttttgatgagcatggtaagtgatacacattcatttagctgttacaaagaaaagttcctgttatttggaagatttgctctttccttgattgtttcaattgtataagcctagtttgtattctttttctttgataacattagatacatttgaagattttccatgtatttttataagatcaataaaagcaaatttacttagtaaccccaaacctctattttgtaatttgtcagctcctatttttttttttataattctttgctcatcaatacaggcgtatagttttcttaaaggcatatttattttaactgtatgcagctgcgagtgctgttccctcagagtccagaaggaagtctaggatctcctagaattagggctacaagcagtttgagccatcttatgtgcgtgatgggcaccaaacgtggtcttccccgcagaacagtaagaacacttaattctgcatcaattcttcatccccaggtcactctgtattgttcattaactaaggactgacataagtttatgttttcattaaatgtgatagtataagaatctagcccaacatttctagcagtggcttattaaagtattcgaagtgacaaaataatttgaattcccattgccttgttactggtcatgtgtctttcctatagtccctacagtcaaggtcttcatagatataactgtatggggaaacgtgctggaggattcagatatttactgcctgcttccctgaactgaacccgggcagctctggaaggatatttagaactgattagataagagggttttatgtactggaggaggtagagatggttgcacagatttttctcctagccatacccactgatcttgaacaatggacacatgagttcaggtgtagtctactgacagttcctggtatattatcctgtgtggggctgggagtgtatagctcagtagtagaaggtttgccaaacaactgttaaggtggtgggttcaaatcctaccctgcataaataaaccaaaggaaaaccacactacttgtgttcttgtgtctcacatagtttcattgtgatatgtgatggatcctaagtgaggacatagacaaagggtagctgaacgcatgtccttacagttgcttctgtccctgtgacaaactgagcctctccttcttgtcatcactgttttaataatagtaacatgacctatagtaaagattttttagtattaaccatgttctagatatcattcctgatcctcctctctcagttgtcacgttaattttaagaaattgttttgttagtgtctttcacttgatgctgatctacccttgtcatggccacagtgctttcttcccgatatgaggcaaggaaagacaggagccagagtggagtcttgtaggtgtccatgttcatgagagtcaacacagttctgatcctgaggctgagatcagaactagtgtttgagctgtcattgtggaatcctccagaagcaggatgaaaagagttgctatggcaggcagcagagactggacttcattagggctgtgactttctcatcagctatttggttcttgaagacaggagtctggcacacagttggtatacattgttaatttcaggctcaaaggaacaagtggatgtttgactatttcaagagagtctacttaattcttcagaaattttgttcatctgtaatcagcctagagttttcatggaatttctgctaatacaaaatcttgtgtgatattaaaacagagctctggaactgtgaagatgttaacacatttcaaaatgtgttggtttgatttattgttttcttgttctgataaagataggggactactcttctctgtttagtgattaagtcacccgccacctttttctattttggtctttgtggtaatacatgtttcctggaaaattccccccccccccccgttctattaatacagtaaaagggggttacggccgtgactcaccccaggaaatcagccttcgtttgcttcctcaatctcacaaacagtgcagtccccatgcacaaaatcaacaacttctgcaaatgggttactttatagttcttaagaaagttctagaaaatacagtatttgtggtcgactgtgtgcttcctgtgatggtggggattgtacaaaagttcaggttttgcttctcagtgttcgtgaaatccttgccacgctagatcagtgatatggtctctggtaggagttctctgacctgctgatgttgagcaaacattccaggaacacatccttgcacagttacagctcagggcaggggcttcagcagttactgtctgggggtcagaatttcagtgcacatgaggtgtgtgccagcttagagtcccactgtcacccctctgctcactcggcaatgactggatggggccatccacacattaattctctccatgtgtcttggcgtctctgaggttttgctcagttctcctcatgaacttgggacctgctctaaggaagcttccattcccatgactgtgactgctattacacagttacctgtcatgtccaaggacttcagactgtgagctcatcctaaggatgtctagcctcagctgatgtggatcaaggctgcgtagagtaagcttagtcattttaattccatacgttgttcaaccccaattttgtctagaaattcattcttttaaaaacagaaatggagtttaaccatgtgttttctgtaggatttgtattttccactttgccttataatttatattcttccttagctgattttttaggtatctgactgtgaattttttctgaattataaatgtcttccttttgacattactcttcactgcctttctattttcctggtacagtatgggataaatagtagctgttcactgtttgagaaatgctaactatgtggttatttgaccagtgagtgaacttctctggatctctggtgtaggaaagggtagaggaacagttcctgcttattttgaaggctaggtattatatttaaaaactcttttaatagtgcctggtacttagtaagcacttactaaatgttatcataaataaatgatctttctgctacttataaagtagccacatagcatttccttctaggattttcttccagtcttttatgatggataaagaagagccatacagtctaggagttcctgtcagctttctttatataggaaaccagatgtaaatatgctgtttcagttacatacatctcatatttttatatgattgctgacaaaacattaagtaagaattatgctatcatattccctagatatcaattcatgctctcattaaagtcagacatttatctggtactgctgactgctgttcttacccgcagtaatgttaagtactgtcaccatttaatggtcttgcctgacctttgggcattagtgccaatcctttcttcattctgtccatgaaaacaacaacttagacatcccattccttcctccctgtgtcttcttctagcttagaaacctttgtttaatagagggcttgaaaacttgctgcaacagaaaaagattgtaataagaaattctttcttccatccttccaagtcgaagcatgtgtttatatgccttttcatatgtcacacatttaggtgcatatacttttatatgtgtaattttcagaattttcctgttatacgttgaacagttgcctttgtgattgctgctgcaaagaactcagagggttttatttttttttcctttcatgatttcaaccttgagagtcagcagtcagtgtgctctggcacagggcatgttgttttgcatttatcagatgatactttgcatgcccagaggggatcagatttggaagatgcatgcttaagtttttaaatataagtaactctacagtgggtttgtgtttgtcagcccagtaaatctttatagaactttgcattgcagttgtctctgtgtgttgataactgttccctggagagtacagcatcagaattgaatcctataactccaatccctaagtctactgctgcacatttcccacagtacctaacggtatgtggggaactgctcactgtcctgtcccgtgtcatatgccatgtgggcagccagtgcacacagatattctctatattcagctttaaccgccacaagtcactttttcatgtaataagtgtaccacaatgcccagcgggttgtagatgcttagtagttgctggaagattattaagttacccagatataaaagtggcaaatggcttagttacctgggtgtggaaacgtctggtgtggttctagtgggagctttctaagtgtcttagtttaagctgatgacatagtaaagaggatcatacctgctctggtcactgatacagagagcctacattgcccttcaagacaaggcatctgtcacctaaaagcccgatactttcccatggcagtctaaaaggtgacagattctaggcgatgtcttttgggaagaacagacagacaccgaggatgctgctcttctgaacagcttttgtggttaggagtgagactaggaagtgactggatcagtgtggaagcctcactgggtcccaggatggagagacttaggagtgctgttgtccagcctgagagagtggatgtattgtcacatgtgatgctgatttcccctttctatcagtaactgtgtctgcagcaccttcttcccactgtctataccaccacccctcattactccttttgcttgctaaaatttgaatacttggtaatgatttgtaaaaattacattccatgtgataatgtatcatatcagcaacctgggcaaagagatatcctctaaaatccgtagcatgaatctgagtgagatgagacctcacctttccctgaaagaagtttgtttgacatttgtttgttcattgtgttgtgtgcgcctcagttcattcttttattttattttatctaaggaagttatacctattgatatgtcagtgaactatgtgtatgcctttcctttgaggccagaagtggttgttggatattttgggactagagttacaactagagctgtaagctgccatttgttttctggggatagaacatggggttttagaaagaatggcctgcgttcttaaccactgagccatctggaaagatcctgtgtgtctatgttgtaaaggaatttctgaacttaatccccgcacagtttcagtgcaagccctttgttgtagtaactgttccagaaggatgcctggcgttgtgtcctgaggatgctcaccagcttagatcagggagtagagcagcctgggaaagctgatggcgttcttcctgactctagagtattcttgattaagaatttgatggaggagccaattcttgtggtatactcctacaatctcaggacctgggaggtcaagccaggaaagagctacaaatttgatgagtctgtgtttattttttttaaagatgtttctagatgattaaaggtgtcataggtctacagtttgtttttttgtttcaaggatagagacagacagaaaaaaaccattgagagaatatttgtgaactttccttccagattcagttttccatcattttgacttattagtatatacatagagaaacacatcaaattttccagaatggagagggactctataaactctgacttcatttagttgcgtatttagccccatctttagcaaaagtgaccattcctgtcagtgactgcatgctgtacatccaaagtgaacgtgttatacattacagttccaactgaatcggtgtaatggagtacaagtgaatgcagccctggcctacctctgaggcctgtctctctctttggcagactctgtgtcctttcttgtaaaaacctatccaacttaagattctccatttaacagaaaatcttaacctttatttgtttcttttctaacagtatattagggaaagggtagttgtgaatttgaaatgctgaacacatttgaaagcctgtgatcatatcagtctggatgagagaaattggtggggtgcgttggatatcttacatccggtcctccttatttttggttttgacttccaaagcttcagagctatgctttctgaccttcctagttagcagtgctgaatctcagcattgtgtcaatcctcctcagctactaggatgtaaagcagtgttgtgtcatagctctaacatgcacaggataggaaggagctgcaatccagtcacaatttttctcactcaacttcactttaccccgattcattaacaaagcactttgcctctttcctccttttccggggcacagaaggaaatggatcacaccagaacgtctaatcagtttgttcagcaggggtggcatgctcctcatttcaccagcgtgtgtacaatactttaagcagagatgcatcattttcaaacctaccttgagtctccctcatacctgcttatagtctttggcttttctcccctcactgaaatattccaatctggaaattttatcgttggactctagatctttctccctttattttgtagagtcaaactacataatttcaatactgtgatctacaagcatggtctagttttgttctgcataaccttcttatggttgtgttatatccttcacactataaatgatttattgtgtgtatacctttgttcctattcatatatatgttgaaaggacacagagagcaaacagctttgcgaccttagccactcattgaacatctaaatgggaaaataaagttatttcttgtactttgaatataatttaaatagggggaaatgtctattataatctgtttagcatgtactcaggattttaagaaaaaaataaaagatgcaggccttagttcaataaaggaaagaatcatgcatccatccattcaaataatgtttaggagtctgccacgtgccaagcactatctttggtttgtaaataagtaaggctcaaggtccttgacctccttggtcttctaccctttaaagaaacaaaggcacacagatacagataaagcactccccgtctcttcctctctctctttacctgctccctggtttcagagtcgtatatatcagttagttgaaagagatgaagcaccctggccatttgtgctagagaacatatgtaatgacttgctaccagttatctccctgcaagccttctgtcacaatcaagtgtttttctccttcctgttccattgggcagcgatggggacattttcatcccttgccactcagggctttttctttctagtagaaacaactgtgcacacaaaagcacatcctgtgtgcatgcgttgtgcttactactgctatgaaagaaagcatcatgcatacctcactcagtctgggcccatgctgcaatgagtggaaatggcgccgagtactcaggtgggcactgtccatcatttgagctgaatgtgcaggaccagcttcatttggatgcttagtcccacgtggcccctgcgaaccagtgaaagtagcaagtggcttttagtttcccccaaccatgtctctttctgctgccgcccaggttgtgccggtgagactgcaagggcaagatgggatttgaactgttgctcatgttcagtttagttttcttttgaaaagcaatattatagtctgtggctatgggtgacctcatctccctttagcttctgtgtggttggtttttataatgctatactatataaaagctcttttgacttttcattttgttactgtttccattttaaattttcatttaattaaaaacaatttagtccctctctgcctttctcagctcatttcctgagtttcctttctttgttttgtactggcagattgaaacactttctctcccctatgtttccccagactgctgctgttgctgcttctccttctgcaggcctggtctcagcatctaccttgtttctaacctcttaggctgataatagctttgtcttcaacagcaatgagaagactgagaaggcagggagtgattttgtttgtctgtttgtttgcttttgcttttttttctaggttctttccaagccccatgcttgctttccagctttctagaaatgccccactttccctgcacaacacctgctgttggccatttgtcatccttgtcttccagagagcaggtgctgaggactccagggctggaaggaagagcttccatctctcccttggtggctgtagccaaccaataggctctctgtacctaatgtgaatctgccttcaccagagagcactgcaaacgccccagttgcaccgagtcattcaacactgatacgtgatgcatggaaacttagaatctcagcggatccaccacggcacttgcttagctaagcttggatggaacaagcagccctcacatatctgatcattttgctgaacagaggatgtgcacatcatcaggtcttttaaacatttcccatgtcagtcgtgaagtcagagtcgagaaacatgtgattttatgaaacaacataagatgtgaagcaaaaatgacctctctgggcacccatgtccagaggttggaaacatgaagggcaatgctgccactcctgtatgcacagtgttgaattggctccaccttcttcctctgacgtagagaggggtcttgacattgaatgacacaggagtgtagattggggctgaggaaatcctcagaagacctaacattatgaaaaggctgggtttataagctgttaagagtaccacagtgagtgtcaagagattactttgggggcccaggacttatggtagtgccggctgcaagttgactctatttatgtggtttggaaacatggacccactctcttcttttgagcattatttctcgttctttttaccttggaggcagacctgaaagggagtcagtcaggtgttgtaggcggggctgatggggctgaaggcagctctgcagtgctgagaggctcaccttgtttccttgtgtgtgtgagccctctgctcagtcccctggcagagtttatatacacccccttagcactgtggtctctgttaggttttaaccatcttctgttgcctcatcctcactctttattttggtttcttttcttctccaaggtgtttgtgaatgcctttctgtatgcagggctctttagaaatacatagagctgtttaaagtaacataataattgtttatttgccatatcctgcattttcagttctcttttatatcttttatatgtgtacaaccaattctaagaaccttctgtttgatagataggcccaatgaggtacgagactgtaagctatttgaggggctgtgttgggattcagaggcaagcagccattttctttggctgctttgaccttttgtgctcacgcaccttatttacacgctgccagcctggacctgcccatgcctcactttgtacacccagcttatttagcagagactgtatttgctttcaatagaataatacatgtattatttaatgataacagatagaacataacattttgtgaggatttataatatactctttgagctagatctaggatatgaatattatctggataatgtgaaaacattaatataagcttgcaaactgatcaaatatgtacaagatatgtttagacacagataatacttaatgaacacagactggtaagaagcccagcagggcccctagttcactcactgtccacacaacaggagccactgctctcctctccctaatgagtttaaacaggcatattaatcggcttctgtctgcatgactccagccttgtaatgatctatgcacattgcagactctctagaggtttactgctcccaacaattcagagtatgacatcgtatatgctctctgtatctcatgattttatttccatagataaaactcaatgtgatttaagcatgtctttctaactttttggtcttatatacatgactggcttgagcatctttgtacaatatccttcgggactcgtaggcttagggtgtggtcggaagctgtatagttagtcattttgtgcctatctagtcagttttagcatttctgtcaagatgttttacatgtaggttatttcagggataatgtatcctgctgaagtgtgcttgtcttgttttgccctggcatcccaacacatggtaccatgcagtattgtagttcttgctgatacggtggggagaatggtagttcctagttctggcttctgtttctatatgagaaacgatgactcaatgtctcacaatgatgtggaggaaatgtctcatgaggagggcaaagcatctatttctagtcaaatagctgtctaaaatcatgattgcagaggattctgtgacatttcagcagatcttggggctagaaaccaattactttgacagtgatgccttggccaggacaggtcactttggtgacagtcttgaaggatccttctttaatcatctaattacttttgtcttagtatttactgtgtgacaatggggacatggttgtaagcaaaatgaatatggctttggttttatgaaccctttactgtagtcgggaacattggtgatcaaatactcatggaagcatgtgattgtagaacacaagcattgccacacagagacaagagaggaactatagtgtctggtactggtgctcgcttctgtgcatgcctgtttgatgaatatgtgtgctaagagtgttgtaggttgtaggttgggataatagtaatggattggtcagggttctctcaaggaaaagaacaaattgattaaatagataaatatattcatgtacacataaattacataataacacatatatgtagaaagacaattgtgcatatatattaattaaaggggtcaattataaggatataacctttgtattctaccttgtaggtctcacattggataggcctagaatcctagagatgctcaggccatgaggctaaatgtctcagcactgccagtcagagttaacagtccagaagattcctggagagccattggtcttcagcctgtgtttgaatcctgaggaacttggttctaatattggtgattgatgccacaccatgatagcttcaaagcgatggaatcatgttagatattgtgctagaaagctgagcagatgttccctgtttgtgttgagctctaaccagtgaactaggtcaacactgtccatggagtttggcaaatatttgatgtccattccctatggcatggagatcttatcttgttctgtgacctcccctttctaagtatgccattttctcatatctaaggtatattacttcaagaatcgggtttttatccccagggaaagttagaaaatacaaaataaacaaataaaaatcatcttactgtctttcagtaagtgggtatcagtataactactaacctatcttgttttttaaactaatagcaagtcattagtctactagacattgcctagataatgctcatctaccaagaggggcagatctacatttcgctctgattggttaaccaggatatgcagccatgctagaggtccttgttcagtattagttcttccacatcccaactcctcatcgtgttctttaatcctagaaagtaatttctggcactttccctcgactgttcagaaccctggattactgctgtacatcaatgatagtacactggcaatagttgtgtgagtgtattggtctgaacctatgagctgtctatggaacaccagagtctgtatttttagttcatttccttaggcaaatacaaacattgcacagttacctcgggcatacacaagctagactgtcagcatgagcacaaggaacctattagtttaacatgtaccaggtccctccttaagctttggatgagaaaatcgaaaggggacatttataagctaagcgccacatgtgtgtcggattgagtatagattacaaaccattcaacctatatcaaatactgaacttcggctaaggctggcttgaactctgagagataaagtccatacagtttatctcgcctgtgccattttaactcagaattgtgttgtatcttaagttctggatgctggggcttctttcatgacttccaaaagcacatacttttctggtttttggttgtttttttttttttaacaatttgccatggacaattttaaaaactgttgtaacaattattttaatgtttctttccacatatgtcatcatcttcagcaaggattggctcatgtacttctttgtactgctgttcctcctgtcgcatgtagtccctctctcttctttccacagccttccttccctttgatggtcacttcatctcctctgtacctcagtccttccctccggaattgtctcagagataatctcaaatatcacagaatacaatcagtgctgtaaaactgaaacttttgtaggtgtgtcaaaagcacttctctcagccataaataatgttaggtgaccatttttgcagggtgtttattgatcttgtggcttttgccttggggcatggtgtgggaaagtttaagagtaaaaattttaattctgagtgacttctctggttgggtgaagtgacagactggtctgtgtctattgtagctattatatatatttaaaatatttagtcaaatgaaccatattagcattagtgagtctattgtattgtcagtagagttctgctcttaattataaactattttaagatatagatagaagcacaggtatatatagccaatacttcattaaggttagtggtttctctgatttcctcagtctaggttataagattctgtgtggtaagcacagaaggtgtttgcttttaaccaaattacctagaaaatagagagggaggcagaagtttatattcttagaatgaggaaacccaagtgaggtgtttctaatatagaggcagagagcagacagacagtacatagcatagcatagcatagcatagcatagcatagcatagcatagcatagcattgattgctgtggtctcattacatcttcataaaagcttcctgagcaagggtgttctcagtgatccacttggggaagcaagaagagttaatgtgggtccccactttccctgctcacacggcgctgagtttcccaggcttttgtagaagtatgcttttagttcctcctgtgtcattgtgaccactttttgtaacaacttgactcatagcatcccagggaggcttgccattctttagggctgggaaggcatagtggggcagctcagcctgtggctgtgcatcatgggatacaggcctttccatgttgctgaccacgaggcgcacagaggtagaacataaccatgtcttccatcagtcaggtctcagttcctcacagctctatagcttcaaaatcccgataaagtgaagcaaagggttcaagaatgattctgtggagacatttcccactcagatgatggcaccatgataagggaaaaccttaaaatatttgtccaaagggcttatctgcctaacagaccaccggaaatgagatgacatttcccattaagcctgattctagatccttacacccagttgttcctaatagatccataaccctggcttacttgggtcctctgatcagatgcatgggtgttctgttgcatggatctccttgtaagctaaagagatccctggttatgtgtccctgttctgtattaggtgccagtttctcacggttctctctcatactcacgtctcctttgcttgtgtcaaggagctgctgctgaagagatgggtggcagtttcattgcagcagcttgatgaagtgactttctgcacacagagtgaattagttggcatgtcacaattctggctttattttcccttgtcccatgataggatttttttttttttaaaacaaacaattgcctaatcaggtaactcacatcttatccaaacagcattaactttgtgtgtgtgtgtgtgtgtctgtgtgtgtgtgtgagtgtgtgtgattctgttagcgtttttgaattttatgtattatgcgcatatatactagtgttacctttacatttggggtgtcttttaattttgctgtaatttgcaagtataatcaagttcatttcaatttgctttgaagttattaatctgttgatggaggttgaaggtctaagtggatttgaaatgacttcccgtgtgccatgtgctgactcagtagctcacactgcctctcttcctgtgtgttcactgtacgtctgttcccctcacacctgctatgcctgcataactcttaacctttccggttgcatttgccctgccttccctgcagtttctttactagtgaagagcctcactttctgctatgcctcactgtgctgggtccctgcctcctcgggggtattagtgtgttctgtggccctacctgtgttcagaatagagacactgctcctctgcccctgctgtttggtaatgcggactgtggaaccttaacatatggcctcatcagtaataaactcccctgagaagccatgtcagccacttgctccccagaatgtcctcatgaaacatccttggcagggtagcactaacactcggggctttctgtagcactgcccttttttttctaaataacaacaacacacaaaaacaaaacaaaacaaaacaaaacataaaacagtgtttccctgtgtaataattccctttcctagttcctggccctcacttgtgagtacctttaacccagtatctgagttgaggtgttgggaatatgtaaaacctgattattttccctattggcatctccttattcaaatgatgagaaatctgtgaatctgctcatgccttgggggtttcttctatatactctctgatactgaaattttgacaaaaaacgggttgagtttcatactttccaaacatgaattttgtccttggaaaatggaatgagtcatcttctttatgtagtagagataattccctgacatgtgatatgctagctgctagtcatgattttgagttttagtttatatctaatttatatgaattaacatgaagtagaatttacaattagttccatcgactctctgtgttttaggcgatgactcccatgctcatcgcatgctgggctgtttagaacatcccatttaaaacaaatttgtattgtccagtggcgatagaatggactccatagaggacagttagggaactggaggaaccagtcttcaggtgtgtcttactgctttctctaagcttagttcaaacaatattggcctgtattggtaatcaataagatactgagatactttgttttcaagatactttcgttttttgttttttgtttttttttttaacgtaggcaccaaaaaccaaaacaaaacagaaaactctgtaggataaatcctcgctggcacagaagatcaacacttagacttgttttataaccgagaggattaagagtacaacaccgcccaatccctagaatatcagagaaacaaaggccacaggtgtttgagagctttgtcaggagtgctgtttctagaaatgtgtccttctcatgtttatgcccctgctggcttgggatgagaagttgttgggaatcctagaatgttaagacccctgtcctcagaagatttctatatcatagcctcgttccaatccagtctgaggcatacgaacaaaagctttcctattaaaatgaagagatcaacaaagtaagtagatggtaaatgaatgacatcatttgtttgtttgtttgtttgtttgttatatagagtcagaagctgtggttgatacactctggtatttatttttgggagaacgattttgcctgatggtttgacagaaatgccaggacagcgtttctcccctttgggtggccagacagaagtgaaacctagttgactttcacttccaatttaccttgctttgatttccaatttattggcacccaggatctggtgtttgggtggtgaccaagatcagcgggtgagggttactatgagaaattccacagggaataagttggtgttgggtgcaaaaagctcatatgtcctatttgaggctgtgtgaaatgaactggatcctcccaatgaggtggccccagagatttaatcctctggggtgactgcattcacaagtcttttcaagagcctaagcaccataaaatacaaccacaaagccttccttccaaggaatgtgtgtatcggctcatgtcaagggctcttagcaggaaacaatgagcctaaagccataatctaataaacaaacagataatccagttcaggtttgtctaggtaatataatgtctctatcaaactagttcttgcacctttagctctattcagaaggaaagagttcttcgtgggaatatgtgtgttttcttagcagggggatgtgtgtttcccgtgaccgcatagcttgtttttctcttcttgctcagtcttgttgctcacggtgggaattttccatcttggtaatttggtattttccttggtttttattgtaaaggatggaaatgtgtacacctcaatttcaggtttcttgttgcaccacctccatctcagttgcctttggcctgggcagccagtactcgctcgtcttcatgcctttctacccaccaaacctttaggcaaccagcaagctcgaaggtgaagctgtttctatacaggaagttcacggattcctggggggaatttccaaaggtctggagtcctttatactcccctgtgacaactgagtggcacgtggaaaatactgtacgctgggagtctactttgaaaacaactactgaattgcttaatttccaatatggccatggggttttggtatgagggaggtcagtcattagcagcacgagttactgagttctctttgcctgatcttgcctagagaattatgtgttatggtaaatgctcaatgagtgccttcttgcagttaggctaactgccctgccataacatcgggctattttctggctactcaggttggaaacagtctgtctctttgctgttaattcgccctcacattttgagtcacggagtcataaaccattggtgttgaaagcgtctttaaaagctattaagcaagtgcctggcacttacaaagctttaatctgtatcacagtatttctcctcctcaccccgccttgaacatgtgcagttataggtagttttcactttctcaagccagtgactttctagttttctttcacggtcaagcatcaggcacttagcaaacgcagatacactgaagtgatatgttattgccaatgtttctgtgaaactctttgtaggttttccaaacaagcttaatattcccagctgtatcatcagggtagttcaggctcatattctgtattacctagtgtcagctgtaacatgtccaaagaagtaaatatggttatagggtggcttgctttttgtttttgttgttgcatgtatctgctagatatattctacctctcattccatttgttatcttctccttaaagtcacaaagtagctctctggtccctgattctggtgtggaccatcctatcctgggcagcatcagaatcctttggaggccttttctttttaaatcgatgcagtggtgtaaagaaaagcctcccacaggtagagtcaagaactggcttagctgaaaatctaattttgcttcctgaaatgcatttctcagcttaccatctaacatggattttccctaaatttggtagcaagattatggatcacaaggagaacagtgtgtggaagacaaaatagaatgttgaagtaatatctaaatttggaaagatatcctgaaatatgaaggctgtcttaggaagttctttaacttcagatgctctgtgtcatgacgggaagacacttacagtgccctgaggaacctgttccctcccagctttccagtgcctcctgcagcctcctccttcatggctcacggtggcatgtggaatatctggtaggaggattccaggtcctgattgctgcaacctgtgaataggttggctccatggcaaagggtcttcgtaagttaaacagagttcaggctgctaagcagctgagtattcacagtaattttccttagaagtcagtgaggggcaaataaaaatagtttggagtaatccatgatgagagaatgtccaaggagtgttggctttgaacatggaaaagaggccacataccaacgaatgagggccagttctcaaagctgggtaaggagaggcaatgtctctgcagacattcataacataaagcagctctagggatattttgggtttagtccactggtataaatgatggacttttgcttatgaaacaataagatcagaaacctatgttattttaaactctgaagcctatagaaacaatgggaagctaccagagactatggtacatggagatcatttgtttgcttatttcacctttttggaaaaggaaactttcaagctttactatgtcttatttcaacataatttcatctgaaaggaacatacaatcccctgacaaatagtaggcagaactagtgtgtttattcagtgtgtgtgcagaatgcctgaactttttgataagggtacctttactgaatctaaattttcttatgtgtaaagtaagttgctgggcaagatcaaggtcagtaagttttctgtaagtcctaactgtcactgtagataggcttttagggaagtgaggtgttttctctacttagctttgacattggaatgggaaagcagccacgtataataagtaattaaatggttgtggctgtgttccaataaagctttatttgtaaaagcagaaagtgggcatttgtccatttagaaattgtttatgaacctttgggcttttgaaccttcttatgctattcaaatttccttctaacctgattatttggtaggtttataatgttgtgtattgtccattaagctgaaaaagtgtcagtaggacttaaatagagactcaagtgtgtttctttgtaagaatccctgtagtatttgcagacttaagtgccaggacgggaactgctaccatgtccttggcaaacggacctggaacaaatgctcttaaggatgagacacagggagacccttgcatgccaaggctgagctcactcatcttgagactcgaaggactgcagctactgttggaagaatacacgggtgcaataaatccagtgtggtaaggaatgatagaccttccgaggccactggccaaatgaagtgaaaggagggaaggaaggaatccttcactcagctaaattatgtctttgggctgctcagacaagtccactaaattagcaaggtgcttgagcttcagcccagaatacgtcattggattgtgctgtttgtattgtcttccatcacaggacctcctctgagggagaaaggtgaagtaaatgaaatgcaagcagtggctgactccctaaagacaaaacttgctttttccagagaacttaaatattgaagtcttaattggacatgacaaatcttgattcttcgatgaataaaatccaatagattttggacttttaaaagcttttctactggttcaggagttgaccatgtttatcatgctggagtgtggtttttagagcagggcttgaccatgttcagatgttggagtgtggtttagagaacaacatggggagaaagagccagttaagcaaaagaaattgggttgcgactgtttgtttgatcaccagattgtggttgttgttttgacttggctgatgtatttgattttgagggtggaagtgaactcttctatgagtatgttagatttccctgttgtgtcttgaaaattgtttaagaacagattgtccttaaggaaacaggttagcaagtaatacatagcagagccctggtaaaaacagagtttaattgttttagaagaattcactggtggacattttaaggggaaccaagtataccagtggtgaggacttcctctgccatctctagtcatatgtttttcttttctgtccctttgcctttgcccttgagtccttagaagcacagtatactacgagctatatattgtgcttatttacttaattacatttttatgcttgattttctaaatatttgtgaagaatggtctgatcattaggttacattaaaaatcacctcatagtaaaaaataatgtatatttatagaggacatcgatgtttaaagacagtttaaaatttatgtactttcgttggtaaaatccaaggcagtagctaaggcatgtgctgttattttcactttgcaaaggagtgtagacatagaattccattattttctcaagtgcctgtagctagttagtgctttgtctgtgacctactctactattatagggccgtgtctgtactatgtctaagtcccccacacttgaacagggaaagggaactcccttttgtagagctgtctcacactgtcttcaactgagtcttgagttaagtttttgctttctctctcccatcctccctttccccaccttctccctttggatagaaccttgagttgcattcttattagaaagctacaaatggggcaggcagtttaggtttctttgctgtcttatatgggaaaaccatgtctctgtaaactttatctcaggaaaagcctaggactgctaagtcttctgtggaagttctcaattctcagataaggcttttcatagagaagctcctgcattctcccccacatcttaccctctgacctttcctcctgccttgtgtgtctgcccccacatgttcccactgattttgagacttttgtccgagcatttttttcctccaagttgtttaaggacagacttaggtggcagagattcaatttgcacaaaaccaatgcatctacacactcatcacatattttccagctcttcttgatctcagttgtatcagccattggaggagatgctgcgggaatggaatgtgtagctgacatgctaagtgccattaaagatgacatagtgtagtgaggtaaatgtctctctgtttttcatgcagtgcatatggtaatgttctagatatgttgtaggaagttagatgaaagtctttgtctcaggaagccaaggatatctgtttaggattgcaggtgctctgcatgttcaagaaaggcttgggcttctccatgaaaaaaacaaacaaaaaaaaaaaacaaaaaaaaaacaacaaaaaaaaaaacaaccaaccaaccaaccaaacaaacaaacaaacggtagataagacagtcctggtagagagggatgaatgagcctgtccctggcacctggaaacagagttgtgtaaatcgacagagtggcattcgactaagtaaagaaaagcaaaagttctcatcaaaatacagatgccagtcttaaaaaaaattctgtgtaaccaaattagccaaaatattcttaatgacacacacacacacacacacacatacacatacacacacacacacacacacacacacacacacacacacacacacacacacaaatagtgcctgtcttcaaaacttacttccaagctatatctacccaacaggaagctacaagcagaaaatctaacatagagaccaatggaacagaagaggtattacagcaggtactctgtgagtttatagccaaatgatgcttctcagaatcatgaagaacatccattggagcaaagacattgtcttcaggaaatggtggggggaaaatggatatttgtgtataaaaaaaacttggtgtctatttctcactaaaaattcattaaaaaaatcaaataaaattggatcaaagacctaaatatgcaacttaaactgtgaaacagctaaagaaatcatatggaaaacaattcaacacattggtgtaagtaaaggtatttttttctaatgaaacccccaaggcaaagtcaagaaaagtaaaacagaaaagaagagataatctcagaatcaagggcagcacaataaagaacagtaaatgaagtgaggagctagatagacaaccagaagagtgagaagcactgcagccaggtatctgggaagcgcttcatagctaggatacataagacctcaaaagaaagataggactttatccctaaaaacatggaaaatgacttaactaaatatttatcaaaaaagatgagcaaatagtcaacaaatatatagaatactttcaacctcactcactactagggaagtacatgtcaaagcaaccgtgagctactatgtcacctattaaaatagcgatgagagaggagcagtaatgggtgatagtgagcttgcagcaaagctcaacttttccagtgtgttgctggcaatgcatattcatacacacacctgagcaagaccttgttgtggcttcctcaagctaaaaaaatgacccggagatctcattagtgagtatattaccacagaaatagttacatcaagaagatatctaaactcacatgtttattataccatattaacagctttcaatatatgaacacaatgaaagtgtctgtcagtgtgagaatggatggaaatgcacagtgcatgaataggtatgtaaagaataaaacatttgcagcaatatgattggaggatattctcagcaaagatacaataatgcacatacatgcttttactcatttgtaacaactaaaataaagtactctcatagaaaatgcagtggaatgggctcatctgattatagaaagggtcctgtggtgaggagaagctgagagatgaggggcataaaagtataggtaagatgaagacggatttaccacttcatagcatagagacaaagtctacagtgatctctggtctctgatctatttcaaaataatttggtccaagacttcttatttccttattataggaaaggttttggtttgaagaagtggaaaggataattaccctgatttcatcctttcatatttatatacatatgcaagattatcatgtacctatagacatataataacatgggttattctgagcgtctgggctaatatccacttatcagtgagtgcatatcatgtgtgttctttcatgattaggttacctcacttaggatgatgtcctccagatccatccatttgtctaagaatttcataaaatcattgttttaatagctgtgtagtactccatcatttaaatgtaacatattttctgtatccattcctctattgagggacatctgggttctttccagcttctggctattataaataatgttgctatgtacatagtggagcatgtgtccttattacaagttggagcatcatctagatacatgcccaggagtggtattgctgaatcttccagtagtactatgtctcattttctgaggaatggccaaactgattaccagagtggttgtaccagcttgtaatcccaccagcaatggaggattgtcagtttgcaaaacacatgaaactaaagaataaggaagaccaaaatgtggatacttcgatcctttttagaaggaggaacaaaataaccatggaagaagttacagagacaaagttcggagcagagactgaaggagtgaccatccagagactgccccacctggcgatccatcccataaacaaccaccaaacctaaggactattgaggatgccagtaatagcttgctgacaggagcctgatgtagctgtctcctgagaggctatggtgatgcctgacaaatacagaagtgatactcacagccatccattggacggagcacagggtccccagtgaaagagctagagaaagtacccaaggagctgaaggggtttgcagcccccttggaggaacaacaacaatatgaaccaatcagtaccccaaagctccctgggattaaaccactaaaaaaaagaaatatctggctgaaggtcactccttcaggtgggtctcatggctctacttgcatatgtagcagaggatggcctaccttggtcctgtgaaggtcctatgccccagtatgggggaatgccagggcctagaagtgggagtgggtgggttgtggagcagggggagtagggaagagagtaggggatttttggaggggaaactgggatgaggataacatttgaaatgtaaataaagataatatctaataaaaaaaattcttatttgatgttactgctaagtctacccttctggcatgtggctttgcccatagttgctactcaagtatcatgtatttaaaataaaataaaaaaaaatatatatctcaaacaaagacacccccccccaaaaaaaaaaaaaaaaccaaagcaattacatgggttagagacgctgtttgcatccaaaagatattaattgatcagtgtatctggggtggtaggactataacccaagtttgtcatttttctctctattcttaaagaaggttcatctagctggagagtttcttctttccagaatatgaacctatcaaatctctgggatctccaaacaaggcttgtctcgagcttccaatattcctctaaactccagcttgatggccaggggatgtgctggttgccagtatgaggcttgtttctgcactgtctgttttatccattagaacatatatgctttcccttggccaacaccacattggttacattaccatagtcttgcacaatcttgtgaaatcagggagcgcagtcctcctgccttgccctcctttttaaagatggtttggttatgcttatggggtggagtgtcagggtgttttcagtttgacaactccatagatagtgctttgaaaatactagcttgggaaaaatggaaaccacttagagaccatgccttttgtctaaatatgagataactacattaagaatactgtcttggtagcagtagaggtgaagaatagtgaatgaagttttcaaaagagggtaatttgatgtggcttccttgtattcagagcagatggctggaacaaagaagataggcatttttcagagtgtttgatgagaggaaatggcaatggagtaaacagaaagacagaggacatggaatgaggccagcaggtctgcggctaacatagctaagtctggtttgttgagtcctgggctgtaaatccagtctgtggtactcagctgatcactgagtacatggaacatacatggggcaggatcattgagttccatgatagcatcagagtcagtgctgcctggaagtggcatattcacttagtttcctttttctggtacccagttatggttaccatggcggcagtgatgcaagcagaggaaagtggttgcggaaagtggcaaaaatgacctggttaaagacagtttcgggaaccttctgcagcctagtgaggcttacagaaaccctgctggatggttgttgacttgtgtttgattttgaagcgactgttcttaccatggttggaaatcctttgcctccatctcgctgagcctaatgttcctgttctccagctgagagagactaattcaccaccttgtgttgtaaacactcactcattttaactgattacacctccaatgattctcaaatcactaaaattactaattgctattccttacacatcaaagagtgaatcctgaataattaaccccaaataaaattagatgaattggcccttttaattagagtccctgctgctgtttgttctgagcttccttttcttactgttaagagacttttagaatgattaaaactgtttaaggcttaaacagccagtgaccttttaatacaatataaatccatgaaagcaatatttcagctagcaggtggtgaagtaaatttttagagcaagtacctgtcagctccagtattcctgtgggggtaaatgcatgccaaaaaacaaccaccttgaaatgaaatgagtgtctctatttgattatttttatagcatttatgcatttgctaagcttcaggcttgatgaaataaatggcagggttgaaggagagtgagtaatggctggcatcattttatataaatagtaacgagaatttctcagcaagaagaacttcaagtgcgtagaagatgaagactggagaaattgcagaaggctcctaggcacgcagccatttatgtctggatttcctgaaaaagaggaagagacagcagcatggagaagtggagtgctgtgggacttctgggtcgtggttatggacatggattcccagcctttccctgctgcattcagactgcagatctttcccgtgttcctttcttctccatggaccccgggttgttctttttcagccttcaagagttgtaagaggggccagttcttcaaaactccccagatatctcaattcttcacctcaaatctgctctggagccttctaaactctgtcctatgctttgagctaaggagattctgagtcagaatatatattctacacaatttgactacttgtagccagattttctacactagaaggaaagtctctataacctgatgtgattgggttaatttaagtacttttttctttataatttaaaagtaaactttagcttcccatggggaaacaattgcaggttttacagaaacactgacaaactaatttcaaggactctttttttttttaaacttaacctacccaaatatttgcaacttgtatgatcagagtaggtctacataacacaaggaattaaccaatgcaacttaataacttatgtagaattttttcagatgtgatcaggtgccatcttaatgtgtgtcttttgatctcaatttatgttgagaattggcttttgtccaatgtttcttcctatttctaatctcagataatttttcatggtgatcagtgatgcttacctggaaataagactcagagtctcctaggatactttgtaaaatactttttttgctccctaagcaaaggttctggctttagaattacagagtagcaccttctatattctatgtggtagatggcaatatgtattggttattcttcattaatgtattcttattcttagaaccaaatcagtaacatatgtatatgtgtgtattagttagtttctatttttctataaaacatcatgacccaaagcactctgggaatgaaaggtttgtttcatttatacctctatacaaagtccatcagtgaaggaagtcagggcaaacactgaagctggttagaatcaacctggaggcagaactgctttcgggctctgtcagggagctatgtcctgctttgttccttccagctccctcagtctgctctcttatgtgccccatgtacctcaggacaaccttcccagggacaacatctcacacagtgggctcagctctgctctccctgtcatgaatccatcaagaaatagctctacagccaggctgataggccaattttattatcacattttctttttaccagttgtggttccctcttcctgggttactctggcttctgtcgagctgacaaaaacaaacaataaacaaaaacaaaccccaaaccgccagacagcacaacatgtaaacaagcatgcctgtgggtatggagggacaggtagaaaagagatgaagaacctgaagagaggaggatggcaagaaccgtgtgcaggcaaataacaggacttacaaagagggcggaaagaggagtggtcctctactcctaagtctaccagcgagttttccttttgatggcaatatgtgtgtaaaaatagagtaaatagtgaaattataagatccggtgcaaagctttgcagtgtccttctggaatggctgcttttactgaataggacttcattgacctgtctgctctttgggtaaaacgtgattggtggtgctttttattcactccctttcatacagtaaagtttaaaatacaaaattaaataatgaagtgtgaagtcagattgcttccacatctggagcactgatgtttcggtgaaattcctagaagatcagtagaactttctggatactcattgatcatgggtgtttttgcaagtctagtctcagatctttgattattgaagaaaaatccagagcaaatgcagatgtttgcaacccttctggaggataaaataccctcagaacagaaaataatttagggttccggacttgccatcatacttggcagacagactcggtaatttaaattgtaaacaatcagaaggaagttaagcaacaagagcaacagcagcagtaaaaacagaaccgacagggccattaaaactgaagtcctctgctgcttggtcaccaggaccataacccctggaccactcatgttagtctgctaggtacaagttttgctataccttacattaataattagaatgggcaaaacttgactatagacaatcacattatttcacagttcacttgagtttatattaaatatgtatgtacaatttctacattcactatagggagtatgcagtaaaaaataagctcatgataaattattcaaaaaacaggatgtagggctgcagctatctcctacctggcccagttggggaaaaccaatagataggtagtaaaactgggagcagaatttgtgcagttgtggttctcagtacctggtcattgttggtgaggatggcaaatacaggatcaacagagctacaactctcttcgttacccatggatgcactgtgtggaggacccgctgtcgtgcaggcttcatgctgtccttgaagagattctgcctggcatggccactactggtcatcttcaaatgggtgggatagttcggcaagattcattcagcacagtaatattcacttgccagtttctgagttataaattaagatttttcttgttgcattattgtttttgtcttttgatgttgggttgatttttatccataacgactttcaaatttttatttcgtcttttcacactgagaatgttcacgttttagtattggggctgagggtgtctcagtaactggtagaagactaacacatccaattcaacctgctgtcctgtttacttttattgttaatgttcatggacatggtggctgtttggatcgcagttgctctgtttttgtgagacaggaagcacctgggacatttgtgagtgcatgcgactctagtctacttctcagaagcatgctcttcttcaccgtgtggatcgtgtggaatctgttctgtgttttctcctgagaactggaatctttacagcacggtgctatgtgatagagatgtgggatatgctccatcagccatggtacagcagggtctacctctgggtggagaggttatctgtgagtttaggaagagttctgatgaagttagtgtagtcccagaagttcagtattagctaaatatggagagagactgtccaatttaaaagtggggagacgtcatctttttcaaagataataaatcttcttgctttcaatccgaggatctcaaagagcattttgagctgagttatttagaaagatgcccgcacattacattttagcttgggtaaatatagggatgcattaaaattaaactctggctttgaggagattctgcgattcatttcaaagtatcttccttctgattcttaaaaatggcaaagttacagttcatatttattgcatagaattaaagataaacagagaaaagagaaagcagcgtttgttgtgccatgagctctgggtaacctctggcaacatctagccatgtagaaagcaccgtgctgcaagcacccttcggagcctggccttcgtctcctctacttggtaatctgctggttcttcctctcctgcccccagatattctgtgactcactcccttactccatttacatttttgcccaaatgccaccctggtgaggtatttctcaatcctgttctttaaagctgcaacaccctgctaccatcccagctattccccttccttcctctgccatttctcctcgtatgtattgctacttgacattcaactcatattatctgtttatttcttaatcattcttttttacctgctccagtgcaggttttacagggggcaacatttccatttgttttgtgcgtttacctgtttgtacctttatatggcagagcctagagaaatgactggtgcacagagggcactgagtaaatgatagatgacagaaacagaagacaccatcagctgggtggctctccggctttccagtgtgggagcaactgcagtcactgtgtaagcagtgctatactgaggagcattattcaattattgaatgtgactatttcgtaattaaaacctataagtacaattgagggtttcataccatttgccatattttgtaaagggacctgcctactaggatcacatacagctctttaccggcttattttcacatgatatttccagttggtggatggtgtttataaatcctcatatgatgatgttgaatgtgtatttttgatccatacatgtgtgagggaaagagcaaagcagggtaattcccatctctatcacctcagacacattttcattagttatcttaaccctagtgttttcttaaaaataacactgtctggtagagttctaagtacagtcccaattagtaatttagttagttaggtgaagaaaatgaagattgaaggatagaatattaatttttctaatatcttgccatgtttgtttacacgcccacattttagattgcccagatagcaactgaaagaactttagtcagtgtcacttatctccttattcatggtgaaggtaggttcttcaggagagggattggtgctattttcatgacaatgaagacaagacagccagcactagccatgaatggccttgagagtgaacattccccaatgagttctcacatagggagaacatgaattcaggctctgcatattaagggttctgtgacactcagtctttgtgtgggtctctgactattcttaggtattgtgcacatgtcacatcctgtcccctctccatgtaacttcatttcacgagccaccacactctgtgaaccttgcaaaatctggtgtgttctgttatgtggcgttgagaagagtcttccaggctactagtatcctgccagacctagaaaccagacacggtattaagtctgaaagaagagattcaagaaaacactgatgtatatacttctttcttggactgagattcacgaaacataacggtccacacagggcactgagggaggaacatcacacgttcaagcccaaagatggagaccatgttacaaagaagagggagggagagagggaagaccgagattcacataggagtatctggatcgatgagcctggcaaactcccctagtcagttaaaagacaggagctggatagagtgaggaaaagcttcattacttagagaagccacacattcctagcttcagttttgaacagaggtgttcataagttgaaaaggctgagaaggtcattcaatggatgagaaaggtttattttcttggtctgtcacatcacagcactttctgatggtttcaaggcactgctcagctaaatatctgatgaagacataggctcctcataccagttcatttcatgggcttacccgattaggatgcccaccagctctctccttccattctcagatgcatgtgtggccactgtcactgtggcattcaaaggtgcttcctgtcccctaaagaacttaaaacaaatttaagagtctttggagagcgaaggagaaggatctaggtgcccccttttcccagtttgaagtaagagggaaagcattgatgattgcagcagtgaaaagagaagactttgttatattcttgcctccaagtctgctctctactggcacagttcagcttcttaaaggccgcttaccatttttcaccctctaaggaatttattgccatcatctctgtgataacatacattttgtaggtttatcacacatctatcattgagtatgtttttctattggatgttcatctatacatcagaattatggcatacagatgatgacaaagagttgtgcaggttcttcattccagttcctacagctagggcatttctcctccagagcatccccttccagtacctccccctttcgtgcccaccccattgctgcattagcatgcaagtcccagtataggatgtaggaaccgaaacctagatgattgaacttagtgaactgaacccttggttgtagtcagtggttgatggttaagaggttaacagctggcttcttaagaacctacatcatctttcttagaattaggttctttgttgttttcatattatttctttgttaaagaagtcagtttttctttctctttaatccttctgggattaccatcagcctgtgcatctctttaagttcttatagacaaacaggataaaggagaatatacttaggaggtatttcagagacagagttgtacctttatttttaaaattatttctgtgatattttggtttactcatatgcatgttatgggccttttgagtcaccctatatgatagggataccaagagttcaggcaggtttgagaatgtctgatggtctgataatttgaaatgccacatagaatctggtcaattacacattcccctccatactgcgttatagagggtgggagaagacagagtgattgctagaatctaaacttaggttgtgaacaaccacctagtcatggcttcatggctcaataccttgtgaattaatttttttcattcactctgttttaaggtagaagaggactctgttgtagtgcattttccttcagagttaatgaatactttccatgagctgtgtagccaccccagcatttctccattttagctgcatgtggagtcccctagatcaaagaaacactgatgccacacatttattccaatccccaggattctcatccaatcaaatccagaggaggtagtttggacagccatcggtttgatggctttcttacagattccagtgtgtggacaagggatagtgaatggatagtttcaaattataatgctaaaatggtaaggaaagacttcgagacaaaagaaatccctatacaacaggagtttggaacctttcaaatcctggggttctccaaaggatggaaggtactttgccgaactcagtgaaacttgaactatgttccaggagccaatgccactgaagttacctaggctttttagaagcacaaatcattggtccttccttagaactactacattaaacgtctttggaagtgccagccagaggtatgaattttataactcctctctgaaatcctgatggattgtgaacatggaccagcgtttgagcaaggttatatcatgacttgggggtgggggtgatgatagcctggtaaaactgaatggctctagagacactgtccttggctgttgtggcaggggttagatctgacagctcatagctactcctcccagtgtagcaacaccaccaggtgtttcagagcccaataggctaccatcatttgcaggatacacctttgcagttttagactttctttcctctgagatacccaagttgtcacatttttatattattcaaaagttaataatttgcttatggaatctgattcctatagcttggtgccatggtgacaggcgaggaagaagcacttacatgtaagggatacttctaaatgaaacatcaaaactacatttttaaagggagaacaaactgccttttaaaatggtaaaaaaaacaaaacaaaataaatccaatgtttttttctagtatatctgatttttaaacaattttaaatattttataatatagtcatacagatttgtatgtttgcttcccacatcggtggttacatatggtagtaacctgagccttcttgatgactgtgttgtacttagatatctagatcatctagtttctgttcaagtgtcccctaatctgttctctggccatttatacacacagtgaaagctgaactcgcaggctgtgtgtcagaccttgctagttttccttacgctcagtgttatttggagttttatgttatttgctatgttgtcgatgtttatattcaacatgacttgtgtgcacatattctcctgccttactacctggaatgggcttgctgtgcaggtcatactgtctaaggtgatgctagtacagcccccattttccctacctggatttaagctttattttatgttaacttccaaaaatgtgtcctcataaatgaacctattacccttacatgtatacaaatcttttcttcttctacttgattaggattttattagtgccatttatcaattctaataaaattcagtatccataattattattctaagaagtcctttgcctctgtttaatgtacttgacctctctatactaactttaaattatgaaatcaggtcttttatcttatgaaagctaaggctaacaattaatccaacattatctaagtaagggaaattttctatataactcaaacaagtgggtctaaaacattgacaataaattgccagccaatgtatcttttaaagagttctataacgtctcagacgtgttaacctctcatatgtgtccccttcctgtaggtgatcttctcccaccgccaccaccacctctagaggatcctggtaccatcccacctggtcccggacacttccctcctcctccaccactggatgaaggggctttcaaagtgcaggtaagagcagtgatagaagtcaggtttataagacaatgccaggaggcctggtttctgtgggtcataagcatttatccagagtatagaaggagctttgaaacacacagggacttagagttctttaatgggaaaggcccaagctacacgtgacagagtcctgttggcttacactttgaagtgctggactattttacctaccgatttcatttaaaaactgaagttgatttttttttcttttatgaaatactgtttgagaagtccactttttttttcttttcttttcttttctgttttttttttttgaataaagccaggcctttaaaaaatatcttttctttctacatttaagctatggattctatatgagaaagagtaatagttaagtctatgccttatcagtgtgagcgctgaatggacaacaacctgttttcactaaaataatactaagacgctgtagggccttctaggtgtcttcgacgaagaatgttatagttgtgtatcgttgatatgtaagcattgtgtcctggagaggacagattgcagagtaactaactccagctcagtgcacaagtgacaagagaagtatttttgctctgcagcaaggtgacctgtgaccagccactccacttaaggctgaagacttcattcaggattgaaacattataacatcatagacattgccattcttagataagataatattaatatagatacactggagacaacaatcaagaactggtctttctctaaatttctcgaaatgctgattgtcagatgaggtagcagagtgtctggcacttgcttctctcagtgaggcatcagcatcttgtgagttacaacacaaaccagataccttgtgttaatgttggtgtctggtgatgtctgtgtgctttattctgttgttgtttttgcctttgtatatgtccccagcgtcccatatggaatgtgagggaggagaagctgtaaaggagaatggcctaggctctcatctgtttacttctttcttttaaagtttaggttgggagagcaaagcagaaattattcatttatttcccaaatagtctttgttcctatgcagatgttatttgagcactggaaatcctataatacaaacagcaaacatagattatgtgcgatggaacttccatgtaaatagagtacagtcattgcacccctggctggggtgtgtgccaggcgggcaggcaggcacagggtggcttttaagagtaacttggtaagtatagcatcatcaggacagtgccactcaacaaaggcttacaggagaaaagacattatgagccagatgcattcctgaagaagtatgttttcatgaggtttggccatgttttaataaactatttttgttgtctgcttttatatgccttgttttgtgttgtggtatgtcttcctatattggttaatgggcataattttaaaattctcctctgttttcattcctggattcttactaagtctgttgtggaatattttgaatatttgccttgccgaggtctgaaggagttgagaactaagttctaagttagtgattgtgggtagatccgtgagtgctggtgatgctcacaaataaaaagaaggaaaccacaccttaaaacatcacagcacaccaatgcctctgaaaattctggtagtgatagctgggtgatagtttgatattcctgccaatattgtgcaaagcaactcatagcaatgataatattaagatcaatattgatagaatatgaagctgataataataaagttgacatagatactaggtgaagttacaatcacaataacagtaaagtcttgtccatggattctatttaaatgccatccaacccaaggacagagtgtttttatattgattgctccttgctttactttggtctttgttgcataattttcattgtgaatatcttttatatcatttaaaagctgtatttcagtttatgcttttgtagggactacgaatgtatcttctttcttgattactgtttcagagagttggcttttaacataaataacctttatatgtagattttatatcatgaaatttaattgaatctatttattaattcaatatgatttctacagttttcgggttgtctctgtgtgtgataaccttgtgtctgaaacagggacaattcatcttccttctttcccagtctagaccctctttaattcttggttttgcctgattcctctggtagggcttgtagttctgtggtgaatggcgttagtgaaagtggcttccttgtgcggttcacagggctttcatgaaaatgacaaaaagtctctttctctgaggactttgttctgaaaatgtactcaagccatggctttgtttttgaagaggaaggaaataaacaagaagcctgttgccatgttggcttgtattctctgtaaaacagaagggatgaggataaaaaataaagcagtgtttgccaagtggaaaaggacaaatctggtagggagagggtgttgtttttgaggttcttcctatgacattcttggtaacttagaaatgatgccttggccactcttgggccatagtgagttggacttgacagtggttgaccctgctcctactgtacagcagctccctttagacagagctcagggtgcctcagtctgatcactgggaacaattttgcacatttttttctctcagctctggtaaaacctcattgtgccaattccaaatccaaactggtaaatgtgtgttttgtgtagaagtctgtttatatttccagccagactttcagcctagagccagaagactgcctactaacttggacttttgcaaggctgaaacataccacctccatgtcattgactccaacttgatattcagacttctagataatagcaccctctgaaggaatcaattcccaaccctctttggaaatggggagactgaggcctaaagagatatgtgtagagatggtacttctgatagaactctcatcaggaagtctctcctcctggccataaacccccaccccccaccccaagttgattgttttgtatgcttgtcttagccctctctgtagctagcttaaggctccatgatggaactgctaaaaacaggttctgttggagttttgcttgggtctttattttgataaatgctttatatatttttgtacaaaagcaaatatttagtgtaaagaattacctttcttttgaaaatgcacatttttatagtagagatgaatctttgaagacaaatgagagatttggttttcttttccagaataaatttaacttttatgcctataaagtttgacctgaccccttgttagtcccttcattcatttgtcattcctcattcaaaggaaactgaatacactccataagtagacatgttatgctgtagggatgttagccttaggactgggctttctcagtagagtgatccaagtgttaagtctgtgacactatcttatcactttgctctaattgggtgtcaaagtttgcaatttgtcttttggtgagcctcatgaacaggtgcacagtattgcttatcatttttatgagaggacagaatatctttccttaggtcttttgaagtatgttttaaagtgtcttatattcctagcaattggacttatattttttaggtttttctattgtttcaatcagtagagcttatttaattaattaatagattaattatgacatcctgggtaaagtttcccccttactcttctccctctggctcctcctttatactcctctaccccatcccctttccatatcttagtttctcttcagaaaacagcaggcctcccacagatatcaagcagccacggcatataaagtagtaagactaggcacctcatctcctattatggctggacaaagcaacccagtaaagcaaaagttgacaaaagcaagcaacagagtcagagacagttccatctcccactgttaggagtcccaaaacaagaccaagctacacaactgtaacttggccctaggtcagacacatggagactccatggtgggtgcattagtttctgtgtgtccgtatgagcctagattggtaatgctgtgagattttttgtggtgtcctttgctcctctagcttctgcaatctttctttcactttttccacagggtctctgtctctgtctctgtctctgtctctgtctctgtctctgtctctctctctctctctctctctctcggtctctgtctgtctgtctctctctctctctctctccttctttttcaagaaaaatgctataggtatagtgaggaaatggtgaaggataaggaggtagatgagcttcaacacacacacacacacccacacccacccacacccacaaccccccaacacacacacacaacaaggaaggggcaaaccagatgcagatggttgcttggtaggcttcccaagcatctgggggacaacctggcactctggatgacactggcttgatcttttcatgacctccagtaaagacctttgactaggccttgcatgtggtctggccctgcagcttgctttgcttgcctgttgttcagcagttgccatcccctggttaacctgtctctcttgtgcttacttaggccagatgattatgcgtgctagtgtcaagttagtttctctacggcaaaatatttttttttcagcactgtttgtttcagctgttaaaattttcatattcaaatgcaatgtttccttttaatatttattgttagtgcctgtcttcctatacttttggaaaataatacacaaatagataatgggggctggtgtggatgtgtgtgtgtgtgtgagagagagagagagagagagagagagagagagagagagagagagagagagatgtagtgtcccacaaaatgctgataaacaaagctgtggaaagaggctgccgtttctaaggataaagtgaacacagtattgtgaactatgaagaaacctaattcaagtctgaaagtccagttattatgttattatatatttaagcaaactcaccttttttgaaaagagtttacagccagtatatgtgtatgatggctaataatcaccttcctgtttcccattgtgcccatttttaggcataatgacctcaggtccacaaccagcccactttcatttgtgaacccacagtgactgacagctccctggatcatgtttggacggagcttatcacagaggttgcctttacctctgtccatcaacatgatgagggaagaggactctgatgtcggagcacatttatgctattgagcctgagaatgtggtagtggggagtgtgtgatcatgagtggatgtggcatcccactctgagccatgtgctcttttcatcaatcgaaatatataagaaggctgaggatgctctgtgctttgtgaccctttaccctcttccttctagatcagtggatgaagagcagcagtaaggaggttgcttgtgtcataatttctcccttcctgtgtgcgtgtgtgcatgtgtgtgtgtgtgtgtgtgcgagtgcgtgtgtgtgtgtgtggccagactgttgggttctttgccattttctgatctgggccaatatgatagctaaacatgtatgccaaacattgcttttagctctgcttcagactctggttcggcatttagatgtgagcaggtagatttggggattctgtttttgtaaaaccgttttggacatcaagtccagtgttaataggagctactctagtaattgctttataataattaatctttcatgtggtgtcttcctccgccttcttccttttcttcctccttctcttcttcacttttcttcctttttgaaggaactagggctttatacttgccaaaaaaaaaaaatatgctactggtgaatagtatcctcaaatctttcctatttttcagatctattctactgggtatggttgtatacacctataatcacatccaaggtcttaggagtctaaggaaatatttcaggccagtctgggatagatagcaagatcccatttcaaagtcaaaactaatgattaattcacattaggtaagcttcttgcaatttgatcctgaaatatatatgtaaacccagcttcaccaatctgctaccttagacaataacctaagatacatccatgttgacagtgagaagagcttcatcaatgagtagtcaaaaaacctttgggggagttagtcctggccaatagaggtttattgtgagataaccaatgagtctggccctcacccatggcttctacctaaaaattgaaaaccttcaatagactccagagttccaaatctgtcatgtcatgcagaccatgacattgtggcatttgtttactggctgttacgtgcttcctactctgctgtcttcccagaacctggtgtctctcctttgtttcccctcacaagttccttccttacagcatcttctttctccctatttgtacattccgtgcccaatgagatgccttcctttaaccctctctcttctcttactaggagcagggatatgaagggttcagctcagcggttggtcacctgatagctggatctggtgaagatcccttctgtggttaacaactgcaaggcccatcattgagaagataattcccattatcttccacagtcctcttcatggaaaaactgtcttcagattcgaactcagttcatctcaaagtttttccatcatcttattacgagagttacatttggttcaacacactgtcattttctgcaatcctgcattgaaatccccgggtcctttggtcattgtgtacatgtcctgttttttcctgtattcatcagcaaggtctttgggcttgagaatgagtctgatttgttccagcccatttattttactgcccatcatttcggcctattcataatacaaatgactcattgcttttattctaattttttctcattacagctaaatgtccctaaacagttaatgttcaaaaaattgttatttccttcctgtgcttctgtactgccagccacatggattttcttcttttattgaactgttcaggggacaccatgacttatcttacttactctcacaacccagtgacttctctgtatgatctttgctgtattgatatgatgcttccattcttaaacaataccaagttaaatttccttgttttatgtttgctggctgatacttgtttatctattgactggccagtatttttttttaattaaaagaagagctgtactttattttccactgtcttgttcatggtttcgaccagtcctgccttcttgtaatccttctctgtttctgtcatgacatacctgatgcaccattgctcaatgataaaaagctcccgtgtgatccttgggaacatgtttacagcttcacctgcaaaatgacaagttgaagaatattttcctagaaaaccattctgtctagcaatgtctacctcattgtaaatgctaccttgaaatccgactacagagataagcagctactgctgcttaatgttcccttcatctgatgtatgcatcttcgtggagtgatgcaattagtcctggacattgatcctgactttctgctatattctataaagttagaattgcagcatagtatagagaagtcctacagaagtaatttgatatcataagtcaccaactccctgatttatctgttcctattctaaccagttcttgttctgagggaacaggaggcctacatttctcagctggcccacctgttcataccaccccagttactagaagagctggtcactagctccgtgacaggcttctgtgttcctgggtgtgtgttcttcccattatcttccatttcatttccattttagtacccacccaaaatatgatgatttagctcctatgtcatccatagtccttattttattggaagaatatagattaggaacttagttgatattcatagattggttgttgattgtttgatttcacagtaggaaacttggaaagcagagagtgcgctatgtatcacacttaaccttttgctgctagtgtgagcttgcaaagagtttaccatgtactacttttgctggcatggggtgataaagataggaaatgggagaggaagttatatagttcttgtgcaaatctaggttttctatttttcctgttttgctactgtttggaaagtacagcctccgttcatggcagcctcacatgtgtttccttagtgccatttcaaaaagggggaaataaatatggcatttttttcatagtgagaatagtaaaatcacgaagatttcccctttttctgttggtgaaacttcaatcgcactaggcacagattcctctacttcagctatgtgtgccaaggcaaagcacacagaacagcatactagagctgtaaaaaccaggataacaagaaatgctacagaacccttacattgcacagtagtagggaggcctgggagccagtgactctgctactccacactcagtggcctgtttacccagctaggtattgtcttcagacaaaggacgctctggacttcctatacagggaagctgtatttctttgataaagctcttccttccacataactgtgcatggtgaaattcaccctgagtgtcttacagtccctacacacagttctaataaatgaattgttctctttggcagttaggatggcatttgaggaagttttgtaatctaaagctttatgcattattagagagcaataaaaagctgtctgttcaagcctatggtgatctgctatggactccaaagggtggggcccaactgtgcagcagaagaaacagtagtagatcttgtagtggccctgatggctgccattggtaattctggaaaagagaatggtttctggaggatgtggagaacacagaggcaggatgcttacaggattcttgctttcttctaggtgggtggcttggcttgtttttgtgtttgtggaatgagaatattctctgaggcaaatgttaagtgtgtatttctagaagagatgttgataataatccctcatcaatgaacagttctgtgcagtctccagatagtattgtggcaggagggtgaaaataatgccttgataagtcctggatttttttgtattgctattgttctttaattaaatgtgtattaagctccaacaaggcgctatgaagaatgtcaacttacagatgattttcagcatactcagaagatttataaacaccaataaatggaaagtcacagcccccctctgaggtggtaaacatatttgttcttcctacaaatgagaagtgcaataggctgtactcaacccgaccaggactgagggtgagaattgagaactgttgaacagagagaaaagcattttccatcactaggaattggattagaatgtattattaaggaactatgcctaaatgtgcttagagttgtgaggttttaattaaattgttccagttactgttaacatttgggttagaaagaggctgccaacgtatgacactatgtttcagatttagtgtcgaaaataattgggaaagagacagaatacttgatactgaagaatttagatttgttcactctatgggaggtgctagggatgtaccttctaatagatatctcagctatttctacaatcaaagatggtatatgttccctttgaaacccaattcttgcttgtctttgttaacatagcctttccttggaaccaggacttttcgtttacacagtaaccatttccagaccttatttagttggtacagttacagaaggcctgtcacatgcttaagttcctctcctgtcacctggtctccaagttatctcctcaggttgtgatattattcccctgtttcttaagtaaaaaccaaaatgaagagcacatggatttgttaagagtatgtgcctttaaatccttgccatttaaagccagtgggacttagattccaccttaagtgtgaacagcaaacaggagacttaactgagaaagttagttgaaggcaaatatgtctacaaataaaactcatggctgaaagatgggagcggtggaaagtgcaggtggaatgaccagttcaggctttcagttttcctttgtttggtgtctttattcacacagactcagcactgagcccttgccaagagcacagtaggtctttgattatcattgactctcaatagtctgtgaacaaggaagcatttgtcaggaaggactgcactgcagaggcatgggcaccattcagactcaaggaaggatttataagttgagatgagagtagtgagacttgaagactccatcctctaggatggcaaagtcacctgtcatggccacctgtcaatttgtaatgtaccagctaggtgcatgctccagtcatgattgttggactcattgtagaatcatactcattcctgactaaggggagatcagataagtgtttttcttatttgttctcaaactcactttttatcagtggtaaccttggacataaaaataggaatttctgttgggagtgttaatgtaaactatctgagaacttcctaaaatatatgtgattcataccatgtgtttgttcccacatcaacacggaatcccaagatgcaattacccatgcccagtctctgcttcgtcatggggctgtgtttatcctttagctatctgcatttgggagtagggccaagcaccctgtaagatccgcacatgtgcacagtgtgatcgatcacacacgaccctttgaatctgaccttggtgtcgtctctcccaaagcacagccctgttgcacacacagtacattgcactgttcccccagaatcccctgttcttcagctgaacaccttaaatggtcttgtccatccaaggtcaagacttttctccttcgtccatgcagctctgtctgtttttcatgctttctctcttctctctgtttttgatttttttcatttcatgtcttttgtctcatattctttcccacttgaaaacttctaatgagatttgcggataaaaccacagtgggaggactgatcctcccttctttctctgtcctcctctgtgcctcttctccgtcccttctctttcctttaaaggccaccactttctactttgccatctacattcttgtccatcatgccagtacattcttaatatttaataacatttatagaaaagtgaatggaaactatcttacattaggtattggttgttagagagagtggtatcaaagctagggtttttgttgaaattgaaagtctctctttctttgtctctctcactgtctgtctgtctgtctgtctgactgtctatgtgtgtatataatccagaactaagtgattctcgtaggcaaataactgacttgagaaatacataactgactaagttatctccaggaatttgctcatatatccctccccatctctggaacccagatttaaaatagatggtggtatccaaattttggtccccttgcttctgggatgcaatgactactcttatgtcaacttaacatccaagatagagttatctgaaaggagggaaccttaattgaggaaatgcttctatatgacccaggtgtaaggcatttttaaaattagttattcatgggggagggcctatcccattgtggatatgtcaatccctgggcaagtagtcctggattctataatacaatacaccaagcaagccacggaaagcaaaccatgtcctatacatcagattctgcctctagaatactgtctgtcctgcttaagtttctatctggagtttcttcagtgtggaagcacaaacctgataaaccctttcctccacaagttcctttggttatggtgtttcatcaaagcaatggtgaccctaactatgacatggggcaagaactttaccaattttgccatttcccatatcaatggagcttttctttttatgtgattacatctatgacctcattcttgaaaatttaaaaaagctcattcaatctcagcttgactgtagaaaggatctcccctattttccaatccattttgatgtaaaccaaagtataagggcttagcagagagacattttcggctcgagctccagctgtacttcctgtttggatagactgtagtgcttccctcttggtctttggtattctgttcagcatgcacagtaaactccatggatttctaaggctgctaggatatttgctgagatgttgctgaagctttcctaagtgtagctacctctctgttgacaatggtaatgcagagagcctgtgtaggctgggtgctttgggccagattgctgggtaatgacggctgcatgatcaagagatatttctcagagtggaaaaggaaattttggaaagagaaaatggcacctagacctggggtgtttctttggcagctaacccacctgttattgctagcagatatgatttctctagtatttcaacaattcgtcataaaggttttgtccaatgtaggcctccgtgataaaatgtgatgagtgccttaccttgccctctcttaactgcttactggagtccagtctcaccttgttgcttctatttcctttaagtagcaggtgacttttaaagattgggcttcctctagaaaatattgttactgattctacttgaatatgtcaagttgtgtcggcaatgtctgtagttccaagaatcaaaataatgcttaagttaaatggacacagaataatctggtcaggaaacgtgagtataggggaaaagaacaaaagctactacaaattaacttaaaaccctttatacccccatattgcaccatagtgtacagtcttgtgtatagacagagcatcaatttcttcttgcaagagagcagaaagagcaagtccaggctcttggtgaggggcttagaaaggacagtgatttgcccaggtttccactgtgcacgatgacagagctgagctaggaagagatgttcaggctaagcactcctcccatcccatctgtctctgttctcagagttctgagggaagtgggattggacagaagtggtgtctttggtgtaacatgtcgaagcagtttgtcatggtgagacaaacagtttgtcatggtgagacaaactgttggttatgagcttcacagggtagagccactacattgtttccttttcttttacatgagtgtataggattcaaggaactgtcatacaggtctctgtgtctcataattagcacatgactggatgacttacttaaactttgctttttgattgaaagaataagatattggtagatgctcaaagtctccttggaaagcgtattgacaatgattctaagacacctgtatagtccatgtagcactgtgcagtagcctgaagatgggctcttctttccttcatttcgctgttcgtattctaccaatgagactagaaatgagtaagttttgttttcttgagtagctctcttcttaatgttttctcttctagaaggggggataaaaataactttcttgtttatataatggacttctgaaatgatcctttgaagcaaagtataggctttggcagtgaaatgtttcatagtgtgtgcaggggagaggggggcaccttttagttttttagcattgttaacacgttgttacctctttattagaattttactgtctatgaagggatttttcagaagaactattttggtgcccctgtcacagaggcctaacgttttattagccccttgtcccttttcatgataatcattgttatacaacatgcaataattggcacgggacacaacagtttttcctatttggttgggggactttaccatggaaagaactcaagcaaaaaagatttgaaaaccatcatcaacattgtaaatatccaagtcctagaacatgtatgaatgtgacttcacatatatcctaccccagcttatattgacctgttttagagcagaatatacttaaaagttacatctgcaatacagttgttgcaagccaaagcattgtttgctttgttgctaatgtggtcaaagtatttattatgtagatatttactgtctaacacttagaaaatatgaatttattaatctctacaactttatgacatgcttggggatctaagttcaatattttaaacttacaaagctgacaaacattatatctatgtatcaaattctcatagtctgagtctagaatctttataccagggtttgttttgtgtttaaaagtctttgaggggcagttctttaattaaaaagtaataggtcatatattaatcatgtcctcagtttaatatatatgatgatatataatgtatattgaaaatttggtcattaaagtagatatataccaagttttgttgataaggaatatgcattttattttatctttttggatatggccatctttttctccttcatagtactagaattctgggaataatgaattttaataattataagaaaagtaatgtaattgaattcatactgactaaatagacttgaaagaaaataacagggacatttataatcatgctttgcttgtgttattagtttcctggattccctaaaatgaacttcatttctattcttaggttgttgtctgggaaggtattcttttcatagtattgtggcagagaagtgacgtccaggtcattgcatgtcagaacacatttgacattctgtatgacttgcgtaaggagtttcttgagatcttaaagtgggatttatatattaccatataaaacatttaacctaactttctttgagaagtttttggtgtatttcattcccaatattgagaaattacaaacacacctggggtattttagtcccatttctgtgatgtgcctagtcatgtcatgactaagcacgaataatgcttagtattgtatttttatattctgggtgtgatattgcatattgactatgattctaggaaaccaggttcccaaggtgaccttttaaaataatatttttaatttttaaaattataattacatcattttgtgttcttccttccctccctttaaccataaatcctcgttttaatttcttttaaattcaagggtctttttctttaattgttgagatatgaatacacacgtgcattcctctctctctctctctctctctctctctctctgtgtgtgtgtgtgtgcgtgtgtgtgtgtgtgtgtacctttctccttttcttcttttcattagcacagaagaaggcctccaacaacatgactaatcacaaatgcagtagttgctcctgctcccacacttctcactgaaatgaatgctcacaactctgtgcatgcaacgcaagatcaattcatttccactgataaatggtgaatggcctcagtggtatgtagccagtgaagccatgcttggtttaggcaaggcctgtgagtaaacactaaaacgcttgagtggaaggtctctaattggcagattattggcacagttttaagagtagcacctctcatatattgccgtttaatatatgggaagacttttccgagtctagggtacctttacagtagtagtgtgtctgatctgaatctaagactcaagttaatcaacttcattcactttttataagataacctagcccgacaaattggcctgtgctcaatgggaataagcagatcccagataatcttcatgagtgtgtgacctttgattcaattttgagaataaattaacaatagcagatgaaaagattgctcggactgaccagtgctgatacttgaaaacaaatgagaatgtgcatggatgcagtatgtagtatgtgagtatgtaggtgtgaagtctgtagtatgtgaatatgcaagtatgtagtactgccaatatgcggagcttctctggtatgataatatggtatgataataatactgacatatctggccatttgaagatcatgcaggctgcaatcgcataagttagggaggcaacgtcttataaatagttcagctgaagcagcaaatacaattcatagaaatggactgcaagtgggatgaaatattgaatttggaggaaagatctatgagcagaattttatttcataaaaatatgtttaactccttataataatgataaatataagcaatggataaatgaacatgctatttctaccttccttagtgccagtgccccgttttactcttagtcaattatcaatgtttgggctaaaggacagtccaccttgctcagttggttagtatagcttggcttatttctctcacatgccatatgtttctgttgagaacctatctttcatagtctgttttcatattcttgccagggtgaagtcatctccctataattctactattgcaacctaaaattacacttttccccaaatgtagtttgttgagctttagttattttcatatatgtctggggtaatggaaatgactcttctggaagttacattgtgtggacagttcagttatgggagtacagtgtgtggataccatcttagccctggcttttgtcttcttgtcttattcttgtgagctctgcacgggtgagggtatgacacactggcacccttggagtcctttgctaccagcactgtctgtgctgtgtcttctctgtaactctttccatcccttgattgatgcatgggcaagttttaagtcctacagcagctgtagacaagagtagaagcttgagagatctaatgggtgttcatcaaaacaggtccgtgcagtccttagagacaggaggagtggcccacacttagactggccatgtggattggctctcattcctcctgctccttcaacaggagttttggggatcaatttcccagttaacttgcatgtaggccttctgggacagcattgtttctcagggaagccagacttacaccttgggacctttctggctatgactggagagggtggaaaaccgttattacaatggttacttaatttgagtgcttgtgatatctagaaccaacattaatgaaaaacaccaaggactccttctaattgttgtttggcctctggtatgctgtttaaccattagctgacaggcagaaccatagtgagaatgtttgtgaggatgtaggattctttcagctgcatttaggagtgctttgtgaagagcaagagaggacataaatctgaaaattctgaaagtagatgagcctattaagaatagggtttgtgtgggaacccgggcagactccaggggtggagccaagatacaaaagagacaccttgaagggggaaagggtctgtcccttgttcatcatgaggatcaaaatgtaaacacaaaggtatgatatgaggtcatgtatggaagctgggggttgtacctgcagaagccactagaatgaggctgggacttgttggtatattgcatcaacctagtctgacaaggggaaatggggatcagctccacctctcagaagagcataggagactggagccagtggaggtctacaagcttgggctggtcacagttcataattagtcatttcactgtatagctcaggttaatcctatgacttggatctttgtggttagaatcctgtgactcaggccataggcagttagtatattttgtgctacaggaaagtacagaagttgaagaactgattatatcctgtctctttgctggcacccctagggaatacttaatgagtgatgcttacctccagaagaagaattaacaatagttatattatgcctattaatttatagttactggttgctataattagtgctgtttatgaaaatcatggtaattatagcactttacaatttaccaagtatgttcccatccactttcttatctgagtctttaagtaatctctgaccaagttagggctggtgatggtcacttctctttccagatgaagaaactgtagctcagggaagcatttaaccagactcaaatctagtgtcctccccaattcactgtgcgtgtgtggatgcactcctcaaatttctgcttatgataattttagaggctcagacaagaaaggaaattcacttggttctcagtagtcatcctgtggagtggtgtgccctgccttctcacctgatggtagttcagttatgcagaatgttctcctcgctctctgaaatgaaagggatccttctcttttcaatttgagtttcccaaactattgcattgtgggtaaatagctgaccctttgaggggcacattagtatttttataaccttaatacgttagtcatgggccagtaagatggatcactggttaaaagtatttgctgtacaagtctgaagacctgcgttctgtcctcagaatgcacatgaaggcggaaggaagtaatcaattctacagttatcttctgacctccagtgcagggtatgacttgtgcatgcctatgcacatgtgcccacatgagagtacatgtgtgcatacacacacatgaacacacacacagacctctaatactaatataaaattaaaaagttgagtaacactgaatctcagattctgataaaacacatttttttttttaccactgtttcccaagtgtgggctggggcaggtgttctagggtagtctttcagcctttgagatgtatgatagtcaacctgatacccatttgaatgaatgtatacccaggtccacatatttttaatcttttaatttcatttttagatcatatattagagtacttactggttcctattatacctcatgccccttacccaaaaactgttgatacaagaatggttacagaatgaaaatccttataacattgacagtatcattattcatcaataaattaagaaaattcctattgaccattgaccaagttcaggccttgatcaagatgatgggaaatagtgtgtccaaaacaagttccatctgtgcttcatcgatcttaccttattgtagggatgaggaggaccctacccaaatggttaaaaggacaatggttagatagtagctgctaccattagaaagataaacagagtggattgggggaattgaaagaataagtagcatctgcagtatatgccagggggcaaaatcatgaggtaacttctttggataacttgctaacaggtacccgtatttaggaagtagcatggtaatgtgtggtggtatcttaggagctgattcccaatattcaatatggatgtagttgatcttcccagtttgcctgatgtagaccaaggtgtattggggctctccttgtgctgactgcattgggtggactgatacatcagagttcactcaagttgtgaccacaagactatgtaaggctgagagaaagtggtatggtgggcaaagaactcatttgcttctgtttgtaactttattgcctcacccttcttccaaatcctagggccacgtccttgtctatctccttgctttgaactgtaggcaaactattcccttgcttttcccagctctgcccaatagttgttgaaaatggccaaacagtactactgtggtcagttctcctcttattggttctgagtgtgggttccatggaccattgacagatgagtaccattgctccccagctccctcacacattttcactatatgtgcttcctgtacagctctgtgacctgagtcctaagtgacctctttctgcttcatgtgttatgagctatgcttaggctgccactaaccagagacagatctctcgtgcttcatggtgccaagtgtggatttttctattgggatatggtttcccttcttaaccattgcttctccactaaagtaccatcaatgatttctgagtgcagagggcctcaattgtatggatcctaaagtgcaggcattgaggaattaatttctttcacttaaaatttcatcaaaatatctaagtatatggctttagagaaaaacattgcaagtttttttttctgtgttcttttctgtcagaaagtgttaatttcttcctgctcaccttactacaatttgataaaatcttaaaaaaggagagagggaaagggagagggagaaggagagggagaaggagagaggggggggggagaaaggaaacaatagaaaagagcaaatttttacttgagaaatttgaactcataatgttatctatggaagcttactgaatttgaatgtgttttcagcagggaaatcctggaggcaagaccctggaggaaaggcgctctagtctagatgcagagatcgactccttgaccagcatcttggctgatttggagtgcagctcaccctacaagccacgtcccccacaggtaggtacttctcacagtgctgcttgagcagtggtcttcactctatctagaaagtgaagtttcttctgagagcctttcattcttatgtgaacctccttaaagccagtggccctacctcctaatctgacagggccccattgtgtctcataagttatcaatgaagtcacaaccctctggtaccatctcccacatcttagcagacattcactgtcatgctaagaacataactatcagcttatactagttagctaccagtaacttcttaaaggtgcattgtcagcatcatccttccggaggatcccttcctggctaagtataggaagaagggtcaaatctgttgcaggccttctgtgtccccttaacagggttctagatgccaaagttaggcaggtccttttgccagtgtgtggtttgactctgatgatgtttttggttttctgattgacagcacatacacctctgtgtgtttcactggattagctaacaggagccattgtattatgttccctaacaaattacagagccgtcctgcttctgtgctgtcaataattcatcactcatcttcatctaagatcgaagtgtctttgttagacacatccctatccccttcccagtgcatggaatgagactggcaggcaggttgggaacaaaaggcaaaacagaccaacgtcgaactctagtgtatctgtgtaggctccgtctgtcccagcagtgcacatggactccatctcttcttcattggctcagctttgcctgtagagcaggcatggtggcttttgtggtgaactgcacagaaaaggaaagtgcattgttgggagcagagtcataggcctttgcagtagctgtctagtagcgtctttcacagtatgagaaaaactgaggctgctaagacaagcaagcacacaggaagagaatggtagcgttttaagaaggttggcagaatctgtgcagtcttacacgcttgttaagtaagccaaaggctgggtgctattgtgccattggaggcatagagacagcagcctgagacccaggccagggtgggagcacacgcgaggctgtaggaagccactctaccaatagcttgcagtgagtttgacaccatgtttgtgttttgatgttaaactgagattttagcttgtcagttataaagcatagaaagttgttgaaggatctcaagcaggggagagctaaaattcattctgaatggaaatggaggaaacgagaccaactctaaaaagatggagatgatcaacagaaccatttcctagaagtgatgcttatgctatcatctgaacttaagcaagtaaatgccacacacctagtttctcagcaaacaatccagtgactgccaccagactcagttatgttctgcagaatggtttatgggctccttttaagctgggtttttgtttaggctttgttttttactcccaagggcttctttttttcctctcaattgttcttttatggaaaattttttcttttaatattttgattagtttatcttctcctaactcctctgatattctcaccagttcatctcctacccaaatcccccctctctcttcatctctctctgtctctctttctctctccctttcccttccttccttcccctctctcagaaagtaaacagacatctaaagaagtaaaggtaggagaaacatatatagacacaaagacacacacacatagggatcccataaaagcacaacaccagaagtcataatatatatgcaaagattgtgtaaggaatggaaggaagaaggacaggaggaaagaaaggaaggatggataggaaaagtcgagccctagtgaaacattctgagaccagggacctccaaagatgcatggtgtggaaaagactgtgctgggagatttttcctgcatgtcaactttcttctttaggataatgtctacatgtgctgcctataaaatagtgcactttgattggtttcttcagcagtgctcttaccaatttgaagattcttgctgcaagtctacactcatggtcactgacagcttcctgctcatgatgctcaggcacgcgttttctcacgtgactagggtatatgcatcttacctctgagatatagatagtatactggttttcatgggcagagaagccaagacttagccagtaaatggtagtcattttttactactatgtgagtataggtgtacccaaagcttagacttctgtttcattatgtattttataatcagattaaagtctttggtatgtatgtatgtatgtatgtatgtatgtatgtatgtatgtatgtattttaattgttttactgttgaataaaaaaaaaagcaggaaggtataagtaaaattgttccttaagaatcagtttcccattaaaaaggaaaactttcatgaggttaaagtaataactagtatgacctctaagatacatagtttcataattacattgaagtctatgtgctttgtgcctattccattctcgaatcaaagcatagtctagtctattcttttcaattattctaacttaggaaagcaagagttaattaggcgctccagctcatcctactgtattttcttcaacccatgcaactgaagtggatgtgtaagtatttattggctagcataattatatgctgtgagaacaataatcctacacttacatattaaactatgtgccaagagcagatgatgtcttctatagaccacgttgtactatagttagaaggaacctgaaatagccccaaagaatagactttcatacctaactttgatgttttctgttttgaggcaaaacattttaaattcaaaacctggtgacttacctgaccacctcaagtaggctacaaggtctgtagtctgtcacgtctcaagtagtcattgtgtttttcctgtctgtttctgaatcacctttatgtggctactgtgacttatgatctgcagaaaatgatgcctaatgtgcaatgtttgtgcaggacgaggttccagggagcacatttacatggcagctttcacagggtgcctgttcttgacaaattttgccaaagccttttcctcttttttcatagaagtatctcccatcttcaagttgttgttaattctaattacttttttgttgttgtgtctgtttggacaacgtagctttaactctgtatgttggaaatgtaaaggcatgtgtcactatgccctggctctagggaattcctaaacttttaaggcaggcagacagagacatgatctacagtgacagaaagaagcgcctcgccatgctttctactttgccatgtgcctcattacgtgctgaaactattcagagacattttgtaaaaaaaaaaaaaaaaaaaaaaaggaaacaggatgttaatattgggcctttcagagctagtgaggatcgtgccacacaggccttggctccttctgttctcaaaggacactggatttctgaaggacactagagctcacaaattataacagcaatgaaggtacctttgtttgaagcatagtttgtttctaatagtaatataaactatgtgtaccttaaaggagaatgacagattaaaaattccagtgagcttaggagctgtggcactcttactgctggaggctctcccagggaaatgctcagtagggtgagcaacagtgtttctggctatggtgtgtttagatgaaatacctttagtaaatttacatcgtgtgtgtgtgtatgtgtgtgtgtgtgtgtgtgtgtacatatagatcatttatattatatgtctgatatatcaactgtgaaatacttttagcaaccttgacattatatagatcatatatttgtatgaagtataaatatcaacataaaattacttttgtcagcatttccaagaataatatgtcatatatccatgatatacaacaccttttgaatgtttacatggtagatacatatacatatacacagggacacacatacacacacacaatactacaagaaagtaaacaaacaatttagttaagaattaaaacttaaaaacattttatactgcatactagaaaaacattttagaagactaaacattgagaaatggaaaggaattgtaggcaaatggcaggcccaagatgatcatagaatatcagaacttatgtggctcatagatcatgcaactaaatttgtaacatagcagcaaagaggttttatccacccagggaaagggtatggctccagaaggcttacttagcagccagctgaataaccattttcattttttctctgatccataaaagagcacttctctgtgacagcagcagccagccagcatagttcttataaatatctttactttattttcaaaatagtatttttatggcaatttcattgtcttggtgatttatcaaaagattagacatactaaagccgaagtgcaaagtaaccagaaatcgtaagatgatatgctatccttccattttccagtcctagctcttggatgtttgctgtcacctcagtttcagcttaggctcctagttggaaccactctgaattcttgctgatgtgtgtcttttagaaattgagggtcaatcatcacatctttttccttctccaaagaatccatgctaaaatccacctcctgattcttattcttagactgccttctcttcccgcacggtatttattatggttggagatgtcatttaggttacgtttttgttggattatattaatgttctactgaaactgaacatttaacaaccttttttcaatcataatccattttaaaagatctaaagggatttcactactgtcatttagactagtgtaacattacaaaactacaaactgagttatttgtgattgagaaagagggagaagattagagagaaagacagacaggactagagttgctagagaaagcattcaccctgtttctatctgatatttctcctcatactctgataaaagtgataggatagaggaattgcttttattttaataatacttttcccttgaccctggtcctgatcctgtagttctcctttattcatggcagctgattctcattatgaggtgacacttggtgagctcttggatgaggagctctttaaagctctttaaagctcttggatgagagctgtggtttaagggctggagttttcatctgtaccttctatgctctgagatagggagaagacctgtggttgactagatcatgcccctgatgaaggctatagaaattctaaagatggagttcagagaacgtctcagttgttgaagtgactgcccttagctgtccactagcagaagttctgcacttacggccgttgtagacctagctcagaactcttgtgtatacctttacatttgtgccctttacgatggcctctaatgttcattgcccagtgcatggagatgtttactatttccttcagccactctagcaaatgatccactttaatcatttgctgggaccaccaagttggagataagtcacgaagaaacaacctggtgctcagcacgtgcaattggcgtgagcatgcacagcttatggagcgtagtgtctgcagtgaaccaaggtcctctgaattcaattgaattcttgcatattcatctggtgtcagatgggaaatggatatcaaagtaaagatttatgtgaggcatacattcagagaacacaagtacattttctcttgtcaagtaatagggaagagttggagagcttttagacaccaaggttataatgggtctaccattggctgctttgtctccagtctgtaaagctagaacactaccctttcacaactgtgaggtacacatcctgagagaactcccttgacataaactagtctccagcaccaatctagggttgctttcattgctgtatttaaaggttattagcacatgtttggggcttgctttcaaacacggggttttaaaggtgataccaactctttatgaagactgcttgtcctgaaaaataccaactcatcctttctaggacagaaagttgctcaaacttctctctggctgtccattgtcttctttatctgtagcctcagccctctcacactgggtgcatttcatagagcagcagattatgatgcagactgagaaaccatttcaggggtgtagacactgcgctaaaggatgtttattaggaattcatgtggcctgaggtattaagtacaataatcagggtggagctatgtggggccatgggtagtctcttctcttctgatcccaagttctagcttgccaaagccaggagcagctgcaggagagatttattagtaattaaaagtttaatatttcatattattcacttcagcctaaacatgccgactactgggagttgagagctcccgcatgcttatactgtatgaggagcatggagtcttgcagacacaggcttttactttggagacttgtgatacgaacatggtattttctgttgaagcagggattgggatagtaccatatccatacttcttacattttcttgtgaaccataggggagcacaccttgatttgttgagaatggatttgtctatatattgacatgaaatgctttagaaatgctatgtggaagatattagctgaaataaaataagatgtgaaaaatagccctgtagaagaaaaattgatgtacattttgcagtgcccatgtttagaggatctgggttattttgaactagtctgtacctgccagaagacctagttaaataacaatggagtgggggcggacaagcggttagctgactcagagttgcatgctatgggtttgatgacgggcaattaatttttagatcgcatataattgcacctctataacatttatatcttttctttctttgtaaaaaaggcgatgtttatgtttgtgtcatatgtgatcaatatagtcaaacttagctgttacaattccccatgaatgccatcaaatgtaacattgagaataaaaagttaccaccacccaatctacctcgtgttgtaccctgacagacatgaataccagtttaaagtattcagtctaagccatctccttggacagtaatgtggttgggggaacagatagctgtgacaagtgtcacagcacccactcaactgaagtccaggaggcagtgttcttgctgtggcacctcacctgtggtctcagagttgccttttcctgcttgttagaccttgatgagtccttggccaagaacaagtattccactaccccaaatcactcaatccagtcatacgttcttgagttcctattttataacagcatgtcagtggacacaattagccctatgtgcatgcagaagctcacatcacatttgcaagactaaagagtactcctgtcaggactgccttctctattcctcactttctctctcactatttaaatgtctattttggtagtagtcttcctctgaatcaacagttcttttccttttccttttttttttaaacagcaaataagcaatgtaaagcaaatacaattgtgccttatcatgtaagattattagacataaccacagaaaataagtagcattcatgtatgtgtgtgtgtgtgtgtgtgtgtgtgtgtgtgtgtgtgtgtgtgtgtgtgtgtgtgttttaagagaaaaggttgtgtctctaattgtgtacagtcctgttgtgtgcatttagacacacttttctttatttggtttgtagccaaagtaaagtataatgatggtttctctggactgatgattggagctgctttttaatcactcaccttacatatcattattatacgtggtgaataagtctctggatctccaaacaactcatcacgttagggtttaactgctaaagttgtttttcatgatgtaggacatttaccaggaaaaccaaacatttgtttcagttgatacagtaattaataatatgaaatttaagtttgctatgttttgtcacttgaacatacctatttcctcacagttctaatgagctgattttgctttggaataaaagatcaaattgaacacatagtgccaatatgcactacagccttagtatgattatcctttcagttattgtctttacgggtagatggaggaaaactttctgtgtacttgtgaaagccctgtttagtaccagagaagtcaactggctgcgcttcagtatattaagtcacaaagaactccagtgaaaaataaagtccccctacctcttacctcataggatatgcatcactgtgtctgtgtaaataattacgcccccttaagtttgaattacccaccccccaaaaattgtgataaattccagaagacctcaaggcaagatcaagattatcattatctcaacataaaataacattcaaattcatgcttgttcaataaaccaagcaaagttgtcttcagctgggccatctcctccaaggaaatacggtagaaatcctgtctcaggctgaggtggaattcgtgcatcaaagtcccatctgtttcttactttaccataataaagatataattgcactataaaaatatatccaggtgaatggtggctctataagaacaactgaatgacaaccactgattaatgtgaactttctagttttctttaacattaacttctgtcatttgaaggttgtgggtgttttgagaagatgatggactataattcagtattatgcctattctcttattattggactgataaaagaaataaatgtatatccttgtgtgtgtgtgtgacacacagagagagagagagacagagagacagacagagagagagagagagagagagagagagagagagattttctgtaagccctttcacaaggcatcactcacctacatttttgctgtgctctttattagttctttgaagatttcatgtgagttgattgtgctcacacccttccccaaatcttccaagatttctctttcctacccagctctttgtcttcttcctcctttcaagactactttgtacatctaaattctcttgtccactgaaatatgatactcttaagagtaaactaacccttgctttccagcagctaataattaccagtaactcttcagctaaggtaggaacttagtgtccagctcccctctccctgatagaatttggtttggcttcagcttgcacgtgccttgtgtgtgctggcataaccactgtgagtttatattttcaacttcccttccatatccagaagagacttttccctttggccagctactagctctgactctgatatccattctttccccactcccttctgcaataaactctgcaccttttttggagtgagtgtgatatttctttcatttatggaggacattctatagtcctctgttctttgtacattaacccattgtagggggcagtgttcattatcatctagtataaatggaaactctgttaaggagggctgacagacagattaatctatagatatgataagtaattaagttgtttcactgctgtgtctttataagaacaacagtttaggttttctcctagaggtagtgaattgtgtagccatgctgtgtcctagcctagtaatgataggagtgtatggatttcatctcatagactggcatttcaatccaatcagaaaatgatcagtaactcacatgttttttgtgcaactatttggctttttaagtggaagtgaactttacatatgtatataggcctgtgaaaaagtacatcctgtagtcttcttgtaaaaagataagtgaatcataactggatttttgtatacatagatgataagcagtaagttcattaaatgacatcatagagaaaataaaatatatggcttacagtgaagagaaggatttgctgctttgattaattgaagaatataatgttgtatagttcataaatttcttaaagtcacactatcagctgtttatatggtaactggaaatttttctaattctattttgttatgtactgtacatggggaactggtgaagatattatatattatttgctgtttggggtgctaggctctttattagactccccatctgtgcctttccaatgaagtagcatacacattagtcaccatttacgtgatattttctgggcagacaaaaccagaaaataaggttggtgttaatgttgtttccagaagcatcaaggataaatttctatttcatgggatcctaattttagagctcactctctcatccactggactacattaaacagaattccaatttttagctttgtgtatgaggaagtgaatttcatcgatattgtggatgtgctgtcataggaagaataatgcttctctgtttgcagcagtactaaaagaaattccttgaagtatagtcagaaggaaggatatggacagagcagaacttttcatggccatcacctttctaccattattcagtaggtgaagtgggggaggtgttgtataaaagaccctggtgaagactttgagaatcatacccttgagagaggacctgagatttaagactatggacattgttcacctactcatgtaatgattgcatgattaactctttatctctttttatttggttattgattaagcataaacccactgttcagttgctgaagtaaaataggtcctaatcacatagaaagacagacaaccttccttgttcgtgtgattgaacattttagatgttgggcttttagttgggtaaatagcttcaaacaaggaaacaaacaaacaataactcaatactttcagaatcatggatggcttcttttagggtttgataagctcatcttaaaattcagttgcattttcaatgaccttggaaatgcaagacagtttaagataaaggaggaggagtactagaatagtaacaccatctaatttcaaattttattacaaatctagaggaaccaggcaatgtgatccaggcctatggtaagtatatgtattaggatcacagatatggaagtccagaaataatccattatgctaatgttgattgatttttttaacatacttttgacatatttataagtttaaaggatagtttttcagcaaaccatgttgtagtagctaggatccatatctaaaaggcttcacatcctatataaaatttaatggaaagtagattattaacataaatgcaaatcttgaaactataagactcctaaaagaaaacctaggaacactgcttgtgatctttgactaatgactggcttcttacatgttgctcatagaacatgagtaattaagataatgcagagaagccagacttcatgggaattaagcatttctgttcatcagatgccttacttagagctttatttctgtgaagggacgacatgagcatagaactctattgaagaaaacatttaagtgtagctgacttaccgctcagagattcagtccattatcatcagggtgggaagcataacagaatgcaggcagacatggtgctggagaagaagctgagatatctacctgcagcaagaagagagagtgacaaggggcttggcctgagtatctaaaacctcaaagcccaccctcagtgacacggtttcttcaactacctattccaacaaggccacacctcctaatagtgtcactccctggtgagcaagcattcaaatctgtgagtctatgaggtccattattattaaaaaaaaaaaaaaaaaaaaccaatatgacaccatcatataattgaacaatgaatagaacagaagtgactacttatatatcatacatatgaaagagtttgcattcaagatgtattcaattgttatttctcagtaaagataataattaaatggacaaaagatttaaacaaacttttctgaagaatttactggatgatatgaatctggtaccagtgcaaggacataagttcagacaacagatggaaaaccagtcatgactgacagtgagatttcagggtttctcaagtctactccacagcttcaagaactctctttcttagaattgtttgtttcctgcttcaaagcatggaagcacaaagatccttgattttgttccaggactctggtcgactatttttggcctaaggcaattacctccttcccttaatcagggccttgcaacttgccttgatgctgttgtacgtgtatcacttattccggttctcatagacagagactgccaatgatctcagaagatctccctactgaggagcagtaattcatcaacacagaaaagggtttcagatgaaacaggaaccattacacaagacacaggttttcattcctttaagtcttttggcttgacatagtctctaaacaccattatttaagagagttgtcctctctctttgccataaccctttaattcagttcctcatgctgcagtgatggctatccatacattttttgtttttttttttataactgtaatttcagggtgttatgaatcataatatcagtgtcagtgttttcccatgatcttaggtgactgttgtgaaaaggttgtttgaaacctcccaaagaagtcacgacccacaggtttagaagagctgatttaagatgttttagggctggctaagataaccaagtggctaattactaaccctcactaaatctcagtattgttcactgcacactttacattgaaatactctagacatttcatgtctgaatgtttatttctttcacccagtatttaaaaaaaaattgggcattgttttgagcttttgttatttcactaaggtaatcctgtaggtgctactgtagttaatgggattcattgtataccaccagagatagatgtctgaaacttaagggccagtcatcacctttaaggtggagtgtgtgtgtgtgtgtgtgtgtgtgtgtatcccaggctagcttggaaatcactttgtagttcaggcaggctctgaatttacagagatctctttgcctcttcctcttcagtgctggagttaaagacatatgatgaattaaatctagttgtatacagttattgaaatgtatcaaaataattgaaatgatggattctatacttcatactagatacaaccagcatactttatcttctaaccttacctctttcaccttttaaattctacctggataagttacttaaaacttttttgcctcagctttcttctttctgtgaagggataatcgtcggatggcaatgaggacaatattagtcaaaatagtagtttataatgagttacaatgtgcaaagcacttaaaacagtgttcggcatatagttagcactatatacattagcaaatcttattgggagctcggtgcctatttttaaattgttattgcttttctgtagagatattgatagataaatttagtttgtggcattctatccaagtctctgaaatggtttatccattcatttgagctgaccatcatccttagatttttcaaggacaatacagctgtctgtaggctttgcccaaaaccctttggctttgtcggcggtttctaatggatggtctcaaaagccagagcttgtaccatcttctgacaaatgagtcaccccatctgttcttgcggattacaaagtaatttttctgttcagtgaatgaagttcacattatgactcatggatttgaaatttgccttaagttagtaaccattgatctattgttatgtgttaatttttctatatttacccagccagagactaaaccacgtaaagcaatggctaaagtctgtttatcacaatgcctttatcaggctgttaagcaaggttggctagtctctacccactttctctttcaatgctctagagtggggtctaatactaggtatttctacgaatgctttcaaagcagtgctattgtctatgccagggtttgtttttgaatatttgaaaaagtatatatcaagacatgtcttccaatccactatacagcagtcaatgacaaccattggtttatgccttcatcttacagtggcgataactaatacgagagaaccatcttttcctgggtacatggaaccataactgtatatttaacaaaataaaaggtgaaaaattataaacgtgtaataacttggtaaaggtttagccagctccaaagtgacaggctgtaaattagaaagcagatatttcattttgagcctgtagttctaattcctcccccagttcactgctggtgtgtctccttcagcatcccaggccatgtctatgccagtcatttagcattgtcctgctcccctctaactttcttcttgacagcagcatggggaaagcagtacttgcagcacttgtatttccttagggagagatggctctgagcaagttctcagagatgctagatccgtacactggtgatgctgtacaaatacttggaggcctagagagggaagtaaaacactaacatctctctgttctcatacagattcacagggcacataatgattgtgcctgtagcataatatgcttaaactaatctagggatatttatggaagtcagctgagtaaaaaaagtttggtgaaatcaaagagaatgggtgaaatggctcatatttagagattagtgaccttgtggaaaagtctgttctttctcacaactgcctgcgttgtattccactcgatgataccttcaggcagttaactttttggtcgtgacctattaattaattaattaattaattaacacaaaagtacagtccacaagtagggaaagccatagttcattgagtgcttgttttaatttctaagtttatttttcttttagtgaaagaccactaatgacatcatttttcagccacttcgtatcttattcagaggattccatttaaaaatcaaagaacacagttaacagttgcccttcccaatattataatgcacttgtaacagaagagtatgtttaagcttgtgacagataattgtagggctggaggcatatacatagcaatggattaactgtactgcattctggaatcattacatcataacctgatcaaacagactgtgagcactggaaatgtttggtttaggtgaagctcaggcagtatagggcaaatgtcctgaggcaggcctgggaagatgatatggactttctgtaaagtcatcccgcttctgccttcctgtgtgccttctatacagtgatgactcaatccccagcatctcaggaatcagaaagtatgtacaatattaagttactgtgcaatcctctacccatccactgcacaaatacctcaatgcccgcaattcttcaaggcaggtactaacaaagttatgcacatacacacagaaaaatcaaaccaatcgggggggtcactaggccccaggatcaccctttcttctggcattcctgttttgtgaagctgctagacttgttcataacgatattatataatattcctcatgacatacaaatgctcaagtgcacacggaaaccactataactacatggtctgcttgcttttagtttttatgagctagttgttgaataatctgatatatgctgatactatatcttagaaatgtggaaaaactcacctgcattctcaaaaagtccattacagaatgcagtgcttaaacccctttcttccagttttgtgtttctgtcctcttagtcctccacgacttacaactatatttgcattaacgtactattggaagagagtcaatatataaactcgctcatctggaacctatatagctgaagtgtggaatcagtttcaggatccagctgtgtaactctttactcttgtgctatgagaacctcctagatatgctactggaaatttcttatcacaatcctgttcttagtgtgaaactacaaaaacagttttcattattgaattgttgaacacctcaggaaatattattattattgctactgctattattattattattattattattattattattattagtagtagtagtagtagtagtagtagtagtatatttacaattaagctgttgctctaccgcccggtcctccctccacagttcttcatcccattcctcatctccattgtctctgataggatgctcccataccaccatgcctcccctccctggggccaaaagtctttcaaggattaggcacatcttctcccactgaggccagacgaggaagtcctctgctatatatgtgccagtggccttggaccagctcatgtatgctcctagttggtggatcagtgttatctgggagctgctaggagtcctggttagttgagactcttggtgttcctgtgtttttgccctcccattcagcttctttagtccttcccctaattcaacaacagggtccctgacttcagtcaggtttaatgtaagtatatgtgtctgtctcagtcagctgttggtagggcctctcagaggacagccatgctaggttcctgtctgtgagcataccatagcatcatgaatagtgtcaggccttggtatctccacttgccatggatccctagttgggctgatctggactgcctttccctgtgtcttctccattttgtccctgtagttcttttagagaggaacacttctaggtcagaagttttgactaagtgttgaggccctgtctttctactggaggtggactcttcaaattctttctccccactgttgggcatttcatctaaggtcactactattgagtcctgagagtctctcacctcccaggtctctggtactttctagaggacctcctcacctcccactttctgaggctacatatttccattcattctgctcaccctctgtgtttctctcttgcccccctaccttatcctgttcctcttttcccctccccctactctctcctccccagatcccttcctccctgtatccctcgtgattttcttcccccttctaagcgggattgaaatatccttacttgggccttcctgcttattaaacttcttattgtttgtaggttgtatcctaggtatcctgtacttttttggctaataaccactatcaaagagtgcataccatgcttgtcctttcagttctatattattgtgggactgtgaaaggcaccctattttctggttgagctagatttaaaccccagtaaccgagcagattaatctgcaagggacggaaggaactttgccacgtgcttccagacactatgctcctgacacgagaccccagccccataattctgtagccatcagtcatgtagggcaatgccccaggctcctagtactccgtctggagtccaccaccatagttacctgggaatatccaggtaggatggccccctctaaaaggggctgtttgccccctcctttctctcttactctcttcccctttccccttacccccaggctagagcctgccctcgtgcccccactctgttctcagctgttctgtaacatctagcgagtgtctgtggtgtccaagagtgagaacctaccgtcccttgcccccgtgcaggcctggggaccccaagtgaactcgagcagttctgcaggaacctaagactgtgcctccctacccccagagtggggtgctgcagcttctcacagcccaacacccatctggaagcaatgtggggtgcactcattcagacttcctggcctggtgtgcctcacccagtggcctgaaccttgggccagattcgggaccccatttctaagccacaggttatcacactcaggtcggtattttttctttccatccacttgcctacaaaactcatgatgccctcattcttaatatttgaatagtattccattgtgtaaatgaaccacattttctgcatccattctttgtttgagggacatctaggttgtttccagcctctggctgttagagataatgctgctatgaacatcatggagcatgtgtgtctgttaagatatggtagagcatcatttggttatatgcccaagagcaatatatctgggtctttatgtaggcctacttccaattttctgatgaaccaacagattgattacttaagaggagaaatttttgttttgagtcatggttcaagttttgtccattgtttgctggttgctcttaggctagcagtatagtaggccattgtagtgcaagatcagggaagaagagaagtgcttacctcttgtaaactaagagacagagagagagatagaaagatgggcttagatgagatgaatatgtctctaggttgcctgcttccagagacctctctccacacagtcccctcttctcactagatccttctacactttttgctatgaactcatcaataatccattaatgagtttagcatcctaatgacatactcccctgaacagtaccaaggggccgtgagccaacaagaccctttaatatccagcagtaattgaaaggtgccgcattttatatggaatccgctatagcattgccactatgcctataaactcaccattttgtgccactgttgacaaaattactacctagtgtgtcaggttcctttcctaaggtcttagacaaaacatcctatgcagatttcattttgtgggaaagacaaacagcctgctatatttctgcaaccaaaaccagagtgagcagaaggtgtctcacaccttctaatgggctcctgtggacattgggaaagtgttcttgatgttggattgatggtgtttttactcactgagtaaatcaattattatgtaggaattcaagtgcccattctttttatccatgaattggttcactgagcctttccttatcgttcttggtttgctttgctgcattgaataaagataatacatttttaaactcttgtaatgaagaagaccaaagatagaaaagaaagaatcattaacgatgaaattgtcagtcaggatataccttatgctagaaaaatcagaagagatttgtatctaaataacgggaacgggcataagaagaagctgataatggtagagagtgcggatggctctggtttgcaatcatctccaggactatatgagctgggaagtaattttgaaggtcttaagaatgaagtctcttaccaagggatgctctaggatatgtatttgactaaaattcctcaaagataattgtactttattggaatcttaatggaacccctacccattaacatacttcatactccacaacttcattagcaaaactcacctgttagaaatcactatgtatgctaattttcaaaagcagtattcagtttaaggcagttgctagcaatgccatgacggggtttgaaaatccaaacatgtcttttaatattagcaccagggcgaaggccttaatccttgttatttgttagctggagtctcaataaagcaagactttagtagtttgttagctcataggcgcttcaggttagtgagctgactggaagagctacctaccgattagtggcagcaccagaagtccctcaggaggaagtctactcctttcactaccagaaggaaacagcatttatttgctgccaagccccgaatgtgtgccttagatgaactgaaatttatgtcaccagtggcttactgcacccccaagcattagctgatgccagtgtatttcgttggtctaagtgtcccccagtgagcgtcggggaactttctgcatttagagaaggaaattgagttgtgtgtcattttcaaggtaactgcaggaacttctatatagaaaggaagtattcaaattatataccaatggagagagaccaagtggtctttaaaagaaaataaaacctaataataaactgggttaattataaaccatccactgtataaaaataatgttaatggtttgatttttctttcaacttaagatttatttgaaaatgtcatattaaaaactaggctgtgcaaaatgaaccttctatttttataatactccacacaagtaagggatatttgttggtgtgtgtgttatttgcttttctattgttctgataaaacaccatgaccaaagcaacttataaaagaaagtggttaattgatcttatggattaatagagtccaggatggaatagcaaagacaaagtgtgatggaacagttgagagctcatatcttgagctacaagaaggcaaataaagcaatggaggtatgttaaagggccttttgcagtcttgaaagccactcccaatgagtgacagacctcctctaacaaacaaatacctcagaaacctttgccaacagttctaccaactggagatcaagtgttcaaacatatgagcccaggaaggctgttctaatgcgtactacgacagtattttgggggagctgagttagatagtgatgcctttgacagtcattttttatcaaggatataatttgtgtatggacctggcttttattccctattgaagcgtaagaattcagtattcctggctagagggatcagaaggaacgagacaacagaagccatctctcctaaccatgagcagcttagcttggtcttaggaatagggcatgagacgtgaaaaatggtaaatgtacagactcaaaacctgtgctatcatcttcttgcaaatgagttgaacgaatttgtgcttgttattaaagaattagcctataaagcaaagcattgtgttgtgtccataagactttgccttcaatgattttagggccccatctttcaaaaaaggaatttgttcaacagtttgtacagtttttctacctctatttccttttcttttgtctgaattattctgagaatctttgctgaacatgcttgtggtaaatctgggctgatttccaccttagagcagtttcagtatagcctgggccagtcaccagcatgggataaacttaaggtagtgagaagtcttgtgcatattgatattggagtcatgtacattgctgatttaaatgatgcctgatagacccatgggcagtacatatggagttctctgagaatagatagatgctcttgacccaggagaaaagcctggccagtagggtgaatttggtatctgggtgagtttccagcaatacaccagaaactcgattacataaaagaacattatttttcttacctttacttttatttagttttggggtttacaagtttagtctctgaacacttcatctctttttgaaatgtaccattttagaagagtataaagctgcttttctgggcttatgatgggtaaaataacaacctagtaatagtcaaattgtaacttctagatcttgtggacaaatttctttatttgtttagtctcaatgggctaaaatgaatagagaaagtttatatcctttctcgtttgagcttctagagcctgcctgcattcctttgtttatatcctcatccactgtctggaaagcctgcaataaatcagctctttgactatgctttcttccatatggttccatctgattagacagggagtannnnnnnnnnnnnnnnnnnnnnnnnnnnnntattctggcaaataaagaaatttgtccacaagatctagaagttacaatttgactattactaggttgttattttacccatcataagcccagaaaagcagctttatactcttctaaaatggtgcatttcaaaaagagatgaagtgttcagacaggaagtaggctttttcctttaggtaatacatcctgagtttatgttgatagtaacagggaattcattcatttagtgcagacatatgcagtctgttgtgtaatatctcattaaggtcagtagcaggtccttgctagccaacagtgatttgtagcggtttccacgggaaatgaagtacagtggttacctgttcttggaacacatttcagtatcttgtatgttgtaaatgttcacatcattattttattctttctccttgctttggttttgccctgatgggaatactactcaaggtctaaagcctttctgaattttgttgttgttggttgttattagtatgttttattactgtaacaaaagacctggagctaaaataaaaattcttggaggttgacattcaagcaatatggctctgttaacagccaagtttttctgcccttacttcaaggcaaatggcatcatgggaagagtgtcctcatatgcatatatcagaaggcaaggtttgcctccatgagcattcatttcataatctgcttttttcacaagatccaccttctaaagattcccagctcaagagtatcacatttaccaagcttccagtttatagaccatggtagtgttcactaagacataggccaatcatattatcgacctgtgaaaagttgccctagctttttcaagccgcttgtagcctgcccaagaacagcacgattatgtgcctcagttacagtgcagcccacgttgtggtgcttcctggagctgatgtacagtgactgagccagcatagaccttcagatattcaccccaggagcagtacccattctccctggaattgtgaacatatttaggaagtctaatcatcacctctgtttcctggtgcctttaatgtaagaataggtgattaacgtgtatgcttgtctaagactgacttgtcatacatatgagctggagaacagaaatagatggaaagatttttgtgatagattatggaagagaagatgtattgttaagtcaagtccagttacactgttgagttgcagagcagatcagctaaacaggatgttctcttgtaactctcctgaggtgggctcaacctcaaaagagaaggtgtgagtgtggtgtgccctgccggagcctctaccgagtgagtcacttatgtgaaaatgtcttgacatacatagaattgtagagcccacactgtatctgatcacagaaatgttactgcataatagcaagctggctttgatctccatgggattgcaggctgggggatgaggaggggtggcttttgaaaggtcacctctactactcaggagaacacagagtatcaatcccttatatctgcgagctggtgtagcaagcattggaagtgtgtgcattaaaggaaaactgccatgtatcttcatgtgtgaatggggtgctttttttttttctggaagagcttagcatcctgactactttcccttctatgttgtagttgatgatatctcacacccactggtgtgtgaagaggaagaacctgctatgcctactttctgtgttagtgatgtggcataatgttttctggaaatgccacacaatttcaaatgtgactcctttctaaacttgcgaatagagttgacaacagtgaaatatgtcctgtaaacaaaccccgagacactatcttttgaatgagtggtagttgaatttataccaaatcccagaagtaggaagtcccacatgtgtggagttctctctgctgcccgaggcccacaaggggcagtgccgggaacaaagcctgcatcacctacttactctcattccagtccagcacagctgagtccaagttttatattctattactcacaatccaaatcgatggtaacatataatattttacctttattgagtaaaactgcaactctcttctaaaggtgattgcattgctatgtgactttttatgctattaaattcttctactcacatcttatttctggaattgcaagagaagtaaccgaaggactcatttatctctttttatgaggtacttagtggacattgttgaatgttttctggatggtgagggtacaatcacaaataaagtgaaatgtacgtccttaaagggttcattttcctgtgggagaggattcaaaagcagacaattatgtactaaagtctaactaagtggtagagagaaagttgaaggtaaaacatagaggggatgggatggtctggtcattgcgtttttttctggggtttctggggagacacttaagatgaggtagcattggagcacagctacctaggttgtattgaaacaagctattagatgcatgttaaaggatgttccagacaggcacgtttcaattttttgttattttaggggatagaggagaaaagacggcacagattctagccagcaatggcatgggtcagattggaaagcagcctggattggctgctgcactctgtgaatcaagatgctaggtatcagtgagaaagaaagcagctcctgatcatggcacagggctctggactctgggtcttccttagagggagctggggaacatctggaggctttgatgagaagtgttctagtcatggtggcctcctgctggaaaacagacaacaggcagtaatgcttcaaactacctagatgtgaaagctggcaggactctatcaatgagacaggttgtagacaggaagatccaaaggtttgcaagtctaggactgatggcctaatcaacaagatggtgggcagatgggatgtgagtagtaaccacttactgaggttccagcagacagaaagagcaggcatttggtttccatttttagaggtgctttcattttgacatttattttagacttttatttgtttgtggtagggtgttggatgtgtgtgtttgtggcttgtgtgtgcacatatgcacacagacaccgtcgtagcttattgggtatctcctcatatctttctctatgttgttttactttgtgcatgtacaggctttgctttcttgcttgtacttatgtctgcacactatgtgcctgcctggtgcctacagagttcagaagattgcattggatcttctgggactgaattctcagttgtgagccactgtgtgggtactgggattggaacctagggcctctgcaagagcagcacttaaccattgagctctactcttaaccattgagcgtcttttcaacctttgtcatcattagtttttgagacaggtgtgtcatttgaacttgaagttcacttcttttgagtggtaggctcagaactcctgaaatccaaatgtctttgtttccaagtgctgggcctttgctgggggtctgaatacaggtttcttgctttaaaagcaagttcttttatctaatgagccatattcttagctttttctttcttttttttttatataatgggggaaagggagaaaagatgatcaagaatttgtctttgtatatgttctgtttgtcctgttagaatctcagtttctactgaataggtgtatattcgaggctcaaagtcaatctttcctcttgatatctcattaggagtcagcagaatgaacttcagaactttgccacttaaagactaaaatctgagacaatattttaatgcaatggagacaaccgaagaaatgatcttggaggcaaagaatatgcctgtgggaggaggccccaagcacagtggattctagaagctaggaagaacatttctgaagacgatccagtcacttgtattgtatgatcaaaagcctaaagattgaaatttgaagcatacagttcagacctttggtggagtttaagatggcatgggcattctctgtgctcttcttcaatgtttattcacttttatcattttttgatttgtatggatgagcctgaggtgctaaatgatcattcagtgcagtgggccacagtgttagatcccagggcagggccctgcttcaacacatgctgttgtctgaacttctgtgacctaattaacttttctctgttttaaaaaatagactacattcagtaaattgccaggctatagttattttgccatttttacctctggtttttggtttgcttggttttgttttgtttggttctttgaaattcaaaaaatcatcagatcctactagaaaagcctatactcaacaaaactggaaaatctggattaaatggacaattttctactcagataccaggtacctaagttaaatcaggatcagataaaccatctaaacagttcaataacccctaatgaagtagcagcagtcattaaaagtttcccaacccaaaaaaaaaaaaaaaaaaaaaaaaaaaaaaggacaaacaaacaaacaaaaaacaaaaaaacaaaaaaaacccaagagcagatggttttaatggaaaattctataattctatcagaccttcaaagaagacctaatatcaattcccttcaaaatattccacaaaataaaaatagaaagaatactacccaatttgttctatgaagccacaattatgcttatacctaaaccacacaaagacccaacaaagaaagagaacttcagaccaatttcccttctgaatattgatgcaaaagtagttaataagattttcacaaatcaaatccaagaacacatcaaaacaatcattcatcatgatcaagtaggcttcattccaggaatgcagagatggtccaatatatggaaatccatcaatgtatcccactgtataaacaaactcaaaaaaaaaaaaaaaagccacatgatcatctcattagatgccaagaaagcatttgacaaaatctaacacctgttcaggatgaaagtcttggaaagatcaggaatccaaggtccatacctaaacatattaaaagcaatatggcaacatcaaactaaatggagagaaacttgaagcaatcccactaaaatcagggactagacaaggctgcccattttctccctacctattcaatatagtacttgaaatcctagagccattagacaccaaatggaagtcaaagggatacaaatagaaaaggaagatgtcaaaatatcactatttgccttttccggtgatatgatattatacttaagtgatcccaaaacttccaacagaggactcactcctaaaccttataaacaacttcagcaaagtggctgaatataaaattaactcaaatatatcagtagccttccttactcaaaggataaacaggctgagaaaaaaattagggaaacaacacccttcacaatagccacaaataatataaaataccttgttgtctcaagtgatagttgattaaaatcctgtttactgaagatcaaaagttgactgtaaaagataacagggctatgaaaattgtgtttgagtatattctgtctactgtatatatgaccatgtttatatcaatagcagtacttctcttttgtaactaaaatggaaggaagatgtagttttgatttcaaaagtctattaaataatgatctcatactatggatagggcgataatataaagacatgaaaccaagataactaaattctacgtctactctgttctatactaatctacttaggagaccttgacatattcttgcctctgtctatgccacactatctcagatgcaacacaaagcggtgatttaattaattacagtatctcaggttcccagtgtaggagatgggaattctggggtgagatcaaggagtgttttcttctgatggcatgtagcttggtctccatcttataagtggcccttatcatggaaggaggcatctcattgttcccacattcagaatgtatgattccataaggctgctccatgatggtattaaccgagtcctaaatgtggctgtatcccttatggcttcttcagggtctgattactgtgtaagaggatcagaagtgcacagggaaatgctctggatcaaggggtcagtggacagtaggatggttatgactcatggaatgcagtaaagtctgaagacagagcatacagtacacgctcagtaagacaagcctttcagagtggtttttctcctttttatattttcatgatcatagagtcaactattttacccaaaactgaatgacaaggcctcaatttagcccctctgtataaacccctccagttacatttgccaatggttggttattctttttctacatcagtgccaggaagagcagtatttttactttaaaaaaaaaaggtaccaaccatcatccagcttctcattagagaaaagaaaaacacctcttacataaacccactttagaaactatgaatgtagcactgttccgcagaccattttcttctttgcctgctggctgtccatagctgctttcatgacctcctcctctcaggccctgagacctttctgtctgctggcctgcttgttgaatagcacccaccaggggcaaacagaaagtacccttgttctctctcttgtacctagacttaaattcttatcgtaccactcaaggcagtgggattgctggtggagtgggggaggatacttcatatctctagatcctagtttccctgatatgcaagacagaacttctgctttggggatttttttgtttgtttgtttgtttgaggtcagagttaggggtgagaatgtatggaggaagtctcatagtcctcccagtgacacctagtcgatgcattttccctgccctatttggtctaaagacgcctcttgactctctgaattatggtaccaccaaagtactttccaagtcactaatgagacagcaaaaggggtctgcaataatcacttgagttgcttccaatctactgaggcagttgattccatggcattctctgtcacactgtggtgctagttggtttgtatgttcattatacttctgtggcttcattgtcttctactgaatgtaccatagtagtatgcatctaaaatgagatcctgcagacctgccctcaaaccctgtctctgacattaacctactatttggcctatgtcagctcttatgtcagcttcttcatcttccaatggcagtcctatgaattaggtctctccagatctatgtagattgttcaggaccattcactcaggcttgagatgttccaaaaaggaagtccctttcgtttctttccttcctttctaagaagaagaagttatgtaaaagtaacctttattcacttgataaattgtcatctttgaggcttactgctaaatacagtcaccctttctatttctttctgaaatctggctagctggttcaactcagctgttgtggctcaaactccaagctgactgattcaatctggcttctttcagcttctcactgaattgcttggcctcaaactaactggcaatttgttatagttatttggctctttctcattctctggcttcaactgcctctgttgatgtgcagggactgaggaccaaactggactccaccgtactccctgcactgcacttactgcacccctactgcactccacttcaccatattcactgcactcaccccactccactcactgcatccccgctgcactgtactccacttcactgtactcacagcactccactgtatgcactgcactgcaccacattcagtgcactccactgtactcactgcattgaatctcactacactcaccattcccatgctgccctgcactccatccccactcactgcacccccactgcattctgctttactgtgctcattatattgcattgcactcactgtaccctcgctgtacagcactcactgcattgcaccccagtagaccccgaagcactgcactgcattgctgcactgaacagagcccaaagacactttcagtttcctgtgctgctcttaaatagctttttttcctgagagttgggcatattctatctcttcctcattctatcagatctttgtctgattcatcactttgtctgctccttaattgatcctcattgcttgggattacaggtgagtacaaaaggcatgtttgtattccagccagagggattaaagaggctcatctgtattccagatgaatcatatagacctacatctttggatgtgatccttcgcaagagcataggttctctacctagagtatgtggtttccccataatgtttagtgtctggctaatgtagaagtcctacctttaaggactaagtttcctacttgataaacataatttggtgcatttaactagtaattgcagtttgcaaattgtcatttatctgttgcctctgaagttcctctggagacaagggcattcttatccatgtttagatgtaaagaaatcagttaagagttgaaatcattttttccatatatcttaatcaatgctggggagcctggattttacacaggctattttctcagacttgaaccctactagaactcaaagacaataaaagatgaaagtgtgtcacttcctaaggaaacctgcattttcttacctgaaaatgaagtagaatctttcactccctccttaaatctgtgagaaagtctgcttttctgtcattctctaacacaaagtttgtttctctcggttcctaatctgtcattttaaccacgtgggctgggagttaaaggctgcacttgtccttggtgaggatacacttgtttcctgttgttctgcatctgtcaaaccccaactgcttatgtagctttcctatcccattgctcattgtaaatattctggagatgattcaaagtgcatagaatatagactggacaagtagatttgtgtatttgagaattagcggagagagttcacgcattccagcaccattcacgctcttgagtgtcacctggggtcacaagttgccatccttcttctgggatgaagttgtctatgagatggcactctgtgttctttcttgaacttctgcactgtggaatccctgtcagtgatcagcccttagaggagcacactccgcccttcttcatcagtgccaaggaggaaagaagacagttttcatatacagaataacaagcagtattttgggtgtgtgttttaatgagctaccaataacaaaataaaacttcagctgaagaattgacagcctggatctgtaatctgcctgacctgacaattacaggaacttattaccacgtcagcctgccagatggatctccttgaaatgtaatgtgctctacttctgaattcaacacgcacttccttttctccccctttgtgtttgttgagtttcgggaagaagcagctttacttgaactaaacccactcatttcaagtgtgtttaatgacagcaatatgtggcagataaaataaaatcctacggccttgtttgatgtttgttttaatttcagaccctagtaaaagaatacagaggagataaaccgtatggctcaaatggtggagttgaaaacaaatgatctattatcataacttagcagtttctctcccagagcatttgggaggtcaggagatctgaggagtagttataaaagttgttgaggtttacatggtagttggcaatatacagagtagttttctgttacgcggctgcagctccatgctggcttgccagaaaggcacatcctactctgactcaagtggactgagccatgtcaagtcctaattctgagtggcagagtttacctcatccctgttccagtcagtttagtgattcctcgtgtgctctgtcaggaccactcattgatcccttatgtgatgtattagtgcactttgtgaatatcctgttttttagctttattaaaacatatgtttgtatgacatcctcaatactttttacattagagtatttgaaaataaatagagaacagaaaagtctatttctcacaccccacctgttcccacaaactctactcactgaggtagtaataagtggccatttgtaatggattaatatgttcataatagacataatacatactgttgagtatgtaaaatgccgctattgtctacattctgattcactctttcccatctatctttgtcataaggaatctggatgaaagttttaatgcttgtccagaacctcttaattcaaactataatattatttaatgtatcatctttctggtgtcatcttctcctagttgtctaaaatgtaaaggggaacatcgttgcttgtctgtttctgtgtagctgtgaatttggtgttggattatagcatcaccaacagtgcagtcctccagttagctcattttatctacccaggctgctactcagtcgcatgcttgggaatgtcgtgttcagaccaatccaggcacttctctaaacagatggttgtggcaaaggaggttaccttccaaagcactgtgatcccaatagaaaaactgtctgtggaagaggggtagagcattattgtaatagttttgtttatttaaaagtcatcactccagatagaacaaggtgcttatacagtagaaatatctatcataattaaaaaatgttaatgcatcacttctatgaacaatactctgaactaattctttggtattgaagaagtgttgaacctaatcagactttaaaaatatacgcttgagatgaaacccaccttgggcttcttacggctcagcaaaagtgagctgagtcagatgacccacacttggggccacatgggtggcccaggcaagaagtgagcacaaatgagctccagcccagcaccttggcacctggacagcacgctagcctgagatgacccccacgttagcaaccaacagtcggttgctgagcaggcccatgcgacattccatgcccaagaggacccctacctggtgctataatccatagcactcctgagactactcctgaaaaaaccccagacactccagacaccactaagaggagcaagtaactggtggagaaatggaagagaaggagaaacagaaagatcttagaattggaggcttgagagcagtgaagagcagacagatgtaactaaaccctgatgccacctggaaccatagtggagttgtgacctgtgctgccaccaggattcatatccgggtccacggctttatagcagcaggagtctattaccaccaaaggccagagggacatctctgatctggtatgccaaccgagaacatgttgatgtcttagggctgtgaagaactgacctcacatttcactgcaaatcctgggagaactaggcctggggccatgtaagcaggagagctgctccttcctcctagccagctgaggtacttgagagagtcagctctacactaccccctgtccccaggaagcacagtcaagctggccctggttgtggtagttgtgagtgatttgatcccattcattggagcaggagagctagctctgcctttactgtctgtgacacaggatgggcccttcatgccatctcagggaagtagagcttgccccagtaggatgttgcatgagagctgtcaggctgaccacctcggatacctctcagtcccatatccagggctttgaattggcactttccagtgtctaccctattgatgaactcacagaatgggttgaaggatttagtcctacagatccaaaaccataagaactccatgacacggggcaacaacaggacatctgagaggcgtctcagtgagcttccagtattgccagtgtagcagaagtcagaggcctcaaaccagaccaatgactcattgcaatgaacatttgcaagcaaagaagtgtggacaaaatggtacactgtgggacacactgtgacccactacaacgtacacacaagatagttattttctattgggggggggcaggtcaggatataagggttgaaggtgagtccgaggtgagggagcaatgagtggaatgatgtgaaattacaaagaaccattaaaaagtgaaacacacacacttgaattctcagtatgaggtatcaagttctagaaagtgacctcctctcccaagccaccctgattacttcatccttctagatgtttatattggaggtaggaactctcattccatccctctatttcatattttattcactaataaatctattcattgttaaaaccatcagaaactatatgattcagaatcctgtttgtctacattttattagaataaagaaatgtttatctggtttattttagttaagtctggccagggctgtagaggtgaagatgatgttggatggtgaacatttatcgatttcctctttgtctaaagaagggaaaagaacaaagtattagagcacctggtctcatggaggtttggtataagattgaagacccaacatagccaattttgttatctcagataaacttccaaggtttccatgctgagtggtccctactggactaggatttagtaagctccctcactcctctttccttctttctattggtagttctctttattttgcttgtggagataaggaaactttccctctagggccgtctggcttcttcatactatctccagcttacccggttcaacactgttcctggttatttttctctggatacttacactcagatgccagaagcactaaggccattattttagctggttcctccccagtacaaattgggaaggtagtcctcctccaacacagtccatagttatctggtcaggttttgctgtagtctccaatccaattacttgtgactagagttcagaatcacctattacacggctgtggctatatatttatttaaataaacagtgtcccgaggttcttctcttgaatagaatcatgggtgtggaggaaactttacattttgcatgctccttcatcatagttagactccaaaattggttaaattgagtgttttgaagatttaagagtcaggtaaacaaaatactttccgaaacctacattcaatgtctcatttaataatagaaatttctgccaacttagttctttttgagctttggattttctataataaaaaggggaggacagcaaagataaatttcctctgcctttgttctctggaaaagcaagccttctggaagtgaaggccctgacagggtgtgaagagaagggaggcagtgagaagcaaggtttagagaaggcacttagagtcaagaacaggataggacagattttcttcaacagtgtattcctggacagaggaggggcacatcacagactctgattgttatttaggagactaagcaaaggaaaaggagagtctgctgcatagggaacagtgttctatgtggatcgggaaggctggtgagtgagacacccaggcagtgtagatggacacttggaaacaaggaatgcacacatctgctaaatgctggtgctgagtcccatgagaggatgtcataatcagatctgtcctgagtctcctctctttctcaatgctctgaaccaattcaaagcacgatggcactgtctctaatttaagggtaacagaaaacagtatgaaatacagatgaacaaattttagcagaatgttcattgttgtgacttcagaaaatagaacacataggtctccacctatgtttataaatagagacttcagacagatggtgtcaatgtgtaaggctgtcactatcagaaacacagggatgtggccttgagcccaaggggaaaactactgctttatttctacatatgtagccttgccttccttacagtagcacaagtgccctgaaattctctcatggcataagattgcctcttgtttattttagaatttagggaaacagagaggagcacgatataggctggagtcagtatctgcctgccaggggctgaaccgcggctgccctgtttcctctcagatctactaagaggtaattgtcacttctcctgtgaacaatgggggaagcatagacgggatgattctttattgtaaagatccaagaagtttccttctggaacttaatcatagtagtatgtgagaggacagtgtagatatctaacttcatgtaatctcttctgaaggctaaaacaaaatgggagtgtgaatataacttggggtgcagattagcccctcaggatgtgaggctggtgaagtgctgcgctctgctgagtggctctcagtggtcagagggccagggaaaggaggagttgagaagtcagggtgaagcagatcgtagacatgtttcctccttggttgtatgccttaactagctgtatagcacagagaatggacactcctagtttcctactgcttctcctcttggcctgtagatcccattactgtttagattgcacttttggtttattgcaactactgggtaactttttcatactgtctactggaaggacaatattgttagctcatcatcttttactacaaaggtcatggagcctggaagacagtatcattgtcagtcttgtcctgttcactgcagtattatgcacacatgctaaacagtctaaaggtgagtgctgttaggtagtggcaaatctatggttcttgaccaaaatagcctctaagatgagattatgatttttaagagatcacgacaggggcctgcctttccaataaaattcacatcttaatagcttctctaagggataacaaaataagttcctccttttactaatgataaaagcactgctcaaaggagcttagtggaggttcatatcctgagaccctagcaaggaagtcttttgacattttattctctctgttaagtgggaatcccatatgggtagaatatgtgcttctagacacatgcatatctggatatatgtgacaagaaaacttttgtgtccatgcgcaacattccttcaaagcggcgatatactttgaaatatgtgactcaaacacacacacacacacacacacacacacacacacacacacacacacatatatttatatatatataaaacaattttttgaaaaatggtgtgcattaccacagcaattaacacattagtgctttgattactttttaaaagctttatatataatttttatttaattaaaatataattatattgcttttcttctccttttcctcccctcaagtcctacccccatattacccatttctaaatgtaccccctattttgaccattgtttttacttttacgtgtaaatgaatacattttagatacagcctgcagagtccgttcagttttgcttgcatgtatattagaccattggtattggataatcaacaaagaggtaagcccttttctccatgtagcagttgttaattgcttggagttttcgtctagtggccggtccctgtggcttctcccattgggatgtcaattgttactcttatgtatacatgttgttaacatttcattggtccagctctgttattgctgcaagacacagtcccacatcaggcttcctggttctctgactattaaatttcaagctgttttttaaaattcttgatagtgatctttgcttttttttttttaataaaacataaaaaatccataatgtctcctcctaatttaaggaatttaaataataaaaaaataaaacatcaggtgtaaaataaagaaacattcaggcattaatgtttcaaaaggaactttctaccatacttcaagtttgttgttttttaaacatttgcttttatcaaatacatagaaatccctttactgagaagcattggctccttctcagtgtggaccgatttccttgtcacagagcgcaatttactttatgtcctgtgaaatgatggtgcacatggggcttcagagtgacaccaagggcttaggaatgaagggcctttgaaagaatctgtgtgtgagtagtgtggttgtacaatagacaggactgacttttgtcccctctggtagtaattgtataaagcatcttctgccttacattgtcagtacccaagctatctcatgtttggatgaggagacactggagtgccacaccctgctgctgcttctcagcttattgtgtgcatattctcaaggcaatgtaaaatatgcgtctcctaatgtatatgttagaattctcacatataatttagaatgccatatatctcgattttcaggcattcaggagacagttttgataagtttgagacaactctttctgatataagactattttgaaaaagtgcatcttttaaaactgccatttttttaaaaaaagtatattgctagcactttgtcttttgaactgtcaggactctaaccactgtgcagtgaatagaagtaactctgactctgactcattctaatttcccctgtttttgttacattttaaatgtacttattctgtttgctcgtgactaagtgaagtggcaaacatgaagctcagaggacaacttgtcatggcgtaccatgtctgtggcaaaagtcagactcaggctgtcaggcttggccgcatgcacaatagtcatttctcttggcaactctactcttggtgccttaatggaattcccaaaaagttgtagctctcaagctgcatgagtctcttttacatttttctaagcacaattaccatgttctcttacaaatttacctctctggtcctttatttccacatcttacaaatggagctgtttgtagatcctatctcatatggttgttaggaatattgaatatgtaatactgtgtccttattctttgaggtatctactttttatttataaattaattctgttaaatttgtgtatatgaatggtttgcctacccatatgtctgtacacaacatgtgttcctggtgcctttcgaggccagaggagtgcatcaatctcctggaactggaattacaggtggtctgtgagttgccattgggttctaggaatcaaaccctggtcaagtataagaggaacaagtgcttttaactacttagccatctcttgaaatcccagcatctactttttaatgtcagtttctgagagattgaaacgaattagataaggtagcaccatcatttctttcttcatgttaaaaacacagatgcattcatatactctcaagcatcatgtgtagtgtttgtggttcttatcacaatgcctaccacaatggagtataactgctattactggtgacgtgtaagccaccatatttatagctgaaaagcacctatacctatctttttttttattactgtactgtcaagcagatagtcttataattcctgctctttattttagaaaacctagaggactttccatagagctcacaactaaaatatctagattgtggtggtttttttttcccctgtatcttctgtactgttcacctaggtctcagatttccctggttttataatgtcacatagtattactaatatctacttgtgtttcatacttcaatgtcagttttagagtactttttaaagtttcaaaccttctaaatccaaatttctaatgctactactcctcaagtgaatattctttataccccatggaaggatttcattagtgaaatcattgtggtttgtcaactcctataattctttgtattacttcttttgacacttgctctttggaaatttcacttctgccttgaaataagacatttcacatcataccaaggcatttctgtttctcttctaatgaatataactcgctggaaagacggctcaaacattaaaagtatgggctgcttttcctgaggacacaggttgtattccccgtactcgcacgatatctcacgactgatgttaaccccagaagcagatctaatgtcctcttcttgactgcacatgcatcaaaaaggcacaccgtacacaggcataacacatacaattagaaaaattaaaacaattggtgacctatattttccacatataggctttaacaccatcatcaggacttagactttgctcatatccctactaagtttcagagattacagggtttatgttaggaggtaatgatgatgcaaaggagaaggctgcctttgatagtctattgggattagttccctccccttgaggaagcagttggagtaaatcttgtagctatacatatttgcggtattactactattttacctatggaaggacttgatataaattagtcctttgcaggaagcagaactatagttattcttgcatagtactaagcataattgggaacctggacagccaggctcaagagtagattcaaacacaaaagaagatttgagaaattaaactatagggagataatttaataactaaggcttttgtttattcgtttggttgtattttcagggtgcaatactttttacttttacttctgtaaatcaaatgagcttttaagacttgatcaatacattaaattaacaaggatttattgaggacctgccacgagctagagacattgtatgtgctagacgtaaaacccaacttgtaatggcatttacactaacaatgttctgtgccatgataaagcaagtgccgagggacagttgcagttcctttgtgttcacgttggaagctctggaaggtaaatgttggcaagctgaggaggtctttgagaagtctcttctaaaagattatggtgacgtttgtagtctggaagtatgtggaatggagaaggaagtgcttttctgggaaaaagtgtgctgagactcaaagtagttcaagatatctgtaggcctacagtagctttgtgggtagagtctgtcttccctgcgggtatgtgtgactgtgcccactatgaggtcacagaaaggactagctacaggttatatcctggtggataggtcagagagtgtgccacagttaacctagacagtgggctcatgccaagttggctcaaggttccatagttttaagcgtaagatgtgtataaaagattggtgttcccagctttttgaagaatttgaagggcttagaaaatggagtaagtggaaagaaagaatatgtctgaaagaatgcattggtgatggttcagtgcagtgcagtgactttgtgtattgtgcaccctgtcctgtaggctactggggaaagtaggggcatgcctgaagaggagcactggaacactgaaggtttgtgataacaacttagtttggattagagaggtaacttgtgatgtgcttaaactgtagaggctttgcgttgtgaatgaaaggcgaatgtgtcttccttacggacatgagccataataatccaggtagaatgtgagacaaagtcctctgatttagcacttctgcagctgaagctaacttgttcttacattaggaatacttaaataaattttccaataataccttatgtttttcaagaatgttcaatgacttttgtcagttaaatctcttgggaagaatatggtagattatcatttctcaatagtttacagttagggaaattgtaacagaaggatttaacccaaagttctgattaggtagacagatatggtctttgagccaagacagtatggctcagatggttaaacatgaattggcaactcaatatatactttaaaatactgatactctctgcatactagggaacagtgatactaggcaaaggcatatttgcacagacacacagacacacacactcagacacacatatagacacagacacacacacacacacacacacactttgcttttcaacaagtcgtgaattataatgtggtgatagattcatgctatgcttacctcattctagttataaaaacatttagaaaaatacttatttactctagttcttacaccagccctaaaggcctttatctgtagtagtcagctttgaaatgatttcagtttaatttcagttttatttttccattgctgtaatctaataaccatactaattcaagagtttactgtaatgtgaacttctgattctaatctggatgaaattagtatacctgcttcatcgtttagcgtacagaagtaagcagagtgttccgtcctttgttaggtgattaagaatatccgagtaagcatgcccaaggcctcttgagttctctccattttatggttaaggcagttaggtagagagaattcctgtgtgaccttttgcaacatttttgagattataattgtttcatttccttctttcttttcctttttccaaaaccttcttgtgctctgctccctggttcaaacttacagcctctttatgcttttgttgttcgtggtgggggtgggttttttgtgtgcatgtattcctaaatacataaataccacttgttcactttgtatgatatcaattgcatatgtatcttcagaatcctgtgtagtcttgttatgtttgttaaagtgcctcttttcgtggcttttgtttgtttgtttttagtttttctagaagccactgatatttttatatttactatctttaaaatgaaatatttgccattttaagatttaatctttaaaatttaaagtaaaataatattctccgtaaatagtagagaagcaattgcccagtatgaagattgtgtgctgcggaggtctcattggacagttggtctcaggtagggagcatcagacgggacactgaatagtcactgcagggcctgagtcgctgagcctgcttggcagcacagagatctggaacgccttaaaataaaaatcgcaaatgcaacagatttaatcaatcctagtatttttctctcttattctcccagtcctaagttaaaaataaaattcggctgccttattttcctacattctagctagtaggattagctggagctctcaacaggaaagcaatagatagagtagacaccattgtgtggtgggtgaaagcccggtagagataattacacagtcacacccactatattacccttcaaagaaactgagcctaatattctcctcctaagcaatttaaccaacttctaaaaaaaagtataagatattatttagagaatgaaatagctactgtatataatcaggagggagaattatagcaaattattacactcatttgataagtacataaagagctacattcaaagctttgtattgagcctccttggtaattgttcatttctgctaactgtcctgtacaagggcagctgtagaagagctagaaaagaagggtatgtgttacacaggttctgccctgctgcagactcagtcccatcccgtgctccacgggatgaagctcatgttggcaccagatgtcaaaagtgatgacttttctttcttttttgcatttccaaggaaaatgttcatgtctagtctcagaaaataaaagtgcaataaatttgttttactatcttgtttgcatgcacatgtgtgtatattttaggcatgattgtgacaaagctttattctctatatgtatacagcactccaaaacaccattgttttgcaaaggtaggagtgtatgtataacttcacaggataagaacatctccaaatcccccaaattgtttactcacttgaccaacaagctgtcaataatattgggggttatttatttttgattttctttaaacagaataaatacatgtataaatattgacacttcaaagattgaggagttacatttgtgtttgctatgatttttttttctccaccaagcccaacaaaaacaaaaaagttgaactaattgctattaagagaagcttcccaacataggttttaagccagatagcccttacaagctgttgttaagatgtcacatgcccatggaggaatactgtccctcactggtcagcagtgttcaacaaatgtctttatctctagatgattcatggaaaaaggcatgaaagtatggagtataagactgtattgcctacccagccagttgtgggagtgagccttggcatccttgaggcagcagagaacagtacccctcacatgcttatacttcagcaattataagctctttctctcttggagtttcttcccatttccaactgattgctannnnnnnnnnnnnnnnnnnnnnnnnnnnnnnnnnnnnnnnnnnnnnnnnnnnnnnnnnnnnnnnnnnnnnnnnnnnnnnnnnnnnnnnnnnnnnnnnnnnnnnnnnnnnnnnnnnnnnnnnnnnnnnnnnnnnnnatagtcctggtgacagagttcttgtaattgttcctgctggccttagtgacagtgttatagagaaccatagaattactgtgactcttgataaaaacttaactcaaaagactaatctctaaatgcaaagaattctttagaccaccaagaaagccacatgttgctttgtttttgcatttattcatcacaagaaagtgacatgcaatttactaaaaccaacatgagttggtttcatgtatatttcaaaccatgtctttcaacaagaatataataaaaatttaatgaagaaacagtcatgatttaaatggtactgattttgcttctagaactgtaatagctaagagtacattttatagtaagcagtgcctttcattatcactcaaatgataagttatttagtagagattaatattggtaggtacattaacaaggaaggggtttttgggccttcgactcaaagtgagtagttctacaaaaaaaagtttgggagttatcagaagtctgaagaacttgaattgtagcaatatcaatatgatttgcctcaaatatattttatatatattctactatcttgagctgaaattcttgtcagacaaatgtttatttcctttttttgttgttgtttttttttgttttgttttgttttgtttttttggttgtttttttcgagacagggtttctctgtgtatccctggttgtcctggaacttactttgtagaccaggcaggcctcgaactcagaaatctgcctgcctctgcctcctgagtgctgggacaaatgtttatttctttaccaatttttttactggattatgaaatttaacaacaggcagaagtcatgctgtaaactaaagtagggagcctgagtcagagcccaagtgactctagtcataaaagctctctacatctgcctacagcagactgcatccttttctgtcatagcttgctcatcagacattgagaaaggaccttgccacattgtctcagtagccaccatttcaaagagttgatctctgtctcaagcaaaagtacactatttggaatttgcagtggtttgggctacttatgtatagtaatttcctctttggttcacagctcattggttgcaaatatctatgtggctctgcctacccataaagatgtcaggaacctagaattatttagaatgaagcatccatagtttctaccttgttaatgttaacaataggtagcagcctaggacatttcctctacgtgtgtactatcataatgtccgaacatggctcacagaatcaactaagtagcattcatagggctcccagagaagagaggccccttggtcttgcaaattttatatgccccagtacaggggaatgctagtggcaagaagtgggagtgggtgggtaggggagcagggcgggggcagggggagtgtataggggactttcgggatagcacttgaaatgtaaatgaagaaaatatctaatacaaatttaaaaaaaaagaggggtggctccccgagagggaagcagcaatcacgaagcctgtgctggtctgtgccagatcctcttcatatatgctatggagaggatgtctgactctttagagtgttcttaggtcccttcccccttactgagttgcctcacccagccttgatgcaaggatttgtgtctatttttattttatttgttatgtgctgttcagctgatattatccttgggcagcctgctctttgctgaagggaaacagagaaggttggatctgggggagtaggacatggctaggaggtgtggagggagtgtgagtgcagtcaggatatattgaaaacaaaaacagaaaaagaaaagatattttaaaaatatctttttccatcattttaaaaatgaaataagaaatcaagaatggatgcatagtgcccttcaagcatcataatgcactacactaggcacgaagagaaaccagggtccaactaccatgcccgggagttgtacatttatgcaaagttttatgcttcactatagactatggtttttcaaaaacgactttagtaactatttgcaaatgctttgaacccccttcctacccactgcttaaaggttggggaggaaagctggtctataggacaatggaggtgtggacccatttagaagtaattctttgggtgcttcccatcttcattgttaggataccagcagtccagtttagtagtggcaggataccagcagtccagttcaaaaagtgtcaccaaatgcaattcagccgtggtggcatgttccagcattaacagccaagcctccactaagtcagcatgagtcagcaggagggaccaggagaagttctctgccatgcctctctcaataaagtgaagatcagcgaagatacaagaccaatgaagctttgcacagtaagcaatgcaagtgtcccatcactgtctgttgggtcctacttatactctcttcaaacatcacatgtcttcccatgagtctacatcatatgacacaaccagaaatttcctcttaaattcactttacaatggaccagattttgtctcaattttggtttgtttgttcatatttcaaggctggtagtcgatctagagccttagaaatgttaggcatgctactgagctgtgtctaaatatacagaggttctttttaattctttttctggccttcatttttaaccataaaaagaaacaaatacagttgaaggttttctggaaaatataacaatgagctatgtgattctcacagtcttctaagaaagtctatttgtcttgatcctagaacaaacacttaggaggttgaaatgtgtgactcttcacttgatctgagccagaggccgagaagcactaaccttgctttattctttgtctcatcctctgatcttactttatttaggacagtggtcagtggtaaagaactctcataataggtgaagctacccagatttccatttcaatgttcaatttgaaggaatttctaacacaagtaaatgtagaaagattataatgtttgcaatgacagctgaggtggcctctgtaacccttactttacggaatgtatagggtcatctgacctcttgtcaagcagagttgtggatagtgacacattccttgactctgcaagacaggactaacagagcagcagccagtgatcacctggtcacaattctgaggaagtgttgagagaaatggggagggcagtattaaagaagatctcttggctgagatagaaatgtccaatgtttcagagaagcctttgccctgagatgaaaaactgagaggatctggtcccttccaactcttctgttggaaaagggaaagccttatgttcttaatgtgcttgaaaccaccgtgctcccatctaaaaatttagtattttcttctagtgagtcaggtactaaacagatgcccagggtctacaataggtcctcagtgggcaaagaagtctctccagcccctgatgcccagaaagcttcatctcagctgtatcaaaagtaagtctgcaagcttcgttaggcccatgtagcagcttccaaaggtccctaggccacattacatcccaagctggaataaaaggcctatgtagtagctgcctgccttcctcacgaatctcttgcagcctttaattaaccagtgttcctcaagtgctttgggctccctgtttgggtagatgtgactgaaatgcaaagtacctttcctgccttatttattgctccagcgagcacgctatatgctggcagcatttatcttcattttaattttatctcccacaaatataggcattaatttaaatcacatacagaacataacagtttttatagaggcaaacttattccagcgtgctgcattttaatatcgcactttaccatcttttctcacttgatgcaagaatagtatctcttcctgcttcagcgtttaatctcaggacaacagaaactttgactgtggatattctttcttactctcaaactttatctgcctcaccgcctggctgttgctgactgcaagttgtgtgtgttttgagcactggtagaagtttcttccattctatatccctttgccttcctaattcttgatctgggggtggagagtggaggataaagggtcttacagctacaggtgagcccaccagtacttccggtaccttttctaatagtgacagacagctgagaggccccaatcctataatacatatttcaaagaagctcttgagcatcatccatgccccctctgtccttttattcaaatgagggttttctgtcttactcatcgggactcacgaagccatcttatgccacttgagtcttccctgagggaatgtgtactcggtgggctcctgtgtttgactaagaaacattctagttagctgtcataccctcagcaaggattctttccccatccttaatttgttgcttgaaaagttgcagccttcctcagttaagttctacagaactgccccaatagtcatgctgtccccagaagtcagggcctctcaggcagcaacatgagcctcagcaaagaagaccaggatttctgagcctcctcgggctctctctatccaggggccttcctcctagtaatgtgtaccaaagagaatggctaacttgttttcctttctgcaggccgttggatcgctagccttgtcttttggattgtttgctgatttttacatttagtctgcttttaaaaatgtactagcaactctggagttacctgttttattccctgttctatctcttgttcgttttgtagatgcagaaatgaggtcctgagaagtttattttccaaatcacagaggcagcacgtggcaggcctaggatgtgtggactctgtccaccctaactaatgtacttttggaaaagctcttttcagcctaaaatcttgacctcttgtttgttgctgactcttcccaagccgttcatttttgtgctctcaggtggattttatctgtggtaagaacatggttaccctggaaactcactcgctagagcagcaatccaattatagcaccatcaccagggtttattaaactagtgttgctaatgacgtagacttttgattgaaagatgctgggaattggattcttaccatgtctcaacccatgtggtatcacattaatttatacttctaatacaaacagaaaacatattctttatctgatgggtttggtttagaggctgaactgagtatatccatttggcccattggtttctgccctgtgtggagctgcctactcaggaaaagaggttgaggatcctcttttctctcctccatctgcgtctatccccagcccaaaggactaatggcactggccttgcttggatctgctgaggctacagatccctgggcagttttatttcttttcatgctttcagttgaaggttatatttgattcaggagggccatttttctctcatacactttagaccttcagagacttcccatgcaccaagaattttcttgggttcagacggataggttgactttaaattatgtgagctgaacaatcaggtctatgtggacagagttacctggtagtaccagtttgcaagaaactgcttcctgtgccaatggtttgtgagcttacacctgaagcatgtggcaggcctgaatacattgagccctttacatctctataacaaggcaacatcacctgctacctgataatggccatcaggttctattaattattcctcaccaattgtaaacatggagctagaggcaaggtcttggtaacctgcagggatattcagggatgtgtttggacatagtaaagcttgtcaatgtattgctgtccaacatctgactctcacatctcagaaaagaatcagaaacactgcctcgaagcccttgaagctgttacaggtgtccagagccattatcatcctgcacactgcatctttagcagtgatttgtgtaaaatgctgggaactgggaaaggagaagtgaggcggcctctccctgtggcctggagagtaatggtgctgtttgtcatcactgaacagacttccagacacggtatccaggttggtaaataggatcacacaccttcagagaacagtctgctttctgtgttagcattctactctccataacttgagatcctcattcaggggcttaggatgtaactccctgcctcggttcaattcccagcattccctgccagattgagagattgctaactgtctttcttatgttacccacttggcttaagttttctatctgtataatatttcgtcagcttttactttctaatacagcccatctgtaattgttgaaacttgaactaaagatttaaattctgttatttttctgattgtggcaaatcttctattacttgaatgaaatgaggactaacatgcaatacacacacacacacacaaacacacacacacacacacacacacacacatatatatatccttccttgtaaatgtctctgtggcatccgacttgtattcacatttgagtatacatgtttgtattacacaataatgtgtttaaaacatgagaaggcaatgcttactaatacttgtaagacttgggagcataggatcctttctctgtacctatacctaacgattctatattgtgccatttgccatgtgtttggttgccattctgcgtgtatagtttttatggatatatttcataaatttctaaataagtgttgtgttaatgggtgtaaaaatatgcctgagaagagcagtctatgaagaggagtttaagttcttcatgggttgattctattgcttgggacctgttatgatggcagaataatatcatagagagcacatggaaaaataactgcttgcttcatatttatgaaatgaaactagagatggagcctaaggcccagcatgcccgaaccagtgcctgctctcaagctataacctcattctgtatgctctgctgtccagtggctcgcctagcagcgccatccttaggagcgtgctgaatatatgcagtgctttgggacattctagatccaaaccatagcatattgtagatgtattaaatatgcaatttagcatatttattaattttataagaatcattatgtgtgcctttatatatatatatatatatatacccattatacacatgtatatacatatttagatatatgcagttcgtatggctatatttataaagatataaactataattttattcctctctaggtctttcccttcctctctccccaggtctctctctgcctccttacctctctactcctctctctctcctccttttccttccttcctttttctcttccttccttccttctttcctgcctgcctgcctgcctgcctgcctgccttcctgccttcctgcctgcctgcctgcctgccttcctgccttcctgccttccttccttccttcacctacccacctatctaccatccacctgtctacctatctaccgaatgacccaatcattttccaccaaccatccactcagctgcctagcagcttaaccatctatccacccattcttacacatatgcacccatctaccctttgcatgcatgcatatatccactcatctacccaaccatccatttgcccattcaggcagcattgaatgacaacctaccatgtgcttaaagnnnnnnnnnnnnnnnnnnnnnnnnnnnnnnnnnnnnnnnnnnnnnnnnnnnnnnnnnnnnnnnnnnnnnnnnnnnnnnnnnnnnnnnnnnnnnnnnnnnnnnnnnnnnnnnnnnnnnnnnnnnnnnnnnnnnnnnnnnnnnnnnnnnnnnnnnnnnnnnnnnnnnnnnnnnnnnnnnnnnnnnnnnnnnnnnnnnnnnnnnnnnnnnnnnnnnnnnnnnnnnnnnnnnnnnnnnnnnnnnnnnnnnnnnnnnnnnnnnnnnnnnnnnnnnnnnnnnnnnnnnnnnnnnnnnnnnnnnnnnnnnnnnnnnnnnnnnnnnnnnnnnnnnnnnnnnnnnnnnnnnnnnnnnnnnnnnnnnnnnnnnnnnnnnnnnnnnnnnnnnnnnnnnnnnnnnnnnnnnnnnnnnnnnnnnnnnnnnnnnnnnnnnnnnnnnnnnnnnnnnnnnnnnnnnnnnnnnnnnnnnnnnnnnnnnnnnnnnnnnnnggcttgtttcttctcagtcagggatgttgctcaccagtaccttaagctattttttcttctcattttctctaaatatcgtctatggtgtgaggtttttttttttttttttttaacttatttccttcctgggactctttctgatagatttaaatacagctcctgcagccccttcatacactttacctgctttgatcagtccatgctgcagcagtccaggctagctctgcagccacttgtagtgggtcacggtgtagcagagtataccacagctacctgagccttcaatgcctgcagcacaggttcagcattggggtatgtttgggattaagtagatgttccttccagggctcactgaagcttccattactatcatgaatgatcttccctctctctcagttccagcccagatggagtcttgacttttcataatttattcagtgacatgcacttcctgtgtctaatagtcaatcacttaccaaagggggagaggtgataagagagtaagaataattttgtcatgattcataggcacttggccttcactgagtattaccaaaaagcagacaaggcaggctctgctaaccagcattcctacatggattcttgtggcctgagcagtctctaagccatgccaaaagcatccctgaagtatttacaaggaatatatttctgtggatggggatgtactctaagcctttttgtgcagaaatatgtagaggaaagaacaaaaggaggaaaataggtaggacgcctgcatttgaaacctggttctcaccagtctcagccctaagatgtcacagcgcgctcttaaatcctttactctctttgtaagtatttcaatgcggaaaaaaaaaaagtatatttgtcaggagtctgtgatcaagaaaaaaagttgggaaaactaaagcaattaataaaaaatggaaaaaaatgtcaattagtcaggatctaattttattattctaaatattatggagtttaaaaaaaacagaaggaggtaagtgcttagctttaaaagtttttgtcaaccatagtgctactatgtagccattggctagaaaatgacaattgtgggtttttttttttaagcactgtcctgatatactgtcctgaagaatgatgctgttgaaacaaagtactgttctcaataaatttcttgtgtgtgtctgtgtgtgtgtgtatatatatatatatgtatatatatatgtatatatatgtatatataatatatattatatatatattatatataaacactatgtactcataaagttaatgtgtgtgtgtgtgttcaaaacaatttgcctgatttggggaggaattttgtttttgaacttgctcccctttgttctgtggcacttggagattcatgcccccaccttgttgaagctggtgggagatacattcctacattcttaggaggaagtcatggttctttaaaaatatctggcctatttttcttacatggtgaaaaatgttaatgtagtaggagagcatattagtcttgggacaccagtatatttgttatgatttgttttctacccaaagtcaaagatctacagaagccctcataatgtcccagaggttttgtcaaagaaatagaaccagcctgaggtatgtattgggattagctgtgaaggatatctgtggactgactaggaaaacagaagtccacacagtagggtgttaaaagcagcaggctggctgacaactggttcattcaggtcttcccagaccatcacttccttgaagccagttgattggattttaatgaaatctagatgcctccaattcctgtttggtcccagggacagtaagcaaaaaatggtgatcttccaacctgagatgaaagagaaacattgcttgtccaagagtgactgcctgttctcagtctttgtggggttggctgttgcctcttctccttagccttattcttacattctgcttttcgatgatagcaattgaactaaaagattatcttttttaaaatctttaataactttttaatttaaatagaattacctcattttcttttccctcttcttctcccaacttctcccagatagctaccctccagctactttcatgacccattatcaaattgatcacgcctttttatttgattattactcttgcatacacacacaagcatatatatgaaatcaagactatatggatacatcttgctgagtccatatattgtattttttctgtgtatagagtttcatggctaaccacttttattgaagggctcactctgcgaggtactaatcctccctctgctagcagcctatagatttagccttggtgtagaatcctttgaaagtttccctcttctacatggccattagagcccttgtcgtggtatttgactcttagagtctttctaacccctcttcctccaagttcctggagtcatagatgcaggagttgtgatgtaagtgttccacactgttatcattgttatcctatgataacattgtctcctttacttctctgaccacacagcatatagcttgctctactgtctgcatccagtccttttagagcatatcagtacccttttgatgggctcttgattattgctccctcattgctgtgtttctacccagctacagtcaacatagcctaaatcttgtaattgcttgtccatattttaactctgtactcataaagttaacatcatatgaacatcacactcctgtgtttcttccaatctatctctctctctctctctctctctctctctctctctctctttctctcccctcaacttcttgagcatgtctacctccactcaatgtctgtatttcttttcttgtccagccaggaatctgcagctctgggcttctggcccttcttctcatcctccttttgtaggcctctttcagagtttcacagcaggcctgcccagtaccaatcctgaggctccttcagtcctcagtgaccacttaaggctattacatgccacacccttcctttactttcctccttcctgagcagtcccacttaggaatcaccttagctgttcctcttgtgcctctcaaatgtgctttccctttgagtcagaacatcctttgtaaggcctattggtgacctcagctaccagtgttgtcatggtgttataggactatgctctacttcatttcttgcacttcaaatgcttcttctaagcttccccgtgtcgaaagaaagccagtctctctccagagtctgttcttatgtgttggttaacataatgtcactgactagccagctcccttagcaagacatttggataatttttctaggcttcactgtcccagacagaatctcctttcctaaatattttctgtattgcttacttctctctgtcttcaccatgggtcagagatttcagatcactgtaggctcccatggaccatgggtatatttgttacctgaaacaaaggaggaaggatttattttgccacatcacttcacagattatctgctcacagtgctgtaggcctgaactgggtcagagcatcatggcaactggaaggcatggtggggcaatgcttatcagaggaagtctgggaaggggggaggggtgcagggttgaaggacaggtcagtttccctaacaccccatgcaacctatttcttgctgctaggccctatctcttagttgtacatccagctatgaaccaaaagatcaatccttgaatcaatagcatttttgtgatcttgtcatctctcatgactggtaagctaagctttcagcacagagctttctggggtgaacactgcatatgaattgtacctttctaaagatgcaatccttataaccagttgtttatacccagctccatcctgttcatgtaccaatctgttctgcccgagcagattcctgtatgcctcctcttcactttatcttagcacaggagtacactacaataatcagggaagcagactctgaagtcaatagaacccagtttggatttcacttgtgtcctaggagtacatgaggaatagcccatagtgtctctcttaggcaggatgtctttgtggattcttcctctcctgccacaaacacactgggctatgctgtgaattcacatgctcatctctgtgcaaggaaccctggttatgccccagcctttcatggctgtcatcatagataccttaaagctgttcagcaaactcctcttcctagctcattgtcaggaccttgctgttttcttccgtatctttgctcttacacgtacgaagcactcacgttccatcttgtgggtattttctttcccgcttttaaggatcattctcacggcacccactgtaagttccaaagaacccttgcctattgaccctgctctcttgtcatatgttgtggaatgctttggccatgctaggcattagtgaatgtctgagaactgttcataacgtggctgtctcacttactgcatgtggattttcatacgctgaccacagctttcattttgtagaagaaaacaaaatataaggctcttgtttctgtggtggctccttgagtagctgctgcttctgcatggctgtttgtgcaagcaaatcaagtggcagtttacgaggagggacagccccaggccgattcccttctcttggggaactcaaaatggtatggtttgtctttcctcttcaaatcttgatctctgcaaacctagtcctttcccctaacctccatatagttgtatctcttttacatggagaaggagaattctaacctcctgcctcaggtatttacagaagtagaacttgggtaggggcgggcaagcacacgtgtgacagaagtttcagcattcatgaggagccactgtactttactgttaagcttcgggggattttttttttttaaacagttctacatggggaaagtcggttgacgatttttaaaaggaagcgtgccctttttcattagctccttttacctcatgctgagtcatggatgagagagcatttgtaggcagctgagatgcaggaagaataatcctgtcacttacacttgcaggttgttatgctttccagaaaactctttcagtgggttgcaaaagtgattaatctcccccttgaagctgacgaagaggctctctgataacaggaaattgaaggggtgggatttctttagagaacagggtactctttccagttttagattagaaaaatctattttggattggagcgagcatgtgtggggtgggggtgggggtggggagggttccgagtgtgcttgtgtgcctgcctgaatctgatcatgacctgaaaggatgaaaggaatttctggtgggatggtgcctttcgtggactggtttggctaattgttcatgttgcctttaaaccatggctttctgcatctcattctcttgtttattttacactccatgtttgagtttttacgtcatagtcccagatctcttgagaagacatcctttctaatatgagaagtagtaaagatacactgctgccttggttaaactcggtgggtcccaaaaatcaaagaaaagaccttaatctgggaagtgttctgtggtgaatagggactgtaagtcaggggtgggagtgagaatcattagaatgcattttatacagctattgaaatgtcaaagaacaaactgtattatttttcaaaagatgggctatgtttctcctgttgaataaattgtgccctcagtgagaaattttgttcctgtggtgtttctgcaacatataacttggacataagtaagtggttaatataactgaaatgcagtataccttcttagagcattaaatttttttcttcataattttgttttaaaagtcacttttcctgtgaggactagcaaacaattgcttagtcttttactggatactccattaatttacctccaacttaaaaagataattaaaaaaaaagataataaaaagaacctagcacagagcctttttgccttgggctgttttgtttgttttaaagttgggctatgttgccatgctagccaagaactcctaggcttggccgctctgttcttttccttcagactctgtggtactataggcatctgtctccatgctcatgcttggcctctggttttataaagggtctgagatttaagatgagttcctctgggttcttaacatgcatttgctctgttgcccccagagctttctgcttctcagcaggccattgtaatcgggctgtgtcaggctgccttccttccccactccctgcacccctcattctgaaggttgctcccagccagccccttgagaactgagtgcattcactcactgtgaagaggtgagggaggattttctctcaactctgtctgcactgcccctaagctcccataaagggaagacaagccaatgtccttcagcagaatggaactgctttgggaattcagggcttcttttagacctaaagttaactatccataccacttttaccctgaggcttcatatctaggttttgaattctgaagtagaaagtgtctaaaccatttacagttgaaaccttgctaattctcagtgcatagccacaaggatagagtggggaaagaaaaggagagaaaacgaatggccaagatgattgtattaaatgttttcagtgtatcatatgtaaacacattggtatatttgcatctgaatatttatataggtgtttgtactgctggcaagcaccatttaagtgacactattggacattctctgtgtccatattatgggagttgtaaggttcatatgtggtagcatctaccgtaaaggatacagtgtttgggagatggtccagttagggcaagaggaaatgtgaaggcatgtgatattttaagtagaacaaggtgattgcaaccaacaggtgtctgtatacaggtctatttaaagtttttatagcctcaatagaacaacttttataccagtaggcagtggagcgttgtcacggtattatttattattgccatggagattaactgtcttaatttaaattgcctacagtgtttttaagttggagacattttgatttgatatttttaagagagaaaggttctatacatattatggaagagcctttttcatagctaaatgccaacagcaaaatttaaaccaaaaagtactcatgaagcaatggtaacgagaaaggattgtggtttagtaaaggagaggactccctgcaaggaacagtgcttgtgccataaggatgatgtgctgctgtggagagaggtctcattaatccatagggacgactgtgcttcacccatgtgagaaaactttagggtctacatagaacacagcttgctgttgaagtcatgaatgccataatggtctacattttgaaaagtgaaacagttgttgtgagggggtcctgaaaccagcccctctctttctaacacctgtctcttaactgcctgcttagaggacgaaccacagaatgctgggcagtgtaatatatggcattcccagtttgttccctcatcctagataatttcagcaaaatagaaggagctataaatattgcaaagatagttgaatcactggaagagtggtgcacaggaggccatcgagagtaattgtttatttccattaccgtactctgtctgcaaaccagaggaccagatgctaaattctgctagataatgcatctttaattaaatattttatttgcaatacaattaataatgtgatctgttactttaaccttattaagaaattaacataattttcatataataggctcataaaaaggcaatgtgctttgaaacagcctttgctaaagcagttatgtgcattgtgcctgttgagttctgaatttagatgaattgattgtgggcaggaattacctggtacagtggactggtaactgtaaatccgaaagagatctagtattaatgttttctttagaatgagctaggcttctcagtcctccttcagaggctcagagagtaattcccatacttgctttgtgcttctgccctcctctgactctttttagaaactcagtgtaatacaaacagtgataattccaagtacacagtacactgggcgctgatgcctcctaatgaatgggaggtcatgcttctggttttgtgtcattcttgatgttgttttaatttttcgaaatgtgttaacatgataattaaatttctctagctgtcctgtgaagaaagaattttaaattgcgctacatgttgaaagaacatttagtgttaaaaaataatatctgttaaactgagatcatctgttggttcagaacaatgtctatagctatgacaatggcgctttaataaattaacatttaccaagctgtccttttaaagactgtttgaaatgtcacccccaccttcagctgaacagaaataatttgcatcagaagtgtgtgtgcccttaactcttaatgaagtaaggagtccctctcttcagagggtaattgctgtcccagtgaagtgtttatctcagcactgtcttgtgcttgcccttcctttaccctgtgatgtgtcccttaattgtatcagattagttctcgagtaaaattaaaggcagcccttaccctcacaactggtcctgctgtaattgcatagtcttcattcagtactgcagaggtgtggctgacagcatagagttgaattcccaaactctagcatatgaaccaacactatccatgtctttggacaacttgcaccaaacttgccaaactttatttctttgtagagataaaaatagggtcttgatcacctttctgtaaagtgtaaaggattttgataagacttggcatagtatgtatcctccgttgttaaagtttatcacatttgcatgttctccaaagataccttctgcttttctctgtgactctgaccacactgtgggctgaaaacaaggttccttccctcatctccagagtaggtgtgtgcacactggcaggaaaccatcccaacagatggatctcagaaagcccatcttaccttctggatagagaacaatccatctgaaactttaatatactaatggatttctctatgccacttaacattctgagttgtattttgcgggtatttaaaagtattctgtgtcacttttgttgccatataggctctcaaggccaggaatctctgtgccgaatttcccccaactccaaaactccccatacttaattataaactgttatccttatttgataaggttggaaagggctcattttatatacattcatattcttatttgatatacattcatgaatatgtgggttttattttaattttatttagtttttaattttaattgaaatataagggcatcacttcctccttctgtccttcttactctaatcatcccatgtccgagttttgtattcctgtggtttcatggtttacccttttgcattggatcttatggggataatacctaagaaacaccaattctccttcttttaagtatcataagttgcctgtagttctttgtctacaggtgaggctatgtgaggtttcccccatatacattagtatgactattagtgttgtgatttcttccattttcttcaggccaccatattgttaaggtatcatgggtatagcttgcctgtcttctctaggagacaatagcatatctcctggtcctccgacttttataatctctttgacttctcttctataattttccttgagctatagtctaacaaaaaaatctcaccatctgtcatatgaaaccttagcccaagttgttgcccatggtactccaagtgactcccagaacaatgtaggctatttttggccttggttgcctctcagaggttgaagttaagttcgttttgttgaagacaacacacacttgagccagagaacttgtaagactcagcctgtctctaactaaaagcttccttaagatcgagcttttatattaccagaaggtgctgagcaagatgctatggcaccagtgccatccagttgtgatccaccatggacagcgtggcaaagtatcctgaaaaggacagggatggtgatcttggaaatcaccaacggcagtctaattggacttagggctcacacaagaacagggcgattgtgcctgacatcagaccagtgaggtcatcagagactatcaccacttaacttgatcagcatagtccctaactacattatgaagctcaaccttatacccacaaagaagactaactctgaccctgcatcaaataatctcccctttgcagcagttggatacaaacaaacacctataactggtcaaaaacactatggaagtcatagagtgccaagcccgaagcaataacacagctcttctacttctgttattaatgtggtctcttcgtcttacgttacaacttgacttctgggtggctggtgagatgacttagagggtacagtccttgatgaataagcatgcagacctgaggttgagtccatagaacccctgtaaatagccagtcttgcacatgggcgtacaggcacatggatcctagggattatatgtagtctagctaaaatgctgcatctgagatgtgttgagagaccttaagtttcagaaagatagaggaattcatgcacagaaccatacacacacacatttgggtaagcatatttgcacatacacttacagacataatatttccccttccaaaacacacatcacagaccacattttcttggagtaggaggatacaaaataagaaatatatatagccataatttatgcagtaggtaagttactttggttgtctttcctccatagcttagctgtaaattctgcaagaaaatgacaaattacttgtttaaaggtaaatgaaagtgaatcccaacatatgtgcgaccatctttatcggaagcaacttgatagctacatttataggaatttggcttatgtacatggatactacatatacaaacagcataaaaaaaacctttcctgtagaattttgctggtaatgtttaaataagcattgcttgttattgagcaatagctatatgcttataatctaaaaatctcaagcttatatatctgtaaaaatgttgtgctctaaaatgaagttttaataccatttataaaagttgtgttttttctataacttgaaactttctctgaggcttcaagtttttttaaagaaaaaaacatacatacattaaaactattcagttcactgtaaataaatagataagcttcacaaagtattctgtgtaatgctgtattttaaaatgtagactcattgaaaagtcataactttaaagttgtgtaaaaattatttatatcacagtttgaaaggatgaaaatttttgctactttacaaagcattatcaggcttcattttctttttgttattgtagttgatattttagaggtttttttcctccatgtactatgagcaatgtctcttttcttgtacattacgcgacactgttgtacataagcaaaaacaatttctttaggtttttagtactaaaaggctcccttaattgatagtagtacctgtaataccccttatgtagctaagtatatttcaaaaggaatctgataaacatatgactgttatatgatagtatttgaaggttgtgttgctctttaatatatacatacacacagagagtgaacgagcaagagagatgttgtatattacatgtatgtgtgattgtgtgtatgtgttcatttgtgcttctgcatagtcatttagcacatccagagtgtgaagcaagagctggccactggtggggaaattcagtgggatgacaggactatggcaagctagaggactccttcacctcaggcttatggtgcatgtgtaatctcctgttactagatccttagagctgcattctgttaactagacccatggcctctaagagcatcatgtatgaagttccataccactgaaatcttgtatgtattaaacaaatgtagtttcatacctggtattgatcttctctgatatttctacttactaagtgctcagataggaattccctcaatcagacaagtcagcgtaagcttacctctaaattcttatcaggaataaaagtgttcaggttatacagacacctgtgtgttcctttgagtgaactgcctagctgtgttgttaaggcatatgcatagatactgcattgcttggatttctctcagtgaaagatactttaccagagatccgtggactactgattgtgtcatttaatttgctaacctgtatttaggcctcctcttctgtcctggaattattcctgattcctttttcccttttttttttttcttctgatgctccagcttaatatttttcttaacaaagacatttaaacatatgtgttcaacttctgtcaaatctgccacactagtggatctcatttgctctgaacctgtgcatatgaggaaataatcattgcatgatgtgaaaaatgtcagtttggatgttctcagcatctttgctatttattgccccaggttcttctcctttagcatgtcttcctttctttccttgattttctgatctttctggtgtatatgacataggactccagaggaactttctacattatagctgatgctatatacaacttcaaaagcagttgactccctgataatggatcttttaaggagagcgattattggggaagcagaaacaagaagaaagcaataccagtaataaactctgtaatacatgactgctcttagatgtttctccccaaatatcactgtttggggattagaaacccttggaaccaatattagtgggtttaatagtgaaatatttagcctgtgtctgtcttaatgtacattgggagttgatagaagtgtttctgcattgcatcagaaataaggttgatggtaatttgacattttgtaggaagtgtgttcctagcattttgatatgctattgaaccttttcattctttgtttctagaaacatccttttaagaaaaatgaaacataattcatagctctgcaaaaaatatcattatggttctcatatgcttgaaacactggaaatgattgccctagaccgaacatatctgttaatgccagttgacgtcttacttagaacaatataaatagctttttatagatataaacaacaatataacaatataaacaacttttttcaagagttgtaaaatttgtggatctattatctaatgttaaatgaaacataaaatataaaactttatataaatggggtttatatatataaacactgacatacatccctaccacacacattcatgcatacatcatacataaaaacagaagaccagagaaagtctagggggaaagatgaataaaaggttgttatcactaaagattttattgatctgtttgctggtgcttttaatagccagactgccaacattaaagtgaattttattatttaagaaaatctcaaatagaattgttttctagtctttcaatggtctttaaggagaaatcgtgtgttaagctctcccattgctctttttgctgactttttcccctggcatagtagaggaagaaattctcctgtaaagagtatggatctactatgctcctatgataccaggcatcattgggtggtcctttctcttggctttccttttcatccctgctgtggttctttttccagtccttgtagcaaacattggcatagttgttgctgtgtgtggtgcttttgtatttctgtcaagctccaggtaaagtttacctacagagaggaacaaattagagagtatcaagcaaatgaggacggaatttatgcctgagtatattcattcattttaccaattatttattcctttctctgagatgctttgatgtttaattttatctgcaccttgtgctaatgtgctgtaaggatcataaggtagaaagaagaacattggaacagggtcctactcataaatttcacagttagaataatatctcaggatttgaaagtgaaatgttcaacacataagttcttgtacttttaaaaatgtattcctcatctggtagcactgtttggggatgtatttgaatctctgagttatgggtcctggcatgccatggtaggccacagggatggtaatacctactactggttttggcctcagttgtctaccaaatgttcatcacttttggaatcccatcacattctgctgctatgggtgcacatataacatgctttctcctacacaatggatggaatcttccaaaactgtaagccaacactgtcttttctctttatgtagggtcaatgagggattctcgtcactgcaaatacaactgtaactaatacaaattccagcttttgaacatgaaactatatataaacaccccgcttaagtacacttatctgagaaacatggaggaatatgttaatgtttgaaattatttgttgtgtaaaattaagaagcatttttaattagaattttgagaaggagccaagttataagacaggagcatgcttaaagccatttgccaagtcagcatagaatggaagcctgtcctttgcttctgagttgagtgtgctttggctgagggtatctggcatgtatttagaggctaagtggcttggcctgcaagcagaccaacttctgggaatctgagacattaccattggttttctgttccttttttgaatacctgtgagctccctgaggccaagagtgacaggctgcatccctgacatttagaaggtggcagggaatggtaacccaaaaggggaattctaaagtcacataatgtatttctttgctctgtggtagttgtgctctctgaaggaaatatgtggtgatatgattggctttccctgtacctggctattttggtttttttacatatttatgataattttataataagaaaattagggaagaaaaaaacagaatgtctggatttccacttgccactgtcatgacccaaagattttgttttgttgtctttcttggtactggattttagtcatggtgtttgtacaagtttatattcttttgctttcttatgatgttatagcatataggaaataaacattttatagccagtgtagtttgaagtttgggaaagcaaattttgaaaatatagtcaaatgaggaattttttaaaaatattctctttcaaaggatcttaggtaccagaatttatctgtgataaaaggtgtccctcagaaactttaaggtatcaagaatctttcagatttaacaaatcatttatttttataaagagaaaattgaaaccctaaaattaccatgagtgcatttgtcaggctctgtattttcttagattgttccaagttaaaagtgtgtccagagacattatgtctggatttgctattgttcattattttaaaaagggatagaaaggagatgagccaattcttcatttcacctccttttctttggagaaattaaaaattgacttcaattgttcatgtccccattggtttaaactacctctcaccttgcgattgatctgttgataagggccaaatccccactccctttttctccaccacactttgttacttgggtcatggtcaacagtatggcagcataccctgctaaccatctttggattcctggataacagtgggcatcagtcatatgaagaccatgaatcatcttaattcttcaagttctgtagtatttactacagcacagagtctaaattgtcaaataggcttcatcagagaagtttcagaaaaaagaggtaaaatagccaagggggtttggaggacctttccagcaaggactggttttctgatctgttttgttgatgttgttgttgtttaagaataatgtttgtatattaccaatcatgtggtcgagtcctgtttgcctctgagattatgatgaaggcagactgattattcacacactatatacaggtagagactactactgcttgcacttttcatcaatttcttttacttcagtgattgacaggcataaaaggcccttccttccagatccttctgccctccctctcccttttcaagtcacgttacgacagacagtatctcatctacatggtcactccagggtttccacatggtcactgcaggattgcctgggcctttgctggacctgcttatttatactttactgttgtttcttctggtagacatgggaaagtgacttctttccaggatggcagatgtgcctggcgcactcttgctgaaatcatgtgtgctgtggttgagagaaaaattacggtttttccgtgattgttgaagcacagaaccatctaagtgattgtacagagtgagtgtgtgagcagttttgccacacttgctcacagtgggctttcctggcttgttttatgaggatgaaggggtgtggacaggcttgctgaatagagctcctcagtgtccctaatagtcgctctttatgaaaccattttcctcttcctcctactctgtgtcaggagtcctccttccatgggcactgtgccccctcagtctggcctttttatccatctagagcaaagggacaagacacttgtttcttagaacaaacaggttaacagaaaaacaaaacagaacaaaacaaaacaaaaacaacttactttgctattgaatatataatggagttgatagatttgatagattcaaatcatattaatacagtgatcatttttaaattagtgggtttttttttctctgtgagaaaaaaaactgaacaaatatcttgtgactctactatgagtataacatactcttttatagtttcaacaagggtctgaatatatagtgtcagtgtctgaaaattaccccctattcctcttttgctttgattttggcacccaaattcctttggaaatatgggagggggtgaggtgggtctgtttatttcctcagagcatgactactcgttcacttgcatggacatagcaactcaccctgtgcctctgattcttgataggcttccacattgctgcctgttatctgagcccagatgtctgcttttgatggaagcatatacagaacttgttgccttctttcaattgttagatggtctggtcatttaaagtgatggtagggcctttgctcttctgattctggagatgtgaggttcactatctttccatgagtcagttttgcaaaaccttattttcttaaagatccttggtagagatgtgtgaccttgaccttctgtttgcctctaatgtgtcatgctcctgtgaagaagagcatgtggtttagtcatgcacagataaattacctttatctcctccttcaggaaaacctctctctaataaactgtttccagtgaccctttcaaactctgccttcagtggctctcatggctgacctctaatacaataaaacatgcacttccagaaaaccctggagggcttgggttttccagccagaagaaaccacactgtttcatcatcttttctttgagtacactaaaatgctcagttctcttattatagaagattaagcagcatgctactgttggtttaaaaaaaattcagattgccaaattacttaccatatagagcaagaaatgcagaattcgcacagaattcatatactcagattctttaaaaattaaactgagtcacagcagtgttcattatacctaatatccttagatcaatgtctacgttgttggcctagcaaatgaggtataaggtagagaagaatttgatatagttaactaccagcagtagtttatttgattggtttctcatggaatttgtcattgatacattattgaaatgacattgaatctctaaacaggattttatagacatctgttcctaaggtcataagacagaatgctaagcttaaaggaccaagtgttgatcccctgaagtcagggagaaagtgccttttaagtaataatggcaaaagtcttggacgagggatgccctaaaggattatcctctgtgacatgagtgtattagcagagggtaccttgaccagtcatgagaaataaggattggcttccctgaagcctcattttgttccaaacctaaatgatgactaagtattctttacaggacaacattgtaggacgctgagtcccttgtcacaccagaggtaatacagcaagagcatctgtgcagatcttccagggaaagataggggtttttgcaattttctgcattcagtatatagttttgtaatatagaacaataaaaaaattcagttcctctcaaataatccatatatttggagtcagtgagatgactcctgcagccaagcataagcaacctagtttaatccaaagagcccacacggttgaaggggagtactgatttccacaagctgttctctcctcaccaagtgtaccctgtggcctgtggacacacatgcacacaatgtgggtgtggggtgacagagcaattgctattacaaataagaaatgcagatgtaaacgtgaggttatttatttccgactgttagtcactggtgatagtggaccagacttgcatatccagagattcatattgagaataaggaagagaggcacacaaaaatatcaagtacagagatctgtgtattctatcacattactgctctacaaggtatctttcttcaaacataactggttttcatatttttgtcaatgcacataaactctcctttcttcacatattcctgatccatgtcctgtctcttaagctttacagaattccccattgtctttttgtcatgatttccccagactcctctgcattttttattcacataaacaatgatctatcaatattttccagctctcctggcaaggttgccccctgaaagcatcctgctggtgttttttgctgcagctcatggaaaaatggacctttctgttctcatcctgaattggtttttttatattttcttggcctgattggagaaccatgttaggccatgggggatgaaggcgcaggtgacagaattgcttgctacccagtaggctcttttccgattagacccctagagtcttgcactctcagattgaatagacgctcctgttgatggtgctctgtcttttacatacacatgtgtgctagggacagtcgactgtacagtgtgcatatttattccagtaggatatgtggagacttcccaagttcaaactgttttgcaagttgttcaggataagtaggagccactctttaaaatgttggctctctggactagcaggatgcttgctctacaaatgtgagtatataggtctcacctgtctgtttaattatcagggaggaaaaaacgaacaatttcaagatagtacctgagtgttcccacttgattttatttctgagaaacaacgtgacgtgcatgcactggtgccatccttagtcaggggagctgcctgtcttcacagtattttatacccactcagaagtgttgtgagaattaattaaatggaaaagcttctaagaccaactgctctagagtgccacatcagaccatactgttgctgctatttctgcttcagaagttattaagaatagcccatcactagctggagtatgtgtttgcagagcacagcactgtgaaatgaacaagtgtggatgtgctgaacagaagtaggatatttatgcctgcatctctgacaggaaagctgtagaggtattgaaaggcatatatgtatgtctgatgtgtggtgtatgcgtggggactcggtgtgtgtatatgtgtgtacccgtgcacgtactttgagtattagtcctgtccccatattgggagtgatcttttgaatccagggcaccagttgaaagcacgtgatttgattctgacagaaacttttgcagttgttttaacttatcattaagaaaccagctatgaggttgctttccctgtaattcacagaacactggaaagagaggctgggcttctctcaagtgtgttgcctaaagtaaaacttgaattgattaaaatgtattaaacctttgtttttgctgggtttcttcatttattgtttttatacatggaaattaaaatgttataacggttcactattcatttttgttatgctggtttttacttcagctttatattaagcatagatttgtttatatttacagatgaaaaatatgtgttgcacggatcagatatgcggatagataacattaatattcctgatcaaaaatataataagtaattgtttcaggatttaggtatataaaatatgctatgctacctccttcagtattatacttgtttagggatagatctttcagtgcttatacgatatatcaatggtgttgtatctatagacagatgggtccattgtttcttagcttaatcttaaaatatgaaattattcccatgcttttatattttttattcactgatatattgattgattgatttatagtatagaacataaaatttactacctcaacagagttcacttcatgtataatatttagtgtaaaactccatttttggtttctccttgtttacaacaaccaagactcttgatggaaactttaagtcagaaagggaatgttggctctccagtttgcaggctagcagtcagcttgtatgatccagcagctggggcaggcatgagcttgtcagctctctacagttcaaggcttctgctgtttcctagaccctggcagggagtaccattgtcctcctgttccacttatgtacttacttctcagaggagaagaatggtttctggaactaaaaaagtcatagtctacaaaggccttttgaggcattggtggtggtggtggtggtggttttggtggtatgtgtgtttattttaatttagtcgcatttttcatcaaaaggttgtatggcttgctgttagttggtttgggttttgattgttttgtttaatcttaagacaaaggtctctttctgtaggccagacttgaccttacctcataattctttgcttgagttcactgggtttgggaatcacaggcaggcatccatcaccaatcctggctcagaagagtcttgaagacatcacactccagttgtagacaatctgggcttagctaaccccagcatgcagaatgtacatagccatagctcctgcctcggtggtaactgtcagagctgtgtatgaagtgcatttgacagatgttcacatgaagttagtgttgtataaatgcttgttataatacattgattaatttccagtgagtactttaatttctgtttactgccacacaggggaaacatggatagccacaaatggaaaacatcatgtttgtcaaatagtgtgcgacacttatcgtgaaatgtggttgaaagggcaatacaccttgtccccattgttaaacagtcaactatcagtctgtacatattttcctgtttcttgactatgtggaaatatcatcgtgtaacttcaaccgtgttgtatagatggctgatcccacagtttatttgccacggaacagttagatttgggcattttcaatgtcgttgcattccttgattgatatataatttggggagttgagctttctgctgctggttagatgtggatctttaatactttttaccaaatttccattctaaacaggatcattttggattcatgtataaacctcatgacagtcttcatatcctcttgaataaggatggatttaccagtatcactacctcccttgtcttacagtagcaatatcaattaggagtgcctgacatggagctaaattacaataaatgcctccttaattagaaaaaggagttctatttgcttgactatacatgcaatatattattttaatgtgttagttattggttactctttaatttttgtttctttattgttttgttttattttgttttaggcagggtttctccatgtagctctggctatctgggaactcgctgtctaggccagggtggctttgaactcagagttcctcctctctctgcctccatagtactgggattagaaatgtgttctaccacctaccagccttttttatatataaacatgtttttagtatgagccccaaactggcctgaaaatcactctggctcttgggttgcctctgaatttgttgtaatcctgctgcttcgactttttacctccataccccaatgaatgcatttaaaattaccctttgaactgtttccccagaacacatgaattgagaacttacatttaaaaaaccattattaaaaggaaaataaatagctcagtttgcgggcatatgccctgtgatcctagcactcagaagtctgacataagttcaaggccagcctcagctatttggtgagactcccatctaaaacaaacaaacagcacagcaaatgcttctcagaaagagaaccatgttataatttgtgtcttagaggcattagagactgagggcgccactggaattaagcatgtatccagtgtgtccatgcatttgttgtctgttctgtgaggaaaaatacaggtctgatgttgcagttttcttaaggggacaacaattcattcactgatcaatgtctttctaaatttctgctgtggactatgatattgtaaactatttagggtgtcttgttgagtaaaagtgactggcccccttcccttgagaaagcaaacacgtatacaaatgataataaagaacaggagagtttggagctgagacgaaaggatggaccatctagcgactgccatacccggggatccatcccataatcagcctccaaacgtgacaccattgcatttgacagcaagattttgctgaaaggaccctgatatagctgtctcttgtgaggctatgctggggcctggcaaacacagaagtggatgctcacagtcagctattggatggaacacagggcccccaatggaggagctagagaaagcacccaaggagctaaaggggtctgcaaccttataggtggaagaacaatgtgaactaaccagtacccctggagctcctgtctctagctgcatatgtagcagaagatggcctagtcagccatcattgggaagagaggccccttggtcttacaaattttatatgcctcagtatgggggaatgccagggccaagaagtgggagtgggtaggtagggtcttagaggacttttgggatagcatttgaaatgtaaatgaagaaaatacctaattaaaaaaataataataaaaaagagcaaaaaataaagaaagaacagaagaaatgagatatactcagagagagagagagagttcaggtcaagttattttgaacttaagaactagacagttaatctgagagaggattcgggccaacgtttctttaagaacctgatacttgtttaaccaaaatcaatgtctgaaatgtgagagaacttggtaccttggatatggatgagagcttgtatgtggcatgtcggtcagacaagaaatgaagtggcataggacattatccttactaacttcgtgaagacttttaaatgacaaagtaatgagactgtatacgtgtgagggagaaatccctccagctacagggaatgattttctaggggtggaccaaacgtctgagggagctggagaagagcaagagctttcttagtagatattgcgaaatgtggacatatctgacgtaggacactccctgagtcgtagccacattcagtgtttaaacagtaacaagggaacgtctcaccagatcaacatctgttatggaaagctttttgttttctataacatacggaaaatatgttttcctaaaaaacatataaggcattcaagtcaatagatgaaaagagtaaattgaacatgcaagtctagggttcagaatacagataaactctggagagagaaactgttaagaacttttgtgatattgatcatgtttcgagctgtagctatggacctaaagagagaaggtgcagaaaagagattatgtagcagattaagggctcatgggcagcatggtgattattttcattgttactaatttatgttaagattagataattatttgtaatgacatgaaattctgtttaatccagatatgtagatttctgtacccttagactgaataagtgataaagatgaaaacattctcaggggtagtagattaatgtctcattttcagtggttctcagctggaatggatgtacctagtgaccagggggagattggaaagtgatagtcacctattggtcatcttatttgtttgtttgtttgtttgtttgtttgtttgtttattatgaggcagggtttctctgtatagtcctgggtgtcctggaacttactctgtagaccaggctggccttgaacttaaaatctgcctgcctctgcctcccatgtgctgggattaaaggcgtgtgctaccactgcctggcttgtcatcatccttattatggggcactatcaacattgaatgagccagaagtcaacatgtctattgtaagccttaagggcacaggtagtgctccttgagaagatgtcactagctgttggccacagctcttcctctgggccactgacaggatgatgcctgggtctctctgtgttctctcctccccaactctcccttctctgtgttaaataactatgtctactcaccagtccaatccactttaaagtagaagatagttctctctgttcaggttgcaaatctcttttctgagtctggtggctcaccttccttagcctctatgtgaagcctttatggatgagttcttcaacaatacttgctcgagcatgtcccttttattgttctttggtcctgctttggggaatcctaatttaaggccatcttccccaacttatcatttgtctcaaatatattttcctgggaaacttgtaattctaaaataacaagacttaattttaacttcctaatttcattgtctgttaagttacaagattctattgaatttggaatttttgtttaattttatactgtcattttaggaggcaaacttgttatttatttttttaaaccaagcatcttggatgttgctatataggtgaagaatctctttcctttcaggctgaaggtagccatcataatttccaatagaagtgtgtgtgtgtgtgtgtgtgtgtgtgtgtgtgtgtgtgtgtgtgtgtgttttaattattaaaacacatactatacatattcatagatatatgcccagttaaataagaccttgatattatgtaacagaccacattgaaaagtaaatcaaacctagaaaaatcaattgtaacattagacaatgtaacatgtacagaggtgaaactgattgcagaagggatcagctctgctttctttgatgattcatccacaaaaaaacatagaactcacactttgaatgtctcacagactcaactatgaatgtatatagtgcctgagtaactagcctaatagaaagcactttccctatgatagctgtgaagccatgccccaggaccaatgtttaaaaccacaccatttgaaaagtgataccaacaataattgcatttagaaagtgaattagtgtagccctcacttcttagaaataattttcctcttaataagcacagatacacatacacgcacaagcacatccttgaatgatagttgttacagggctccaactccagaggcattatatccatattggaaataccattagatctctcctatatgcaaaaccccagtttcaatttttatgcacatttgcatgtatgtaggtgtaactgagggtattggtaatgtaggtaatgtagggtttcaggaaaggagttgagagggtaatagactgtgcttgacatcacagtggaaaggactcaggagttgaaggatacaaatgggaagggggagaagtgggaaaggaacaccatccaatgctgagcgtgtatggaaatgccaaatggaatccattactttgctaagcacttaaaaagaaaaccattcctaggcaagctctcccactcttcccttatttctgctgtgtgttctgttgcgtgtacactggcacgtgtttgtatatttttataagtgttgttaaaactagtatattttggtgtatacgattttcttccaaagttttacatattttatctgattggacatgaaaggaaaaagagcaggcatcattattttaaagtgtatatatttatgttcttcctagttaaggaaaactgtgccaatgcttatctggtccacatattcagttaattgaggagtcatgttgctgaatattttctgtttattggattatttgatagttccaagaatatatttttgacatttcattttattttttgattttgttggaattcttgaatttttgtcatgatttaacattttcattttgaaaatcgagcacatttaaatatcacacttatctatacatacatgtatgtgtgattttctgggagtcaaatctttttatgtgctacttttctgctgttcgttttcaagcctcttcagtgtatattaatgaagctctgttgtgctacatgggaggaaggtagatccctttaccctcggacacaagggagaatcaaggcaaataagacaagacaagggttcatctcttaatgctatctattaggagcagggcatcaccttcccttttgcttgtgtctggaaagcttcatgtttttctttctattgtgacaaaactttcactgtataacacattattgatgatagtgagcgaactgttaaacagtgagccttcacagcttatcttgcttgactgcaagcaaatcaactgaccgggaactccctatttaatattcccatttgtgctggttagttttatgtcagaaactaacataactaaaatgaagtgaaaggagggagtctcagttgacgaaaaatgcctccgtaagactatgttggaagcagacctgtagggcatcttctcaattagtgattgatggctggaggggatagcccgttgctagtattgccatccctgggctggtagtcctgggttctattaaaaagcagtctgagcaagacatgtggagcacgcacgtaaggagcatccttccatggcctctgtatcagctcctaccttgcttgagttcttgttctgactccccacgtgatggacagagtgatgtgggggtataaaccaaacaatcctcttcctccccagtttacttgggtcctagtatttcctgcaaataacagaagccctgtcctatccgctcttggccactataatcccaattcttgattttgtgagtcttaactaatttcattcaccatttcatgtaaaatatgatacttatattatatttatattgttgtaactaggttggttttttatgaactaatgtcttcagggttcattcatgttgctatatgatgtagatttccttttagaggaacaaattatattgcattgtaagcacattttctttatctgtcaccatcgatggacatctaagttctttcttgttgtaaatgtggtacagtgaagaagggaactctaatctctctttgaaatccgcagttcagtaatactggatgctaggttgtatgttctcttttaccgtattcaagaactttcccactgttcgcctttgactctgtagctttgccttcccaacaacagtgtgagacactttgctgtttttggcagtgctggtcttccaggtctccttgcttaatatcaatgattcccacaaggatacgattcctcatttggattttgtgtccatttctctattataggtgatgaggaccaatgttcttaatgttttatcttttgtatatcttctttagaaagtattattattgtcattttaaaaacctaaacttattttaaaagtatctttgttttatgtttattcttatgggcagttttctgcatatttgtgtgtgtacaagtataccctgtgtgttcctggtgtccatggatgccagtagtgggtatcagataccctggaactagagttataggtaattgggagcagcctttagcatcctaggaactaaacccgagtcctctgaatgagaaataagtgctctaaccacatagccatatctgtaggcctttttttttttgtctctgtttacttctttgttgtaaggctttcttagatctttgaggattagcccattactggacatgtgatcatctgtttctattcagtgcttgccttaacagctattcattatgatgtcataatgctcttgctgtggagagcgtttcaaaatgatgtcattgatcttgctgtgcagagcttttcaatatgaaatcattgctcttgttgtatagagcatttcagtatgatatcattgctatttccttacctctatctttttgttgttgctacattgttttgattactaaaatttacaacatatttttaaattagcaatgtaacttccctgtgttctttcttttcatgaccagtttagccaaccactgtttgtgatcttttctgtttccatttgagtctgaaatagataagtgttctatttctgcattttgataggtgtcactctagatatgaaggctgttttgaatgttctaggctcttctagtccacagacacattctccgtttacttttatttatttatgtaactcctttcatcactgtctttgttttccgtctttaggtagtttatgccttgattaagcttactcctgctgtaacagtcttgtggatgctagtacaagtgaatttgttcccttacctttttaaattcagtcgtttaccggtacggcgcagagcaactgacttttgggttagtgaacttcgtaagggaaggatcttcccttatttgtattttacaccttaatacacaagcaataattaaccatactccctatctactcattttattttcttttatttctgatcatctttgtcattttctcttctattttagggctctgctagttcaatagcctctcctccagtttctactcctgtcacaggacataagagaatggtcattccacagcagccacccctgacagcaaccaagaagtccgcaacaaaaccacagcctgcaccccaggctgcacccatcccagtgactccaattggaacactcaaaccccagcctcagccagttccagcctcctatactacggcatccacatcttcaaggcccacctttaatgtgcaagtgaagtcagctcagcccagcccacattacatggctggtccatcctctggacaaatatatggtccagggcctcgtggctataacaaccagccagttcctgtatcgggacagtgtcctcctcctccaacctgtgttggtaccgactatgcatatattccaccatctggacatccgcctgagtctggatatgggtatacctccaaccaaggacgctattatgaaccttactatgcagcaggtcctagctatgggggccgaagtgaaggtgatactgcttatgggcaacaggttcaacctaatacctggaagcgggaagctgcgtatgcccctcctgcaagcgggaatcagaaccatcctggcatgtatccagtcagtggccccaagaagacctatatcacagaccctgtttcagcgccctgtgcaccaccactgcagccaaaggtaagaaatctactaacataacaatagggaaaaggaaatgacttttctttagagagcagtcctatttgcacaggaccagtaccactactcttcagcatccagtgcagccaattgctcagtaaggaaggattttctttccaaaagctgaaaaaacactttctagaaagtctgatctaagggcggaatcaaaaataacatatcttctccccattatattttgttctttatagcaaacctttctgtgtagtgcagaaatgtcttcatatatgctgcacttgcatggaacctggatatgtttgcagtagctcaagttatgtcaggtacaagaaattccatgatctgtacaagagaggtgtctaaggccatcatatgagctattaaacattcaaagcccgtgttaaggtggtaagaattcaagcaacattggtaccacagtggctgctatggtcaaacaagtagccaaggcctccaggtacagatgtggtccagtggatctaagaggtaggctacttccctttgggaagaagcagagaccttgggacttgttcattggcccttgtttttcagatcacaaattctcgtagaagggtcttacccttcagtctttaaccctattaagaatgtttagcaatcttttgtgaatggaagttctcggtgtatatagactccttttcattgagtatgccatgactatttctgactgcataagttatactatactctgtactcatcacaactcaggttttccctactcctgagacaacacatgaattccctcagcatgaaatgaaaaaacaaacaagaatgactgtacaaagggttaaatgaggaaactgggagccttcaggccctgggttagaaccaaattcccttttccatttagtaagagctgtgaagatgccagagttcaggaacctttgtttgccctgaagcagaatggtaatttgaagtggtggattgagtagaagattagacctttctcaatcatttccaaattttgatcagattgccagttttataacagattgttctcatactcaactttggaacaacaaccaaaaaaataaagtcctttctgatatgtgctggcactggctcattggtcttagatgaaagtcactcttatatcattgtgctccaagcaattgtcatattccttaaggtctaaactttctaagtggtgcctgtgataggctagaggaatccacaaacctcagctatggcacttatatcaaagggggctaaccttgatcagttttgaatataaggcttacacacacacacacacacacacacacacacacacacacacacacactcaaggtaagtggattttgtaacatgaataaagcctcctaaaaaggaaatttcttcaagggctaagaagatggttctgtgggtaaagtctaaggaacacatctttgaatcttcaaacccactgaaaagctagctgtgcatcttggtcctcctgcagtcctaccaagaaggaagcagagaccaagagagacagcctagacagactagcaacagtataataagttccagtttagctatagagagcacatgttgagaccctgcctttatctatgaggaatgtactgtggtgtatagaaagtctgtgcccatgtaactttgctgtgtagtttaacctttcaaaacaaacacaaaacccagcttttatttggggcacagtatatacgtgcatgtagcatgcatatgtatttgcatgcatgtttccatgcttgaacatggcatgtgaggttgatttctggtgtctttctccataactgtacaccttatgtatagaggcccactagacagctaagagacattactcctagaaagagctaatatcagaatggtttgagagtgctgttctaccattgaggaatcagagaaaacaaaagtgcttctacaagcaaggcatggtttgaccctggatattataaatcccagttgtgcatttgaaactgtcgatagaaaaggctgggcccttgatccactgatgttgatgtgactttacctacctacttatgccatggaaaattttattaactactcaccagaaggtgccaaacttttgtttgcttattatttgaggaagttaattactcatcacttatttaaaaactgaactatttgtttttcaacagaatcacatattttcacatcctatgcaatttgcaaattaaaaatgaaaggccagccatgtacttctcattgtgattatgaagagggtagtttgagtttggtattcagccatgtgtctgtgctgtgggaagggaaagggactgaggagcaccgtggcatcttcagtctgtgctctgggcatctgctgatggagaatgggccctagctcagagcagaatgctgctgactctaacgcacctgtggggagaggcctttgttctcaccattgtgtctgtttggctcaaggatgtgattggaaccatcagaaatgagctcccagtgcctctctgcattcttctttaatatcctttaattggtttgaagaaaaactcgacttctttgtcacactttcagctatggtaaagaagagtgtcattttctaattaattagggaatgcaaagagttggagatttccatagcctgaataattgccgagggagagctattcactatccctgttggttttggtttgttttatttatgaagacactaatggaaaagatgcttttgcatctttaagcggtgacctttctgtacattgaggatttcagaacatttgacatttaaactactcggggggttggggggtgtttgttagtttgtgtgtttctctcctgtgttttagaccaatgattttaatttacctacactgtataccatagaaaagagaaagagaatggaagaagaaatataagagaaagaagagggaagaaagagaaataaagtcataacatggaggccgacaggtcaagattggatttgtatgtcctcacaatgtgctcagcatttagtttgcgtactacagagaccacagtgtacactctgtactaactgagcctagttccttgggaaacagttataagcaagcctttgcacagaaaaaacattcccttctcatcacaagtctgcttgaagatacactaggatctttttctccgtggtaatttatacaagcaaactttaactttgtctgtgggggcggttattttacaggtgtgtttcctgcagcattccgataaggtagcaaggattaatgcatgccaaggtcttgaaaaatgaatgccagggtcttgaagacattgtgattcttaagcatattctgataaagtgactttggcacccacttcctggtcatacctcagccctcatgtagggacagatatttgccacagtgtgtgaagacacggtgtgtgtaccctagaaacgttgtgggattcattctcctagtgtaacacatatgttaaattctaaaatcagtaatctattcaagtgactttgagatgccctccaggatgatgcagccttaaagaatgtcaaaccatccctcagctcatcttacacagagggtatagctaccagagcgcaatagactattgctttttcatttagattcagggcttgtaagatactaagtagctcagaaaggaaaagaaaaagtatggaaagaattcccagacctacaatttctataaagcataaggaaatatttcaaaatggcatagtagcattccatatatcccagtggaaacaatatgtgtacatttcttcaacttcttacagtggcatgcatgaagtgtactgcaaggaattgctggtatgctaaagagaggcatccctattgaaatccttgtgttagttgcctttccttcctaagagcaggggaacagtaaggtagcattgagagcaggcaggataggctgctaccatcagatagtgcatggtggtgagaatggagacaataacttgaggccagtgagagtcacatcagtgactcatctttgggcaccggccagtttatagtacaccttgtgactcttaggaatccatgagtattagttgaacacaggcctaagcttccctttgcctcgttcataaatcacttgccttgtatcatactgtaaactcctggaaagccgtatcaaatattctgaagattctctctgttctctgggcctgaatcttggcatctttgagtgtctgcatggcatgcgctgcatatccgtgctgtttcagatggacattccatggcctaggctatgtgcagacagcagctcacacatctatgagtgaggtcagcagctggacaggaagaggggaagtaccccttaaatcccaataaccagccttcctcttctctagcatacaggaccctaaaaaatgacacaatggccatacttcaggtttgaaagatggacttaattatatgtttagcaagcaaaagttaaaaggagagaagatgggaaaccaagtgaacaaattatcaaattaggggttcaaaatatctgacaaaaattccctggggaaacccctttaagacagccagctggagttcccagtagagagcccaggacacagctgagtgtcacagcagaaaaagaacaaatgacagtagggagagaagatcatcaaacactggcttccacacacccagcaggaatatcgcaagctaaggcaggaggctggagtaccgggggagccaggtgaagagcagtgtcccctttgattgcattcccagtccctgggccccacagagactttcttttgtagatccccttatggaaatgcttttccttctaacttttctccagaacactgacatcatgagctagttctcccatctccactactgcccccctggtcacagaggaggggcctcaggccatggcacacaaggggcctgggaatacttggccacaagcatgcttaggtctgaaactgagggcaacactggttcatttgtcactgttcttttctttgtattctcagctgcacccctaaagttgtgtttgtgtgtgtgtgtgtgtgtgtgtgtgtgtctgtctgtctgtctgtgtgttctgagacctgagttcatctcagttgtagagctctttccccatgtgttttccagctctggtggggacggggggactgggggggggtgggtaagtgttaaagggtttccctaggtatattgttgccactcttaccagggatgagggagaggagcctctgacttccgctgtggtgtcttcagtcttccggttttagccattcttatgttacttagtcctgtctcattgtggtttaaatttacatttttcttttgattactcatgtgtttaacacatgtgctggcctttcatatttatttgtcttaagcatcatcaaatattttccaattttaattgtaatatcatgtgaataaaaaagaataaatattagctcttgaagaaagagtaaatctaggtgatgacataggagtcatgaagctattgtttctatcgttttaaccttgtcacttgttcttatagttttgttgttttctttgtttgcatgttcgtagtatgatttgtaatgaaagtgtaaatatgggtctcccttctcgctgggggagctggccactggcttttgaggacaaagggagcagagatggggagcagggttcagacggccgtgaataggaccgatggacttccagagccctgtgcagtaagacagttctactgtattgttctaggaataaaatagaccagggcataggggtacaatgcaagtcgggataatatagcacctaattgtcatggagacaggaagccagagtcgccctgtgtgctgaatgatgctcctcagcacaaggccattcttcagataaggccaggcagctgtgttcaggaacgccgtgtagacaaagtcgggcagagaaagggaaaccccgctgaggcagggagccctcctttctccaccaagctcagagagtcatcttgtcattaatagcagggttcttcaacctttaaactccagtgggaagctctacaactacagacatgactgttctaactgatgctcttaaaagaactataggtccttcaccattccaaggcagcccacaccgacccacaatattaagtgttactatcaaacgccctgtgctagtaccttaagaatggtttatgaacattatttttcatctaaacgttttatgtattgcaatgttttcaaaaaactaaatgacatcagattttgtgtattgacataaaaacacatttcaaattattaattttatccacttatttcgttttaattctatgtcaaaacaaagcccttccttactgacatgcatctttggaattttgtttccttcttggccaaggtgtgtcttaatactgctcagtttcagaggcgagtcgagacgctatagttttcttcttagaaaacagaaatgtgggctggcgagatggctcagtaggtaagagcacccgacggctcttccgaaggtccggagttcaaatcccagcaaccacatggtggctcacaaccatctgtaacaagatctgacgccctcttctggagtgtctgaagacagctacagtgtacttacatataataaataaataaatcttaaaaaaaaaaaaaaaaagaaaacagaaatgtgccctttattgatcagtggagaacatataaactaaataacttaagtaaaaactattaggatttttctcacagtaagagaactttttggtgagtgagacagacaaagacagtgtcaataagacaaggtctcaccaggctggccttgaacttgcagaggttcttttgcctcagggttccaaatgctaggatttatagggggacctgctgtgcccggttaagacagctggctttagctcctgtaattccaaagtgccattgttccaagaaggaagacttactggttattttggatcattgatttttctaaaagatggaaaatccaacttttataaatactcttagcaaataatatggtgtttgctctatttcctacttggaatttaaggaatgttctttagaaaatatggtactttttcttttttttgaattaattaatttttttgatggcgagtatttaaaatttaactgtataaaattacatgtaacttttaaaaagcatcctgtatagagtgtattaagcatgtttgtgtgcagtgagcatttacagcatgctcagcatgaacttttctagtgtcttgctaaccctaaacacagaagagatgctaagtcactccctgaggcctgcccaggcttctttcctcttgaagcttgcctacattcctgggtgtctttgtttatgtaattagctcattgtacagttgtccaaacataaagtattctgtagacccagtgctttagacacttatatttagagtgagatttttgggacctaacacaatattctgtcaagatgtaaggagctgaaactgtaccctatatataaaatgaagctaacaggtcctagttttattgagttttataaatgcttgactctatctcttgtcttgtgtctatgggctatggaggagtcaaagtgtaaagtgtgtgttggaatctttgtattcttcctttattactcttcatggtccatacatgtattctttaacatcagattgaatagaattacctttggtaatgtcttaatgttccatccttaaaatatcaaagatcatcagcttactgagaaaaccctgatttttgacacaggattttgaaggtttactttggcttgttaagcatcttagcagagagatgcttccaaaacaaaacttgatcacttcaggaccaggacttgaacgagaaggaaaaaaaaaaaaagacttgggtttgacaatgcccttcagagatatgtctctgaactgaaagactttccaataggccccagcctttaaaagttccctcacccctgaatagcatcaaactaagttccaaacctataataagcagcctttaaagagcttacgtttagtaaatgtagttagtaactaatctgtcacctttagtgcttataccgattattgacactgaaccatagattgtcttatataactgtatcattagcctgttatattcaaataccaaccagttattttgtatataaatagttctttactttctaattactgaataatatctcacaggtttgctaaatcatatttaccctttaacgagttgatagcattggaagtttgcaactttctgtgtgtatttctggggcaggtctttccagctgtctggtactcatacccagcagtagaattaccttacggcctcctggagtggtttccagtggcccaacgtgtccacacaagaagtatacagagctggagagaacactcagccattaaaggctaggctcacaaccaaaaatataagaaatatacaagggccatgcttctctacactggtcaaactccatttgattttgaaaattctttactgttttagttaattcactgctttttggtgaggtcttgctatgcaactcaggtagacctcaaacttgtggtcctcctgcctctgcctcccaagcactgggcttatcgctttgatctaaatcctgttgtggggttttgtgttcaggtaaaaatgcctgttcttccagagcagggagggtatgcatgccctcttaactctgctacaatcagagcctagcatgagtcaggcactcctgaccaatcaataaggcaatcataaatgaaatggtatctattgattgtcatggattcgcgagttgctcacatggctttgtaatatacatttttaatgaatgtcctgtgttttaattgtagttctattctaggtctggttttctcctcagatcctacattgtatcctaacagattaatcttgagctggacagtctgctttagtcactgaagtgaattgcccagctctgaattattgcagtttttctgcctttagccctggttcacttgagatgttttcctcctgggctgacatgatgaaacttaattcatacttaagggtcagtatggaaatattacttcccatacttcccccagtcaagcctgcccctcctacacacagttctcaagtcttcaacacggttggcttttctcttctaaaagctcagatctgaaacctgaagccagttttcactattctttttctcattgtgtgtatatatttattccttaaaacaatagatgaaatgggcaactgctatgtactctaatgcctgtaggctgccatgccctatcacttcacctgaatcataattgattcttactccttttttacttctgtacttgtctgtttttatcccatctttccacagagtgatgttattggagccctgctagcttattgctatcttagcttcctagtgacagttagcttccctctaacagtatcccaggagtaaatataaataagcagaactgtgcttgtaagtctctgtccacttacaactctcaagatggcactctagtctgcagcagtcactttatgttcagccatgcactgaaatccaggccgtggctttgcctccgtcttcttagaaccgcatccccatttatccacatggctccttgttctgcttcatgtaggacatcactcatatggtacttagtatcatcaccccatcaataatatcccccaaagactctatccacttttactttttccttttcccctataatatttatcactgctgaatactgtttattcatgtatatatgtatgtgtatatgtgcatttgtgatgtttatatataatttatgcatatatacagtgtcatgtatatataatttctgtgtatatatacaaatgtgtgtacatgtttgtatatgtgcttgtgtatatgctggccagaggtcaaccttgggtagtggtcttcaggagatatcatattgcttttgtgtgacagtctttcgatgggtcctacggcttgcatattttgctagaatggacagctagcaagcccgcagggattctcctttcctgtcctaggcttcaccagctctcacatgccatgcttgtccaagtgtgctgagtatctaactactgtgcccaggtatgtgcagcaacgcttcactgaccgaaccatctccctggtccctgttcagtatttcaatcatttattctttgttcttttcctcagaaatgtgtcatgagagcatgatttttttggtgtttaactgctacctaggaaattgtgacttaaatatagcaagttctcaataaaaaatgtgtttctaacaaaaggataagcaagtcttgatttcaaaatcactattcctgaaagtgatttatacagacatctggcacatgtcctaacagtgtcttctgataagtgggaaaggcccgaagccctgatgtcaccttacctgatgcccacttcctagaggcgttgcctgcgttttcatgccttgtccttcactgcgagttcttgccgtaactccatgtgctgtctgcttggccttgaatttccaagacagaaacaagttgtgccctccagtttggtgacaaaatgtagaggtgctgtttattataaaatgttcttcaacgtgacaaattgttctcagactttgctgggcttaggctaaaaatagggcctgggatttttaaatgatagacaatcttgttgactgtctcgaagctctgtggattaatagctgccaatattgattgtttttgtcagacccattgctaagagcttatatggattgactcttgctatctcattaacatgctcactagatatgattttccttctcctgaatacaagactgacagagatcaagtactttacccgattgtgttttatgagctctcataaatataaacagagatgagcattaaaacaaaggtgccgatttgatcatgtgtcaagaggcacattgcaagatcgtgcctggaaaaaaatgaacatctaactgtgggttttttttttgtgtgtgtgtgtgtgtgccaggattacacaggaaatgatgaaatttctctttcagctcatattctagtcttaatattaattttattatagagagacagtaagacaatgataagcagttatccctgctctgattcatgataaactgtctagttatcctgactctcctttgcccttgaccctttgccttcttcaagtcagacagactcctggactgaatttgccttggtgatacttttcatggctgtggtgtcaggagttaaggattaaagtgacccactgagggagagtctttgaagaaatgacatttggaccaatgctgaaaggatagggtgtattagttctatgttgggaatgaaaactgtcacaggcaaaagaaacaagggtgacttcaggtcccctgggcttggcgtttacagggacagaaggagggaggtgaagctttgccattagaggagaatagagtaaaatggcggggccatgccccacccccaaccccagcactctgcacagttttcttgaggggacagtttaactgggaagggcccttagcatgcacgcagcagtgtgctcagtgagctcagactggaggttaggtggggtgaaaggaagaaaaagaaccaagttagcacaggcattttctctgcctaacttctcctcagcatggtggactgaagctatgaaactatgagctgaggaagtccttcccactcaggttgcgtttgccagatattttttgatgcatttatttaaaaaaaaaaaaagaatcccctttgtatggatttggcaagctctcaggattcgagcatctgctcacttgttccccttcctgattcatgaatggctcctcaccctagaatccccacttttgaaggaactaggtcttttctaccagagtcagatatgattgagtgtagatcatgctaagcaagaaacctgagtaccgaggggagtacctctcagggacagtgctgaagagcccccggatgtgctagggcgtttccatgggatgctctcttctactgtgggcctttggtcgctctgcaagtgtgtgtggattctacttagaccttgaatttttactttgtagcatattgagactcagggaaattagaccaaagactttacccttccttacctattacatttttactgaaaaaaaaaaagaatgaaagaaagaaaagaagaagaagaagaagcggaaactgctcactaatgtgcagtgattctgaaatcagtccacttttgacttcaggaaaccctcgtgcattaagctactgagggtccaacttaatatgacgatgatgaatgatggccaggcaggcttattagttctttgtctaacagaggacatcaggaaatccatttttcttgctcagtggttttcagccttcctaatgctgtgatccttcaatacagctccccatgttgtggtggccccaaccataaaattatttctgttgctgctttgtaactgtaatttgtctactgttatgaattgtaatgtagatatctgatatgtgattcccctccctatgaaaagggtcaccacccaaagtttgagaaccactggtctagtctgcctttaccaggcagttaagatttgtgtgttgcgtaagattggtgggttgtgggacagaggaaacagaatggcagagagaagaaagttggtggtcacctggaagcccagggcggagtactgctgagctgcagcctgtgtcctgaatcacagcatcgccaagtgagcagcaacaacttgtgacaaagccccaaatgaccacaaacacttatttttttccaaaagtataaccctgctttgtgcctttacattaatctttttgtatatttaaagaataaattataaacagatgagaaaaatgaaatgttaaaatgtggtgtgatagccagcccatttatatttgaaatttagagtcagttgagcaaaatgaatgttgcatttactaatcacatttcctattgatacaaaacaaatctgccttgaaagagaattaaataaatgattaactacccaaagccaccatttctggaacctttgaatggaacatggagttactttcctataggagaagcacgagtgagggagccttggctagggatggtggaaagtgttgggtgggaaagcgtgtatgtgcgaagctgatcacatgacaaggccgggctgcttacccttctgtggcatctctgagttctctgaaagactgctctctgagtcagacaccagcattctttccctcctcccctcgctctattatcctccctccttctctcatatttccacaaatacttattttcaaaaaaaaatagccaggtatggtattgtataagtgtaatcccattactcaggaggcagaagcagacaaatctctgaattctaggccagcttggtctccatcaagagttccaggtcagccagaactacacagtgagaccctatcccagaaagaaaaacagaggtggggggagaggcgccatctttagcaagcggagggagtcgttggtgtctgattctaatcttagcagtaagatttctgactcaagcacagacagaatcagggttgaggttttcctattcaaagatagaaccagggtggaagggataatttaattggtccagtagttgttgaaagtataaggaccaaagttcaattcccagcaccaacataaaagacaggcatggcagtgtaagcctctattcccattgctgtgcaggcagagacaggagtgggcaagccaatgtgtaactgaggcctagctgctgactctgagaggtcaagtctcagaaagtagtgtgatcagtagaggatgacacctgacattgtcctctagtttaaacacacaaatgcatgcacacaagcacattcaagcatgtttagacacatgcacacacatattaagcattcacatatacacacatatgcacacacagcagaattctatatttctcttttgattattaacaaattacatggtcctaaagaattcctggaaattgaaacatagttttctcagggaaattctagaacacaacaattatctcaaatgttatttcagtgataaactcatgacactttagattctcagacaacatgtaagtgttgaccctgtttttctaagaagccatcttgtccattcacaagcaacttgagaccctggagaatgactctccaaggcctcgcagcataggagacattgcagaataactctgaaacctcccaggttgagagagcagctaaatgttcagattggttcatcattttcattgatgaaatagctgcagattttgtgtgatatgagcttgtaccctttatgtctcttcctcttcagtgaagcttgaattgaggtgtcgtatggccaggctactataagaaataccacagcctgctggaccgttacacagcagacattcactttctcacacacctagaggttgacaagcctgagatcaaggtttttcgaatcataacttagtgcctctcaacattttcatacatattgtgactacacctttcctgaccaccttcccacacatcttagcattgcaaatgctttctgtagaaaaaaatcaaagtgacttagtgtttcttctagtaatgttgatttttaaaatgggttagtattgtcattattaaaattttgtaaaatttccttgcagaatatccaagatttattaatgccatataaaatttaagattatccttaaatgggaggaaatttctatcaagtttcttcgacttgtgaggttagaaatttataccattagcagaggtgcagaaacttgtgcattgcactctgtgtggctcacattgaatgaattatgtggtgctgtacttataactactgagcactttctaggttagaaacctgaactctttacatgtcacagacacggtcctccatgtacactctgtgaatatgcatgtaaatttgaccacagttctaatcttattctctccatcttcactctgcctgctgtctccttctgcagcatactccctctgttgggtgttacaaaacacattcttatcacatgacttttgactctatgggtcaatgaacccaatgacagcagaaccaggaatagtcaaaacagtctaggaactcatccctgtgacataagtggcagacacgaactgacatttgcattgtcagcaaaccatattaaagtagcttgttatattcagctaaatatgcctgagccagcaaaatagctcagtgaataaaagtgacttgccaccaagactggcaacctgagttcaattcctgcgacaagatggtggaaggaaaagactgattgccacaaattgttctctgatctccatgtgtgcaatttggcacatttgagtgtgttagccctctctgtgtctatctctctgtctctgtctctctgtctgcctctctctttctctcttacacacatacatatacacataaatgcacatacttagacatatgcaccaaataaaaaatacattgaaagaagaaaacacatctccgtcatgttccctattaaactcacacattcacatgaacatgtgaccaaatgcaatggaaaggccctcatggctatacttctcagcccacactcggtactttataagcaaccatagtgcccccttccccatgtttccattcctttcttgtccatccatgtctgcttaaggggtttgtgcttctctgggaacgcacttcgaagccattccttctctgactactcctccctgctcgctcttattgcttcattacacttcggaggtattttgatttttagtgcacacaatattgcataccccatttgagggctgaggcacatattctggtgttggctacagaggggagggcgtgaataatgacagtctgtgagagaggctgcagatgtcatgctcactcagctgagtggtcagagaagacttctctaggcagttccctttattctgatctaaagggagtctggatgatatcttggagacttggaagaggtgaatgctgccccacactgttgtgccagatgtcacagtacttcttgaggacttactctgcagttgtaccagtttcattctcttgtctaagacaattgcaggacaaatgagaggggacacccgtcacttgtgacacctcattgcctcgattgctatgcccctgctttcaatgcttgagaatatccagtctgatacctgttctgagggctctcttttagttctttaacaacctgaagaaacttctcccaagacttcgtgcctaagcactgagaccatagaaaagaatacttatcagccccctagtaatctcttcccattttctccctccagtgctgaccgtgcctcagaatctgtgctttttcctattccccatttgcctgatctattgactcatccaccccctcagtcagcctgtagcagagctttccctggcacggagggagggcagtctagcagtgtatctcatttgcatgcatcccaggcaagccattggctcagcattacccagtgtgaccggaaccaatagagacatttgaatatttatactttgcataattattcctgctcagaccagtctgtttgtattttaatttttatgaatgagatatatgcaactgccagcttattgaattttgagccagttagggcaggggaggacaggaatgtatagaggctccggtgtctgataatacaaggaccacccaccaatttaaacagaagccattgaggtcaaggcccactctactgttaagtacaatccattgcagtggctctgcaagtgttcccgagttgataatgtcatggtttctacagctgttctcactctagtttgatgagaaaagataagcataggcagtcttatgggtgactgtctcatcaaagtgtagtggtagagaagcaagcctgtaaccctattagcatacccctcctgtgggaatggctatctctacactgagtcattcaaaggagttatgggcaagaccatcccaatccaggtcatctacttaaatggaaaggatgctctccgtttaaacatgagatttcgtatgattttgcttcccacggtaaccttttttctgaacagcttaccccagtgatgtagatgtattaaaaccaaattagattgggtgaggaccagtacgccagcacaaagaatctgccaaccctttgacaggggcaggtatgtagagtgataaaatgtacaagtaaaaggacagaaatgtaagtgaaaaatgtaatgtgcatatcattgctgtatgtttgccgctctgtcttgcagatctatctttggtgggtgcatccttgaagatggtagactgtaacactttttctggttgctttttttattttggtcttgagcattaatttgaaggtttttgactttttttttttttttttttgacactgtttctctgtgtaacagtcctagctgtcctggcatcctggaacccactctgtagatcaggctggcctccaactcaccgaaatctgactgtctctgcctctcaaatatcttgattaaaggtgtacaccaccatgcctggccagcgtttagcctttggatcccatattttgcatggttcctcacacagcttactgactctgtggtggaaatgtcaaataagcttcctagtttgattagtctagaagagaacactacccacttcaaccacgatatagcttcagaggacctacgcaaaggctggatagaagtgctccatataaaatacatggtcatatagtccataataaaaagccagtaccaggaaacacttaatgcttcagattcagctccattttagatttgaatccattttctcaggaattcaagaggccatcctgaaatttttttagtcattcttaacattatcactgaagagataacgcttatgtacagtatgctttttatcccttactttcctgatttcgtccatggacactcatagccacttatatgctggtcgttttccttatgtggtagataaaaagcagaagatgtggagccagccatcaaagatggtgggaaaagaaatatgtggagaaattaacttttggatcatttacataagaactcctaggtgtgggagataggatagactagagcagaggcagtaatattcccttagattctgccacctcgagcagtgcttggtgctccttccacccaacctatgacatacagagcactgagtcagaaatcatctgtgtctgttgttgaaggcatcctagatccaagtgttctctctgcttaggttagagattctgagtgagttgagtccactgacaactggatggagaaagagcaagcatgtgccatctctaagcttgcaggaacagcctcatccctacactctgagctattagggaggcttggtttttcgtgctgtttctagtccattgtacgggcactataggggagtgtggttacagcggtgtcagcactgagctttgcgtttgtctctaatcccctttcattggaattgtagactataactctcataagacagcttgttctcgagagctcaccaggacgtttggttctactcttcccacaaataatgtgagaacaggctttgccagattattttgacgtgcccagacagggtgttctgaaccatgtagagttatgtgtacaagcacaagggaaatacagataattttgtatgagtatcaaagaggctctgtctctttgcagggtggggtgaggttggaaattgccccagcaaatcagcattctatttaccagatccagaagttctgtgttttgtaacttgttacagtgagaaatgagacgatatcctggggtgtggagaaatgatgtagtcttcacttgaaatgatgaacattcatttcctcatgtctctcaaaagacacaataggttcttagtaagtgttgaagtgaatgctaattcctgacttgagttcagaactaaagagatttcagtggccaggctggtgctggtggggcagagagagaaggcaggtgggggttggtgggaagagaggggacacttgtctaggatacaggaaagctacttcaagtgtggaatggggattgcataggaagttgcctttaagtgaagatcctgtttttgtttaagtggttgtttggatggctggttggttgtttgcttggtttgtttgttgggtggttgggatggtagatttgttgtgttttttaggctcagtatatcttcagagccacttgttataccgaggatctggaagagactcagaaatgaaagctgaatattttatagtgttaggaatagactgttatgctgaaaatcacagacacgcaaagaatttaagtcagacctacctctgggatacaggtatgccccttctaacttaagtcgttggcataggatgaccagccaatgcatgttgccattggctttccatgtatttcttatatgctattctattttcttctgacatgtattagtcaaaataacagaaccctgccaaggcaggagaagaaactctgacctcaaggaaagaacagaattgttttctataccataataaagactaataacagatttttagaatcacacttcccacacataaatttctgggatttgtgttattcctgagcaagtaagctatattgtggtgttcttgaagtatttgcccatactgttaacattatatatacataggcttctgctcattacagtttattctaaatgagtaatctggtgtgagttttccacaactcaaggatctccagagatgagggcatgtttgtggtgggtttgtcccagcaggtgacatctaaggaagtaattaagggccacattgctgatttgcagcacacagagctatgcctttcccttagatgagaatcagtgtggggataaaggaagactctcacagtgcagtcggtgtgacctgtttttaaataaacatcgtcatattccacagtcaattatctccaaagtacattgtgttctctagccagataagagagggggaggagagagagaggagacactgtctgttggaagtggttaaagaaaagggcacatgatttgaagtgtacattattcttttgtcctctgaataattttatataattttgaggaatggaagattatacagcattcctgtctaatttcgtaaatatcaaattgtagtctttggggagagagacgagcacaggtgggaaaacaaactgaggcatgttgtgttcaacacagagttaatagaccttgaaacaccaaaggacaaacaagtccttagttagccctactgaatggaagtggcctaatagtagcagcagtgtaagcatcccattgtattgtggcttcattatatgttctgtgagactctgctgtgccagtagcaacatcctttcttgtacgaacccagcaagggttccaattctaggaaccataaccattatttttgtttataccatacagctctcccaggagagtaaatagtgttttggcttgtatttcttttatccattctgttcttttcacttatgaaaagatcagaattgtagaaaactatgtgttggaggtataatcattaaaaagcttgggttcgatcaagctggtgttggccacaatgaggacaagtatttacatggaatcggtaatcagtgggggaatgttttgtttttatttgtctttgtgttttaccccactttgaggtaaaattggaagcaaaggaactttcagatgcccaaagtacacacagactctgttaattcacatggggaccacacagtctttcacaagagctgtgacacttggctgttctgatagaaaccttttttgtgtggcttgaggtttgaatccagagctcttccatcctcaccctctctcctaattggataccagttggggtggccttgattgttctttctccagaggcctcgtcccgtcagaagtaaaccacgcccttgctttacagcagttaaccctgatcattattgctaacactagcccatgcttccttccctattcattagccggagaagtgcttaaactaaatctgacatcactgctatcctcttagagtgttacccctgtgttataccagaaggttggctgtggaataccaatggtaaggaaccatccttctcatcataccaacccgtccgcagaaattatttatttcccattttagatactggaaagtgactcattgtgccctggaaatattatcactgtagtaattttcttatgtggctcagtttaatgttagagaaatggctagttacaaatccagacactataaagattgagctaaatattctaaaaataggatgtttggttaacgttcggtagtcaacaactttcctccagccacacacagtgcagggtgaagaaatgggatcaatgtcctcctgcagtcttcggtaaagtaactcagtaggagagtgatatgtttgaagtatgttggacccatctttgagggctgttgtgtggcatgaatcaatttttaactgaaaagattagtatctggaaggatatttcatgcttgtagttaatagatggcataaaaacctgcacctggaatttagcttgttgtaataaaattaaaatatcagaaaaaactgatgggtttttgaccactgaagatattctctagtttaggtatgaaaattagttatgaatggggaagaggaaaattgttatctcaactgcacttatttcttctaattttttttgatagagatagatgttgattgccatttaggttaagattttgtagaagaagaaatcaaaagatcagaaaattaaggtatatccagggttaatatggccgcattgtggcaaactctcctgagtttatttgctagactcttcatttttattctatttatccagagaccagaccattttagtatcttagaccgacatctcatctcttcatcctcatgatgctgtcagattccattaaataaacattacagtattaacaacaggatccagaataacctgagactagcatctttgggaatgctgggaaatatcaccttgattaggttaattgaggtgggagaaccaggaccagccctgaaagtaagaggcaccatccactgggcttggttcttgaactgcatgagagagagagagagagagagagagagagagagagagagagagagagagagagagagagggagggagggggagggggggggaggagagagatatgagtgcttgagctcagcaattctctgctccccagttgatgcagtgtgaccagctgcctcatgctcctctggctggaacttcccttctgtgatgcactgtaatctcagactgtgaactacaaaccctttctcctcttagttgttttcgtcacagtatttatcacagccatggaaaagataactaacacaggtgtccgaccttggagtcttgtcccactagcggatcatctaggaaagctgtgctatgtggcatgcgtatgttgtaaaagcctgaaaaggaattccccagatactttcattagaaaagtagtcagttgtgaattcctccaaaagaaaccagattccttaaatacattttttggtacagtattaaaagcctaggagtttataattaaagcttcaactctttatttatttccatagcttgggattctaagcatattgcagaacatatctgaactattgctccaaaccactcaaaatttgtaccaaattaagtgcttattcatgcactgggctctgtgtttacacacacacacacacacacacacacacacacacacacacacacagagagagagagagagagagagagagagagaagagaagagaagagaagagaagagaagagaagagaagaagagaagagaagaggagagagagaaaaacgcaaacagaaaatagtgccaaggcagagagagtgtttaatatttatagtaagataggatactcttactaggtatatatagaggaaaagttccaatttgatttttgagcaaatggaagccaggagaggagaataaaaattcaccttcatggttggcaagaatgaaaggtgtaggtaccagaaaaggctctggtcaaagaggactatggaaaattgattaacaaatcccaccttgcagaagacaatgtgttacaagactcacatgttctatagagatttggagagggtgggcctctgaacacagaaatgacttacgctgggaattaacattcttctaggtttggtggaaccactgaacttagtggcttctcggtgtaacaaagcattctcaactctgctagcatataccttaacaaaagttcagtcatctccccgggagtattttatattttattccaagttgatacttcttaaatgtttctaaaatagaatttgtggttgagcattgcaaaatgctatatatgtataatgtggaataaaaaattttcagagttttgttatgagaaaggaatcataaaggaaactttctatgctcagtgaaaatagtaagctattgagcacatttataactcagtaagtgatagttctcttgaaccttatgctcagtggaagtagccattactaggtaactattagtttatgggatttaaaattaccatggaaacaaggcctgtgggcttctctgtgaggaactttctagataaggtaaatggaggctgaaagacccatcctaattgtgggcagcagtattgcaataggctggtcctggattgagcaagaaggagcaggcagcacaaacatgctcagttcctgatttagaataaaatgtgaccaactgtctgtagctctagctgtcaggactgcccaccaagatggactgtaccctcaaactgtaccaaaagaagcccttctcccttgagtagcttttgtcaggataccttactacagcgttaggaagtggtaaatacagaacaggaacagagaaaggtcaaaaacatttcagttagacagtactgggttcaaaatatgactgtgctttctattaactatgtacctctgagttgaccaactctcttaatttcagctttcatatttgcaaaaggatagagtggcaccttcagaatggaatatagtaaagaataaacaataaatatatttacacacaaaatccactactggcaagtagtgtagcatgtgcagtggttcctttaatgctccgaacatcatcctaaaactcgtggtgtgatacccagtgtcttccaaagcaaaccactccagccttagacgtttaggtttagaacttccccctaaagcacagtggaatagtaaagaaaaaaaaaaaaaagaaagaaagaaagaaaggaaaagaaaagaaaagaagataccattttctgtatgactttctttagaaatatttcagaagaaattttcaaatccttgcagtctttgcctcacttacatggccattccacagcatcatctattttccattgacagttctgagagccatatgtactcaatggctctccccttgacttgtggctttaccagttcagcaagttgaagtttactaggagccaagtcccaataggatctgagccttagaagcacagtgacatctttgctaacttgcactgtgcgtgctgtgctttgaaatggaaagcttattgcccttccttgcttgtccatgagaaaatatttgtagaacaccccatttagaagaaaaatggtttatacattctcttcctgataggattaggagtctgatcttgccctgtcagttcttggccccacctgccaaggagaagaaggagaaggggaggggccttggaggaagaattgtgggagggggtgacaggaggggtagctgagcaagatgtaaagtaaataagtaaaaatactaaattaaaagtaaataaaagaaagaagagattaaaaatgacttgcaaagaatacttaaaataatttatattggattaatgaatgtaaactcaagtaaatttgtaggaaaatgttttatgacattttggctgtgatgaaattaaagttaaggtagcctacgataccttctgagttttacattatatgcagggcccactttaatccagaacaatttctttcttgatatcaggtttgttgcccaaagtaagtagtatgggtaggatatggtactgcgcttggtcagtgatccaagcatcaagtctttcctcagtttccctcaaggtttcacctaagatgtgtcagttgcttgcctgcagtagtgatatcatacaaaaccaatcctagagttatatatactgaaagaatcctggggactacaaatacagtcctacaggctagcccttcaaaaatcaaaaatactaataatattttttaattgattatatggggtcatataaatttacttgatctaatctataactttgtgaatggcttaaggcagagttgctatagtctcagtttcactagtgagcctactgacctggggaattaaaactgtgcatgaaagtaaagatgtccaagtagccttatctctggtaacctggcttgtttcgagcaatcacaaaatcgttatcttacacatttagcgagcagaagcaccgggctgcctagaaacagaagccttactacatctgaaatctcccttagccagctccttctctaatgccccatttgataaagccccaaaatgaacaaaatgttgtctcccacaaacccagaaaatcattacaaagctgtgatggtttgaataccatattctctgccatttgaatccttggtccaccattgggggtgacatttggggtgtataggagatatggtcttgttggaggaagtattcacaggaggtggagcttaaagtctggtaccctttcttaagtattctctctgcctcctactttcttttggagatgaagctctcagatgcttcagccattatgctagctgttagctgccatgctgccccgcatgatttggttgactctaatcccgctggaagcctgaataaaccattccttctacaaggtgcttcagtcatggtattttatcactgcaatagcatagtacctaatacagaaactatagaataatccaccagacccattattgtttttaaattacttcagtctcagttcagatctcctctctgcatcctgtgctattgtgtgtgactcagtccttcccctccctggatctcacagtgagtatcatgtgcctatctgggtattgacatctattaaaccaagacatcatgttagtgtctctcttaatgcttgtcctttagtggatcttcaacaaatattgatgtttttcatgcatttgccttccctgtcatacaaccagaactctagtttcatactgtttacttctgggctccctaatgctgatccactctttagcagagggcagtagagttgaaaacaggcctttgccatccatctgtctccatgttgatatctccagtcctgtcctatgaatgataaagcttaccttgggatggcactagtagtccccatacagtgcttactatacatacatggtccctggcacaattatctaaggggcttgacattgtgtctatcagtccaattgcaaaataggacttattaatgaatcttttattaacaatagattatttcccacaacgaactattcatcagaaacgaagattaattctctcactctcttcctcctgccctttgttgggtttggtttgatttactgtgtttctatctcaggacatggtcagtactgatgccattccaagcttatgagacactttccctgcctccttagactctttggacacctttaggtgtcaacaaaaggggtgtagatgtgagacagggaggcattcacattagtcctggttactatggggaccacagagcaggcatcacatccatcctgtccacacaggattaactcagaccatctgagccctgagtttacctcaaacacattccttcaagaaaagggtcactgccggtcatttccctaaaatatcactgctgtcctgacctgatccttctcagcttcgctttggatacacaagcatactttccacttgtcataaagtgtcactgttttataattaagcatgaggtggcaccaggtgaagggactgtgtaatgtggtcagcacacagagcctgtggtcaaagataggagtgcagttgtcatttggtattttggagtctcaatgttttgatttgtacgtctgttataaatatatcacatctttttccttctgctgtggtgaggttcaaaagctagactcatgaggaaattctctgtggaccataacttataagataaatagggaaacatttattgaaccttccttgtggttctgtgcattatagtagcttttggtctagatacatggtatataggtgatgttaaaataaaattgacttaaaaatctccggaataatccagagctactagtgtgatcttgggttttataggctgtgcaaaagatgacttttttagatccctacctatatgtataaaggattctgcctaattcacataagtgactccagaattcccagagaacccaggtgaaccctgcttctgatatctttctttcgaatgatactcactcaccaagggaactcaatggggacctttgagattttcacttatggcgagaaatcagctttctcctttggccatggcagctagagccctttccactgcgctcttgtttttcttatctcccacttagcatacccctgtgtcttgagttcatgatcctgtaatgagttctcatttggtattggggaatatctctattctgtatggacactggtgttcaagcccagagaggtttccacttggaaaggatctgatataggaagtgtatttttcttctactttcttggtggccagcttggaccagtgagttgctaggctgtcctggtttcttggcttttggagccaaactaagttgtacatgtcaagacaattttcttcttcttgataaaggtctttccttttttttctctagtgcctcaaaagaaggaagggtaacttgatcaattctaatggctggcaagtgaagtatgccataaaatgttttctatcacttgtgttatcttgtttaagtcttattgtcattgtcactttgaactgaatggaagaatgttctgtttataccaaggatatttcatattcagtgtcagttcaacaacgggcatctcacttgcaagaaaagccagacctgaggaactaattttatgtttctcaaaaccttcaaattgaaatcgcttcaagttcccaaagtataatgctctgatggtggcattcatgggatggtgcttgccactgctatactgtaactacttaaatacggcatgtgagtgtgtgtgtgtgtgtgtgtgtgtgtgtgtgtgtgtgtgtatgtgtgtccttatagcatagggctaggactgtttgttagaggggcttccaggtttagcatgataattttacatctgtggttcagtgtttctttagttttagcacttaaaatcaggccggtcttcatttcagcttccaaaaagacagggctctaccctgttggtacccagagtccctgaagtaaaactcatgctgctgtggaaagtaatagccatagataaagttgtggtctggatacaaaccatctcttcagcgctgagctgaaagcaaagcacttaataaccccttgtctggcatccccagtgttgcagtcttcaagacaatatgaagtttccactctatcaaggcttctagttagccactcacgaaatttaaacagaacagcagggaatggagaggagtagaggagatgagatgagacagacaggaaagagaagagaaacagagaaatcaaccataatttctgactggaatatgattcctgtcttctaatgttcacaaggagtaaatggagagagagagagagatgtaaaatcgacttccaatgccttgtaccaactttttttttacagcatttttttaatttgttaattttttttaaagatttatttatttattatatgtaagtacactgtagctgtcttcagacactccagaagagggagtcaaatctcattgtgggtggttgtgagccaccatgtggttgctgggatttgaactccggaccttcggaagagcagttgggtgctcttacccgctgagccatctcaccagcccttgtaccaacttttataaaaactcagtgctaaagaaacctgtagacggcctgcatgagatgtttctcaaggacctgacctcatgcatacatcacgctgtttcacggcaggtcaccttccatactactttgcttaagtgccttatacttaagttgtagattgcttccctaccatcttatgtataaaaaacaaaaaacaaaaacaaaattagaaaaacagcaaataatctaaacctgtcaaatgagattagaagacagcatcctgtatgccaaattgagcttacgatagtgactatagacacagctgtactggagtgcagccacaatcctttgtttatgggttgtttagagttgatctttctacattcagagctgagtagttgtaaaaggttagatggcccagaactcctatagtattaactgttttttatctctcatttaaaagagtttactagtctttgagtactactaatcagtgaataccaagggaaaattttgttgtcaatcatatttccaatctatatgatgtgtagttcttaatctttcaataaaatttagggggaaaaaaaaggtaaccacccagaagacattcatacagtaccttagctaaaggatgataaagagcgtgtaccatcccctcctctccagttagcttttcctacagacatcccgtgccttagcgtaagatgctaggatgttgagacaaggccacacaatgtacatctagaaggttccttgcctctcgtaaaggtggactgcacgttagtaatgctccttcatcccgtgccaggacctaaagtaaagaggcagaatagaggcaggctccagtgtgcactgtgagctctaggaaacatttcacaggaaacagaataaacctctgtcgatgggcagtattagaaacaaatgtttgatgtcaaggcacttcatatgtctatattaaaataatttggcatggaatattgggttcacagtaaatgaagtactgttgagacatttctttttgtcttttcagtagagttctcttgtaagtaatcattatgcccattttattaagagaatgttttgttcttggcagttgtttgatttgctcaaagttttggtgcatataaagagagaaactagccctccaaaggtatagaactgtctctggtcaaaatctcctggcctcaatctacagatatccctttgacattgaaatgagtcttcagtatgataaaggcctttgactttgactgtctagttttaaatggtcccttgatttcttaattttttcacctgatgccacagcgctttctcctggctgagttaacattagtcttgatgtcaacagttttactgcttactctccgcccttgttactatcataagactttggctgtaactgtcagctgatttctgtacttttccttttcttattgctgttatactaacccattggaccctcggctactggttacatctcctcattgcagtttttctcccatagtagaacttacataagagggggagaaggtttcagtgctaacatttcctaatgtgtaaaaaaggacaagaaacagagcccaagccacaccattgactgagactgagagccatagtgttgagtgtttaggcctccaccttgcaggcttgctagccacttgcatactgccgggtgtattttccacctagatgagctgtcttctttattgcagatccccaaatcaggctttttacccatcccgaagcctctgttttgccttagttctctgacatgggtcctacaaacttccagctgtggtttggaagtgtgccacctttcctagtacccttaaggcagctaggggaaggactgattgggctgcctataattaattccacagccctgagtgtggtctagagaaagtaaggtggggatttcagctgtttgttagtaagacaggagagttcagaggctgtgagattctgattcctcggagattctgcaataacgattctgttcatctggctttattctttttttttttaattaggtattttcctcatttacatttccaatgctatccttaaaagtcccctatgccctctccccccccccccactcccctacccacttcttggccctggcgttcccctgtactgaggcatatacagtttgcccaaccaatgggcctctctttccactgatggccgactaggccatcttctgatacatatgcagctagagacacgagctgcgcggggtactggttagttcataatgttgttccacctataggattgcagatccctttagttcctagggtactttctctagctcctccattggggccctgcgatccatccaatagctgactgtgagcatccacttctgtgtttgcttcattcttttctgaacctagagcacctctcttaacctcggtgggtctcaaatatgacaggattatacatggcttttcttcactcggctgttgtgaggatcaaataggcacatgttcaagcatttagaaccatttctaactgtaaactttagttattatcattattatcgctttcctcttgtgattgaacttgtcataccatgtctctattttgggttctaaaaacatggttaacataattatgggtttaatagaattttggattaacttgtgaacccaacatccaattatagtgctgtttttatgagaggatgaattcccaagttcattccaagcagatgagttttaaggaatgtcttagagctggcctgagtcgatgagatggataaagaaaggaaattgaacatctgatgatgtgtattgtttaattgattattttatagtttcatacaacatgataaaatatattgatcacgtttaccctaactcttccaagatctatctttacctccctatctgttgtcaacttcatgttttttgtatttaatactcccatttcactctaatctgtgctgcccgtttaatgggaccttccatggggcatgctcagccttccagaaccacacccttaaggaaaactgactcttcctctccacatgcccgccctcctcattagggttggggcttgtgaacccttcagcatctcatgctacgttggctaggtcttgtgtacattttatacaggcaaatatagcacccatgagcaatgagtgcagtggtgtgttgtatccagaagacactttattactctgatattttatacttactgtggtgccagtgattggacctggggcctcatgcatgctaggcaagtttgggacagttcagctctaccgccagccccattcaaagagaattcattttactctgcagtcacgtcacgttcatgggcatctccttgtatttgggtaatgtttagtctcttttactctgtagtccagggtgacctggaattactaggtagcacaggctgtcttaaaccttacagtactgtgttagagcaaacagagcctcatcttatgaatcctgaacatgtaagctattgaggttatgtatataagctttactcacttaatatgtgttgtcaatttatcttgttattgctttctttcatttggcactgtctgtgtgttcatgagtaaagctggccatatttaattgcctgggttgcatcagtagttgtccaccttcatcattgcttggttctgtaataccacgaaggattactatgccagctcccagtcatatcagtaagcttgatctgcatacagtaatttcactgtttgtgaaatgtctgacctcagttttctacttctaagtaaaagtcatggaagttttttctgatgacttaatcatacctggaacacgaagagcaccatagttaatgtaaaaaataaatccaaaatgtatgggcactgatttgcaaatctgtttacaaatgtgtggagaaaggagagagtatgaagggctgtgagaaagaacagtgccctctaggacccgagaggggattctgaaaggctgtgctgctgactcggccttcaggtctcctaacaggattcaaaggggacattcatggcagaggagataatgagaagacagggagtgtgggagttatagagatttattctgtttgtttgttagaatgccttaaaatggtatatgttactgatttagccatattttacttcaagattcccacatactttctggtgaaaaatcaacaaaatccttaaaattcagatgattaaactctttctggctgagttgtgtgtctgtgtgtgtacacatataccccacatgtcttcacaaatcaataacaatgccaaatggagcaattttccacaattttcctcaaacgactgggtacttaaacactgcgttcaaccaaatgatgaagtccatcagtgtctcccgtcctgctgagctgctgcatcgtggcctggagaagagactgactcttctgggctgcgctgttgaagactgtagactgtacttcacctgtgtagacagatacccgcacaaataacttttctgtcaccacagcctttgctaagtgttgtgagtcgggaattagaaaatagttccaatttgagttctcccagcagagagaaagcattttaagcaatcttccctggaatgctcaggtttgagactggaagagcttagtccaatcattgcatgaggtggggcaacctgtggagggaaaactgcaaaaagtacataatttatgtatgaaaaaacttcatatatacagaaaacaaaaaggcaatgattataaatcacataaaggcagctgtgtctttgggaagctaactggcaactgaagatacataatgcacaactcttaggatgtttcctctgagtgaagactgggatggtctgctccattagtgaaggggccacacacatttttcatgcccgtgaatcagtataggtccccatccaccccattctgtttttagtctcagaatctaaagctgcctagagcagaatgtcccaaacctagcaccacatagctccagagtttgcttcataggtgctgttgggtttcaaatgggagggggggggttcacaaagtatagaatgaccctgcctagctttgaggactatatgaagcataagcaaagcacacaaatgtgttatgcatgtgtgcacacatctacatacatgcacatacacacacatgaacacacccataatttttaagaacacaaggtggtgaatttgaaagagagcaatgtgttgatacataggaagatgtgaaggtagaaaacaaaaagagaagtgttgtaattatattataatttcaaaaattaaaaacttattttaaagattccagataagccaagcaaaggtggctcacacctttaatcccagcactcaggaggcagaggcaggtggctctctgtgagttcaaggagagctggatctacagagtgagcttaagacagccaagcctacacagagaaccctgtcttgaaaaattattgcagagagttgtgcaagtggagaataagaaccacagtataataaagtgcatcaagacacgtaggagcagctcagtgacagaagtcccagcattcacttttctgaaagactccattgctttgaaagcagtgtgttcttcttcccggagtggctggaacattacagtgatgactcctgttatgaaatgaacgggacttgtaggctatatgcttcaccatggagattatttcatctttaaaattctaaaattatagtaatgcacataagtgcttcctgaaggagagaatatatctactgggtattagggaaaactatttgtccatccaaaagataagtgacttaatccagtgttttgaatttttcagtattatattcatctttgaatagtgactttattctggtacaaatagcaagcaatgaaaatcttctatctatagaactcttggacttttaagatggcccaagaatgctttggttgcaaacactaagtcctgcggacatgctatacacagacctccttacacattctgcattttgatactggctatcttgattgtgtgacagccaatggttattctctaaagtagatctccaaactgtgaaataattgcaaagcaaacccccagatcagagatcagtttgggtagctgggatggggtagggaaagcaaatagttaaatgtataaacacagtactggaaaagccagtggcaaccattttgtctacctgccagggcctcaaggcaaagctgtcagttttgaaaaattgcaagcaagtgacactagtcagtatccttaaactgccaacaggtgaattatttcttgtgactaaatctggaggggctctggaaccctcactcttgatgtggctttcccactctctaaatgttgggaaaatcagccttgttttctccatgtgaaatgaagaggttaggaaagctacttgcttaagcaagtgacagtgcataataccaagcaagagcactgtgcagtcttctgtagtattctgctggggccggggttcccagccacctggagaaatagaagttacaggagaacgcacctcatcacaagagcaggctttatgaagtaaggatacaaatccaaacttcctagtctcctgtgctctctagtacacggtcctgcaccttgccactcactcagtgcctctgaaaaggggatcctgtatttgctttgtcaggaatacctgatccctcctttctcacagggctttccaaataaagtccacactgccctactttttccatgaatatttggcaagccttctggtattttgttaactactgaattgtttggggatttttaattgtttgaggctaccatatcaagtattcctctgttcaagcattccctcccctttcacttccagtgtgcatgttcttcctaatactgtagccttgtgaaaatgcccaagaactaccaaagtctggatcctgagaagcaggggggtagagactgctcattccagctgttgcgcttagatctgggtgactatcctgccagctgttgtcacagctctttcgctgttacacttggatttctttgctattataaatcattgattgttgatgggtatcagctgacattgcccccagtttcacacactttgtattctgttttcatcttgattttgccactttgctttacatcagcctatctaatagtagctccttttgcatgtagaatcatgcctgtcttctggaggaggctctcgccttggcagaattttatcctgatattcattccttcacaattggaacagttcacccattccaaaagaaggccttgtctctattttctttatcttattgtatgtttctttctgcttctaataaattgttgttatatagggacaccttaaaagaaaggaaggaaggaaggaaggaaggaaggaaggaaggaaggaagaaagaaagaaagaaagaaagaaagaaagaaagaaagaaagaaggaaagaaagaaagaaaagcctaagttaactcatccaaacttctgcagattcctctagatggaaatgacagtgtctgccttgcatgccacagaactctttctctctctgccacacaggcatcgtttcccattctgcacatgggaagaagcacagtgtaagcatggctatatgcagtctctgtgtctttattaaccttgaccatcccagggtttctgaagtatttgcttgttaatcaacacagtgacagtagtgacgaataaggaaccagtgtccctgtcactttgccatcaatgagtgctccatatttctcaagctgtttcctaattaaagtaatgtgtgtttctgccgtacaaggtcaatagaaataaataatacagaacaaacatcgcaccttcgcttccgcttctgcgccactcactaattcctagttcatgaaggacactcttagttacaattccctggacatgtgtagctccgtgttctgataatattataaatccatgtgttctgtctttgcattctgttggggccattatattattagatttatttatcattattatttatgttattttattattagtttattagttttaataatataaatctgtggatatgagatcaatatatatttttgcctttggattgtctatcttggggaatgtttgtcaatttcttgcttcagttacttttctatttttaatgtattattattattattattattattattattattttacttattcattttatattctgctcaactgttcccctcctggtcaccccctcccacattttttcatcccataccacttccccttctctgagctggtagggcgtcccctgggtacctcctcacccccatcctggtatttccagtctccgcaagtgttggtgcttcctctccactgagggcagaagaggcagcccagctacaagagcatatcccatgtacaggcacagcttttgggatagcccctgttccagtagttcaggacccgcatgaagaccaagttgcacatctgctacatatgagtggggaggcatgggtccagtccacttatgatcttttgttgttggttcagtctctgagaccccccaaaggtccaggttagttgactctcttggtcttcctgtggagttcctatcccctctgggaccacaatacttcctcctattcttccatagtagtccctaagctccgtccactgtttggctgtgggtgtctgcatctgtctgagtcagctgctgggtagagcctctcagaggatagccacactagactcttgtctgcaagcaaagcagaatatcattaatagcatcaggggttggtgctttcccatggaatgggtctcaggttgggctggttattcgttgaccatttcctccatctctgttacataccccatccctgtgtttcttgtggacaggataagttttgggttgaaagttttgtgggtgggtttgtatccctattgctccattggagttcctgcctggctattggaggtggcctcttcaggttccataaccccagtgctgtgagccacagctaaggtcacacctgttgattcttgggtgcctttctcatcccaagtctctgtccttttcctagcaatatctcctacctccccacccctgtcagctgcagatttccattcattcacatgaccatctggccatccctcctgcccctccccacatctgatcccaattcaccccctattccccatctcctcagttacttttctattactgtcataaaatatcatgaccaaaagcaacttagtaatgaagaaagaatttcagagtattaatatcactcattcacaaatgatgtggcacagtggcaataacaagaagctagttggtcacatttcatcagcacaaaggacacagatagaaaagacaaaacctgcaaaatgcacccccaatgaggacctttcttcagctaggttccttctcctagagttcgataatctcccaatgcagtgccactgttgaataatctctgaatgcagtgccaccatctggtcccacatatttcaaacacatgaacctataaagagtatttcttatgccaacccctgtatcctctcaacttaggaaatgctatattagccagcgatcatgttccattctcacgatgctggaagatggtgacattgtgatcctttctgcttgctctattgctggactgatgaactagtatttgaggtcacctgtgtaacgctgaagacaaaagagtcacttggtaatcccctggggccctattttcacatagcacttaggtttgaaagttgcaagaggatttagtgaaataatgatggaacaatttggagatttgtgttctttcaggaaatacaggtgttcttagtaaccacagagctggcagtctactgtgcatttctgctttgcatgtccaaatataaactagatgcttaatgtctaacaatagcagttatcgcctattaagctgcttatggtataaaataatgtattctatatcactcaaagttctttctatagcattgtactggttatatatgtcgaatgcctctttcacgaggtctttatgatcatgaagtatattgcctggaatatgttatcatagatggagaacgtagtcacagccagtagccataaagcctgcactgctttctagcaaagcaaccttcacatgctgtctgatttgaagtcttgcatctttaagataggatcctagtgttacacacagctatctgtgtagatgtatagctcacacatttacaagaaaaggaaccagggtgactttagtatagttctctgccattcatttatttcaggaatgtttctttgggtgtgttccaaagtatatttgtatagtaaaagtcttatcaggcaagctggcaaactagtggcttggggccccagtagaagagacacaccggttctcgctgatcagttcttcgagattacttcaaatccctgttcacttttacagtctggcaacacttctcacagaaactcattacacagatcaatgtctgacaagattattttactttgattttatgcaatgtgttttgcttgtggtttggatcttgtgccatacaaacaccttctcctgcgcacaattccagtgctggaaagctgatagaatctttttaactttaatgttcttttcccccttagtcttcattgattcccttttaatttctctgttccttatcataggcataagcatattattgattgtattgattatgtcttttaaaactaatgaagtgaagagatatacctcatctctatgcagctggcttcattttgcttttgtgacatcctcacctgctcatgagtgtggctcacagtcctctggaccggattatcattcttattcagatgatttcccccaacaatgtatttattggttctgcatttgcatatgaaaagagaacctgagatgcttgtcacagttctttaaggaagctttcactcttttccaaatcagcatcattttctaatgtgtacatgcagtcaagtgtatagggcaaatatttgtctattgtttaattctcttgctcacaagctccttttaagtacttagtgcccttttatacatatgtacaatgactgtaggaattgttaagtggttaaaaatcaaagcacaataatatacttcagcatttctgttaagtttttcattcacttattttaggccccaaaaataagcatcatagaatgtcctttctgatataaagtagagttctcatgtgtgaataagtatctctgtgtgtgtgtgtgtgtgtgtgtgtgtgtgtgtgtgtgtgtgtgtgtgtgtgtgtttgagagtgtttaccacagtttccagtcattcaccaagaatgcagttgttgtatcctatgagagcatttcaggaagctggcagtcttctgaagcgggtgggccactgcatctttttttttttttccattttttattaggtatttaactcatttacatttccaatgctataccaaaagtcccccatatccacccacccccactcccctgcccacccactccccctttttggccctggtattcccctgtactggggcatataaagtttgcaagtccaatgggcctctctttccagtgatggccgactaggccatcttttgatatatatgcagctagagtcaagagctccggggtactggttagctcataatgttgttccacctatagggttgcagatccctttagctccttggctactttctctagctcctccattgggagccctatgatccatccattagctgactgtgagcatccacttctgtgtttgctgggccccggcatagtctcacaagagacagctacatctgcgtcctttcaataaaatcttgctagtgtatgcaatggtgtcagcgtttggatgctgattatggggtggatccctggctatggcagtctctacatggtccatcctttcatctcagctccaaactccgtctctgtaactccttccatgggtgttttgttcccaaatctttttttttttttttttttttttttttaaagaggaggaagctagttagctagacatagtaggaggtttatgcaggagagctatctcaggttgcagtccaggaagaagaagttgacattagcatcacctgtacgcactgcttttagctaagggtcaaccacatgtaaacattcctactctgtccaggggaaggttttgctctttccatggatctgagggatggtcctcctacagggtcacccttctcctcagcttcttccagcttttccctaattcaaccacaggtctcagcagcttctgcccattggttggatgcaaatatctgcattgattttcacaaaaagaggaacatttttggtaaattttttttttccattttttattaggtatttagctcatttacatttccaatgctataccagaaagtcccccttacccacnnnnnnnnnnnnnnnnnnnnnnnnnnnnnnnnnnnnnnnnnnnnnnnnnnnnnnnnnnnnnnnnnnnnnnnnnnnnnnnnnnnnnnnnnnnnnnnnnnnnnnnnnnnnnnnnnnnnnnnnnnnnnnnnnnnnnnnnnnnnnnnnnnnnnnnnnnnnnnnnnnnnnnnnnnnnnnnnnnnnnnnnnnnnnnnnnnnnnnnnnnnnnnnnnnnnnnnnnnnnnnnnnnnnnnnnnnnnnnnnnnnnnnnnnnnnnnnnnnnnnnnnnnnnnnnnnnnnnnnnnnnnnnnnnnnnnnnnnnnnnnnnnnnnnnnnnnnnnnnnnnnnnnnnnnnnnnnnnnnnnnnnnnnnnnnnnnnnnnnnnnnnnnnnnnnnnnnnnnnnnnnnnnnnnnnnnnnnnnnnnnnnnnnnnnnnnnnnnnnnnnnnnnnnnnnnnnnnnnnnnnnnnnnnnnnnnnnnnnnnnnnnnnnnnnnnnnnnnnnnnnnnnnnnnnnnnnnnnnnnnnnnnnnnnnnnnnnnnnnnnnnnnnnnnnnnnnnnnnnnnnnnnnnnnnnnnnnnnnnnnnnnnnnnnnnnnnnnnnnnnnnnnnnnnnnnnnnnnnnnnnnnnnnnnnnnnnnnnnnnnnnnnnnnnnnnnnnnnnnaatgtgttacctcactcaggatgatgccctccaggtccatccatttggctaggaatttcataaattcattctttttaatagctgagtagtactccattgtgtagatgtaccacattttctgtatccattcctctgttgaggagcatctaggttctttccagcttctggctattataaataaggctgctatgaacatagtggagcatgtgtccttcttacctgttggggcatcttctggatatatgcccaggagaggtattgctggatcctccggtagtactatgtccagttttctgaggaaccgccagactgatttccagagtggtcgtacaagcctgcactcccaccaacaatggaggagtgttcctctttctccacatcctcgctagcatctgctgtcacctgaatttttgatcttagccattctgactggtgtgaggtggaatctcagggttgttttgatttgcatttccctgatgattaaggatgttgaacattttttcaagtgcttctctgccattcggtattcctcaggtgagaattctttgttcagttctgagccccattttttaatggggttatttgattttctgaagtccaccttcttgagttctttatatatgttggatattagtcccctatctgatttaggataggtaaagatcctttcccaatctgttggtggtctttttgtcttattgacggtgtcttttgccttgcagaaactttggagtttcattaggtcccatttgtcgattctcgatccataactctagtttcagtggaatgcagccccctcttctgaccgctggagacagtgggttctcaagcagtgtgcttccatgcattcaaccaaaacacttgctcatacacataagtagaaaatgaataaatctttctaaaatagtaaaagaatagtgttatggtcattcctaaatagtaaaatatacgttttcaagacttaactacaatttttgacatgtagatgtatacactaacatgtgagaatttgtggtcgagccagagaaaacagagatgcaaaagcaaaagagaaggccattggctcagtcctctgtctgcaagaatggaaacattgaataagtttcttccttcacacagacatttgccgattatctgagaagcccctaaaatcgatgtgtgtcttggatctaagagtattgagcaggtgataggctcttaaccagtgccccctgaatgacactcactagtcttagtcatcctgccctgactggacaccaggaggcttcttgtctttactttaatgggccagacatacttctgaacttccagcgcttttttttttatgtcaggcacttggagccttgccctgctagggagaccagatgaacgacggaggtctgattaattagtatttgcttcatatgtgtttgtttttattcctctctaaagttgtactggaaaaagaaaatcctgcctaatgcaataacaaatagtggaaaatacttgaaaattgtacttactatttaaatgtaaaggtcaatattattgtagctgttagtaacgacaaccatcatattaaaaccctaagcgtaattccataaagagcttgttgattccctcctgcccttttttgtccatcctcttagcccaccccataatccggtcacaaaaattaaagctatttaggggtgtttgagtcagcatattgcctatacacgatttatcttcctgcaatacacactttcctgaatttctcaaaggcatgtgacttcaagaaatctttaaatatgtaaataatattataagcttctgatgaattgcagatgaactgtattattttgatgtctgagtgatgcaacaaaaagctcaaactccctgctggattattcctgtcacattttacattaataaacatcagtcagcctgcaagaatggtgtgttatctgaatttaatgaacttctgtactgaatggaatgcatctagttgacaaagtgtcatcaaacagaacagaagagagtacagatctcctgaaaacaggaaggaaagaacaaacaagagagcagaagagaagagaaaaaaatcccatggaacactgtccagggggttcggggtgggggtggggctggagtgtgcaagaaagtcccagaaagcaagtctctgtgggtggacagcagtggtagtctcctgccaggagtcttagatctgtgacattaatgttgcctttccttcttattgtagataggaactcaagactaaatagaggaaagtgtctgttaaaaaataatctacagtaaaccattcaagttagttaaatgcagtacttcataggtggctctacttttggccttataatcttgtacccaagattatgagattaaagataaaacttctttaaatgaatttcactgccagtctccccatcttctttttagtacattggcacagcagcacgactgcctacagttggtatgtttacacgtataatatgtggatttttagaacacacggctatactgtcgttctctaacacagtacgaaaaacaaaatggaagcttgcaaagtactgccctttatgttgttctcgggatattttcaggaccacagttgggggaattgatcatacaaagaaactgatatgtagcatttgtataattagatagaccctggagtacacactaaattgttaccaactgtgtatgctgggatagttgaacatagccacggtggtcatgggctccttttaattttaggggggttctcatctctgagtcttttcagatcgtggggcaagatggtaacttccttgttgaattccttatgtcttttatcctaactttaaatggaaattttactctcctccctcatgttagtttgggttgctagtctcagcaccagtcttcactatgggggtctgtgagaagggtttattacagccttgctttgatgtgctgctaaatgcataaaacctagaaagttaccctggaccttttcagggcgaaagagcaaacacggtgattcatggcatttcagtttttcctatttttgttttgttttgtagttgtttgggttttggttttagcaagggtactcttagaacgcatctacatttattgaaacaactgtgaacttaaaactcttaattttttaaatcaactcagcattttacaaatgttgtcattagtccttagacagggaagaggcagagaaagaaaagagtggggaagaagagatgagggaaagaaaggagaaatcgatgagtcattggttcaagctctagctgtgtgaagcagttaacatgttgcaatatttctgaggctgtcagtatcttctgttttggattctgtgcaagtgatctttgtgtcaaaagattgattttcttgtcattaggtatagaaacgttagcagagctcacataaaggaaactgatgaataagtctagtctgttgttttccagcaaatagttttggtatctaaggctacagagcttctcactgagaggggatgccctgtggaggtaagatgcacgcatgcctggtttccacctcatggctccagtgtcccacagccttctgagatttgtagtaagctgggatgatctgtagctgatgcttcgtgtatattctttgaccttcatgactttgattgatgctggagtagagcatcagtgatggttgtcatttgcacaagcccctttctatgccagggtggccacaaacgtttagtatttcttagcactcaaaacagtgtgactttctaaaaatgtaagatttccagacaatctaaagcatggagttttaacatgaaaaatcagaggggttcggataattcacttaagtttattgttttccaattactcttaactgaaaaaaaaatttttagtaaaagttgtgatttccttgctaaacattcttaacatcattttgctaataaatatacttaggaaaaagtcttgaagtacagtttaacttgataacacgagctattttttaagaagcgagcaattataaattttgtattttagggaaattttgaatttatagaataattacataatttgtgtaactattttagcacgacctgacccatcctaaccgaaattaatgttttagcagaaatgtagtcatttgcatttatgttcttcaagagttcatcatttcattcattcatccagacattccatcccagaacaaactcttatcacctctaccaagaagtagcaaatttattcataagtatataataagctaagtgtgctagctcaagaagcttagaaactaatgttagtaatcgttaacatttctataatgttttataatttattaaacaaatactatgtctatctcctactcaaattcttacttctctatgctcactccatctcattcagtctagtcactggttgagtattttattatccacaccccgtttccttacaggagagaatcttgaagaacaagaaagtcttatacaacattgttcatgatcatgttcagggacttagaaggtgccttacagaagtacagattagtggagaaagcacaggccgttaagtgtttcctggctatgcaagcctagctaagacacaaaacacagtatttcctttcttgggcaatagatcatgttgtatagggctctttaggatgacgatttctgaacaaggaaggtagaaagggtgtgctcaaatggacctgccatttgacacccatatatttttgggaggccactatgaaccagtcactcgtctagaacctgagaccaagattgattaatacatagtctgaatgcttacatgctaattgtccgacattgggaggtgacaaggaaatagtgcctgatactttgacaatgttttcaaacatctctccagtcctcatcctgcccatccctccatattagagaaaccttacctaagaattagccataagagctatgttatatcccttctgtggctgtgtgcacacagagaaggcatccatgtaagttgtcatccctagagcttcctttacattctttgaaattagggcacatgccctcgtttgtgaatgaacacaaaggcagttttgtactggttatataaggtttgtttaaaatctatgagttagtagttagagtcagaggctaccaagccctctccattcacataagcaagtgaatattccctgagattagaaggggagaatgcaaaccctgaactctttaagaggtgtgtacatgtgcggttttctacacctgccctgacaacaattctaatatttattaggaggcatgtattccagaagtggaatcagtgcctcgagaatttaatggagccaatcagtagaactttatgctacagtaaatatccttgctgtcaggccgcaagtagcaggttcgattcccatcctcctcacctcacacttctgggtgttaagtgccaacacacatatcactcctggcctgtccacagagtctgactgagtccaccatgctaatgagatgtttggatggctattgtactctttctttgttaatggccatgtaaaatccatccatgaatctgaaaaaaaatatcttaaaaattggtacagttccttttccaaagaaaagatagacttgtcttgatggagtcttgacggcagcaaattgagaggaactgaaagcaaaacagcctactcaaggttagacagtgactggagtcatttcatgcacttaaacaatatttaggatgaccctatgtaaactcgtattatcacttaaagccggtgtaaaaatataccccatctgttgtgctaggcctgctgttgcttgccacatttctctgacaagctgttacctcagtatagagcgagagtatacattttggaatccggaattcgagtttgaaaaaaaaaaatggtatctggtacatatggactagattctgttcttccaaatgtggatttgtaacctcatttattcttaaagatgatgtgttaaattggggctttttttctttttctttttcttttctttgttttttttttctttcccccccaatatcctgggttgttggtatttgagggatttttaacttttttttttcattacctggagcctggagttctcataattttatgcctttcacatggacaatgtgcaataagagattgtttagtttacatctgtcacatgacacacagagttggtgcgaggagttgtgaatagcatagctgagttccaagccactccatgtagtctgttgtctgtagatttgcaggtattaaagacagacttaggaaagatagtttgtataattgcttctaaacaagtgaatttgaagcttaaggactctaattccaggctttctagtggcatggaagcagccaagagataatctgctttcttagagcataagaggcaagactaggggttatatcctcaggtgtcctgttttcctctctgctgcatggatctgggaatagcacgtttacctcggaattgcaggctagcacagcagtgctggatcactgagcaatttgctcttgtttccaagggccagtcaccttgctttcctgctgaaatactacaaaataaccaaaaggttttttaaagaaaagaaaagaaaagaaaagaagagaagagaagagaagagaagagaagagaagagaagaaaagaagaaaagaagaaaagaagaaaagaagaaaagaactgtgcaggatccttcttaaaatgtagtgttataatttctcaaaatttttctaaacttaggtttttttgtttccttatagtttggcttttttgtccattttgtcatttgttgttttgtttttgttaaatataacctaatagcttgctcaaacgatggcattttatttattattgtattccactattattcattacgtgactactgttttctaaaatttgggctacaaggtctgcagaaatgcaaacaggagtccagcagaacattcaaataatgtctatacagtcagttgtgtggagactttaagcattaagaaaatactcaaattaaaacccatgttgtttatttctccagtcaagagacttttgtactctactttgacgtctgtggtcactgttatccaaggctacttcagactggtatttagggcctaaacaaatcccacacaagcatttttgacaccagcatctcatgttgaaccagcctcgcctctgcattggcacgcatgctgcttcctcctacccattatacatttgctattgaattgaacacatatggtcagtgctaaagctttgaccacaatcacatttgaaggttccactaatttttgaatgtagtttccttatcaccaatttagataactagaaatctggggtaagaaaatgtagttgaagctgtaaactcccccatctcctgccagcagctttttgtcctggtcagtgctgtgattaacactgtccctttgtgagcctcactccctggtgttttcttccatcctctttttggccttgctctcattgatgcttcttggcagttgtgggtttctaatctaatgggccaattgcaattccttccacagccttcacataaattgtctttttcccacatacttatttatgcagtttagctcctcctactttgtctcatccaccccttaagtcattccagttttcctctgttgggtcaagtaccactgtagcccttgtttgctactttgtgagttcttctttattccacctttctctgttcttttccttctaccctttaaccctctaacactagataatcgaggaaaaaggaaagagatccctgaataaagacagcagtcagaaaaggggtgacgttatcattagattttgcgggttggggcatcaagttccttggggcaagtttgatctttgccttcaagatgttacttcttcttcttcttcttcttcttcttcttcttcttcttcttcttcttcttctttttcttcttcttcttcttcttcctacttctcctcctccacttcctcttcatcctcctaattattcttatccttatccttctcctccttccccctcctcttccttcccccttccccttccccttcctccttccttccttactcctcttctgcctctctccctcctcctcctttcttcttttcatacaactacttaactaccaccaacaatcaaccaaccacctctcccagtccttgcatttatctaccctcagaaaagttcccagaattccaatcatcacataatcacagaaactatctgcaggtagcaaaattacaccccagctagtgcatgagacaaattatagtcatctgctgtgggcaatctgacacagtgccatatcctcacctctgtgagcaaaaatgaaactcattcttataatatttctgtgatgatgtgaaatctcagctttctgctccagtcaccatgcctgatgtttgtggtcatcgctccttgccatgagggacttcagtccctctggattcataagtcaaaataaatgccttttcatatgtgtgaaagaaagagagaaagaaagaaagagagaaagaaagaaaagaaagaaaccaaaattccaaaatttcactacagtactacagaactgaaacaaggcttctgcctcctttatgggacttactaagttttgctctgacctatgatcatatctcagcacattataattgactgtgtagtaaaggtaatgttcatatttacctacaacttatctctctttcctaatagatgtataaggaacaagttacttttgtttaatgtttcttatcccttcacaagttccatgagtaccttgacaatcacattgaaatttgtaagaattgacagtaaatgaggaataattatcagtgttgccttcagttagtagggtttcaatatttattgacatttttcttttgtttttgagattagaattttatcatttctccctgtccatttctccttccaaagacaacaatactgtctatgaaaaacataaattcagttctgatcctacaatagaaaatttatacattgaagtgataaaggagaaagattgttagtttcagaattatcccattgccctctttgcttatgaagtagattctgagacttattctacccatttctcttattgtattttgaagtgtgactgttaaatagccattgattcatgttgcattgatacccacaggtgtatttttaatattttgctgatatagggcccagtcttcatagaggtatagaaagctgcacgcctgaattcgctgtagtccttgcagtcgcatttggatatcacacagactgatcatttactagcaaatcccagctctggaaattacagaatttgcattatttgcttcatttgggggacatataattgaggtataaattttcttcagtggtcttagttaacactgccatacgggagatgagaagatattctttacaattgtttatatacatgtacctgcgaagcctcaattcatcttcatcttcgcattttaaatgtttttctgctcatagtttaggattcaagggatgtaacaagtctgaagtgtctgtacacaaatttcactagggactcagaggagtggaaacaaggaagctattccagaaggcagactatgggtttataatcttccatgatgctaatagacagtttccccagtattccttgtcgtagcatttgtctttcgtttatggattgttatagccattattattattttaaatcaccagatagagcatatatagagcaagggtggccatatctacatttaccccctcatgactcagccccctgggcttagtatattgtctcctaggctctagattggcaacgattttattagtttttagaactgtgtctattatcatttggacagatgtggagtttaagaaccccagtaaacgttctttttatcttccccttgctatcctgtggagggagcaggggatttttatctgtaccaattgctcctcctggcaactggttcctataccctgtcccaggcagagatgcccctgtagtcatcagtgggttatctgtgcctctcctcctcaatgggctcttgaattgcttgttttcactggtttgttctctgttcaactgcttagacagcacagcttagcattacttctggatctgctgtaaaaacaacagcagttttctcttctagaactggatttcaggagaggaatcacagccactgagtcaccacacaaggactatctatctatctaagaaggagtcacttcttgcttcatacaaatctacattctagcttctacacctatagcttaaactaagttcatttatttaattaattgatatttttacttcccctccatctcattttaccttatttgctgagaacccataatatgtgatatcatataggtagagtgggacctctcctttctaggaaaggaagtaacttgtaaataacttccctataaatgacaaacatattttaaactatcatggtgttttgggttgttttgggtttgtttgtttgtttgttttttccaagtggaaggatatgtatttctaaccaggagaaatgcgatgtgaagtggacaaattctgaagaattgtattttcttttatagctccagggtcccctgtgccttcaggggattgcacagtcccataaatgactggggatttgtataacaatgtgagagaatggtgaagacaccatccacccacatcagtattagataagttactaaatagttatgaacagctcaatactctgcaatctcagtacttgtccaagaacgttatattccctcacataaacttatattgaaaataaggagacttatattttaggtctttgtgtgatttttaaactctggtgtttgggccattaggcagggtttccatgccagctgctatttgaaagcatagatagtgccggttctttccctcatagagtctgcattctgtggcccttcctgtccttttggcagaatggaggaaatgtccctgtagcatgttgctcttctgcctgttgaggatgggaaatggcagggagctgtgccttttctgaagcgaagcagactggaacacaacccagtctcagtgcagagactcttgctcactgttcatttattgtaatttccttatcttgtatgcatggacgctcgagtgacattccctcaccagaagacgagtaacagaatgtccacccttgcatgttgtctctatgttgtagagagcaccatccacaagttagtatagacaggaactatattcactagacatgtcataacaaacactgtagcttccagaaatatagttaggtacccttgctcttctggaattacctgcaaggtttcataccaactgtaccatcccattcatgagcagtgatccttggttagtgtccctacaataagtaccctctaggacatcagaggtacaatgattttataaagttccctggacatgttgtaccccttgcccaggaggctcctaataatcgttcctcccatcctcaaacacacttccccacttcatggctgtgaacactctaggtaaatgttcactaatttttgataattactgtttctatttgatctttgaagtgttggggatttatctagttcagggctatttactcattagtccaaccactctccctctgagctacatctccagccccacacttcagcatttcatgaatagtcctagtcctttttattctcgccctttatatacatagaaaaatgccctatctctccacccttgcagcctgcattgggtatagagtcatgcattaacataccacagtctgcagtataatttacatcgggaagcttttcatttcgaaacctcagttggttttggtaatgctgaggtacccaaactccagcggaattaactaactattgagctattagtaaaaataagaaggaaaggtaacagaatgagcagctgttttgcatcaaatgctgggtaagcactcctcatgtataaattccgatttccttgctaagtggaatgccatctcatctgataaagtcaaatctggaaccagaaatactcaatacattgtgccattgtggttagcaaaactaagctttgaactctgaagatcatttattgcaaggtctctattctttctcttcatgaaatggcaaaatggctcttctgatactaatggctcaaatcattatgcttatcgacttgcagatgtaatctagaagtagtttaaagcaacatctacataccgacatgctaaacatatgttctcctttgattcctcttgctgtgatgaacacagcgaccaaaagcaacatggagaggaaaggtttatttcatcttggtcctccatcaagggaagaaaagacaggagcttaaaacagaaactttggaggtctactgctcttggcttgccccgggattgctttcagcaacctttcttatatagcctgagcccactgacccaggaatggtactgcatgtagtggtctgggtcctcctacaccaattaacaatcaagaacactcccccccccccagacataccaacagatcagagtgatggaggcgtgtcttcagtgcaggttccctcttccagttatgtcagagtttagccatcacaaatgagtaacttgttcagcatgaaaggataggactcaccctgctctgctctgccttagttaaagagatagaaggattgaaaatagcacttccgactctggtactgttggctgcagcacactgggcatgccttgctgccagagcagcattagtggccactcatcagtctcatcagtcagctttattttctgttcaaaaactaagcatcaaaaacgaacctggatggggcacagaaggagttggtaggaggatagagtaatagagatatagtgcttaactatgacattctcaacaaaattcctttttataaaaactgaaggaaagtggacccaggaggggaaaagagtaagaaagaaagaccctgaatggccccaaccaattagacatgcttcaggcctgtgtcgtatatgctctgttcagagtgctgtgggaaaatgtgtcaaatttagaagccaatatgccaaaactgtagccttgcctccaccactgagtctcgacagcagcatgcccgtgtaggcattagagtgcacactcaagctgcactctatggtacagacagagtccaaagctcttagtaggctgtccttttccattacatgagaatgtgttggccagtaggcattggaagaggtgtggaatcctcaccttgtaacttaagctccctagaaccatacatttcagttctttgcattgagttttcctcctttgtgtcttgtgcatcggggttctctccatcctccaagccagtttcaggtttaatcattgccatgggtgtgatcgtaggagaagagtagaaacagcaaaggttcactggcttctgggttgggctctgtgtggattacatgggtgactaggatataatttttagggaaaagcaggagaaaaggcagagtagccaagtatggtggcgcatgtctttaatcccagaacttggaaggcagaggcaagtggatctctgtgagtcagaggccagcatggtctatagagagaattccaggacaaccagggctacagagagaggccctgtctcaaaacaacaaccacaaacatttgtgagaaaatatggccttgattaccatattctgatggtatatctcttgaagataactactcaaaaacaatatcttacaattactcagagggaactgtaaattattggaacaactacagattatttaggtaattcaggatacccaaacaagaggcaggttctagcaaacctcaaaaatatttaatctcccactgtttgctcccacttctgttttgtttgtttttttgagacagggtttctctgtagagctctggctgtcctggaactcactttgtagaccaggctggcctcgaactcagaaatctgcctgtctctgcttcccgagtgctgggatcaaaggcgtgtaccaccacgcccggctttgctctcatttcttaggtagtttagcaagtagagaacacacaacagttactactcagtttgatcagggttgagctcgaagtgtgcttgggtcagacaggtgtcttccacttctcagagtctaggtaagattctgggatagtttactaagagaccagggcttgtttggggaatggcagactctcctgtgcctaactctgaactgttaccattcaaccaactgaaacatgaaaagctatttgaaaaattcccagaaataattattttactttttattgtttctagtatacagtactatagttcagttccaggatctgcagaggtcctctctaccaagcccttttaccacattgctggcttgaaacaacaggtcttttccactctgaataaggggctgaatgaatgggtggctgagacactttatacactactgtagcaaatgaagctctttgtctttccattgtacattacacatttacttttgtatgacttattttatgtatatgatacactgtagctgtcttaagacacaccagaagagggcatagaatcccatttacagatgcttgtgagcaaccatgtggctgctgggacttgaactcaggacctctggaagagcaatgggtgctcttaaccacaaaggcatctctccagccccacattatacatttctgtagctgtagacatgtcaagagtaagttaatcctgaatcttaaggagagaaaaagatgcaggaaaggcaactagaaccaaactagagacattaatttgtgagtcatctgatggagggaggaagtttaacttttccccacagtaaacatgggggctggtcatttcttggcttgggagaaataagtagaaaacccaatacagttgtgacttctaacttgaatactgaggagcaggtgaatttgcatatgaccataaatgtgtcacattctattccgtatggtcactttgtacatgatgttcaagctgtctcctctatgggacacaaagttaataacagtcatggctgttggatgggctccttgttaaacacactgcactctgctctctctccagcagaggcgttctgagcatctgcagcccttgctctctcaaggtcaccaccatgaccatctgttaatatgctctgctgagattcagtcattcttctctcatctcccctcaggctgtcagctgtcctctctgctgggactaagcggcctctcacagtcttccccaccaccttcaattgcttattggttccaatatcctctggtgtgaggaagaaataacaacaaaatgggcacttgactcattggtgaataggagctgtaagcgtaagagacaagcctgcccgagcatcagtcacagaggaaggcttttgctttcaccattttacaaagagagctgtagagactgtgtttcctgctgcttcaatttctccgcctccttccatatctccaccatcattttcctcctctttctagttctctagaatgtcttgaaatgtgacagctacatactgtcaccctcgctccgtgcagattttgtttttctatcacaacaattggaaggccatccctaaatcagatcgttttagattgtctctgttctcggtggctttaacaacacagtgactcaaagctgcatacagttggcagctttcagccatttatttggactaccaagcaagaatgctcacagcctttctgatgaacgaagacatctttatttccagttcacacccttcatcataagaagggtatttgaagggaagccaaaaagcatacttctcaaacttcatgtttcacatgcttgcaggaattggggataattccttaccccagcgtcttcacaattgtgcagtagaaattgacagtaatgtactcgcggtccaccaacaaagagaaaaactatatatgcttcatttacttcataggaaaagcttcagttttccacaattgtatttttggaagtgactagtgtatatactccatggagaggaacaaacttttttatttttttcattttatttccttactgtctttgaaagggtctccattctggaggccaaaatagagcctctgtaatagttaccagaaactttttttgaaattagaaaaactatgttcaagaaacacagatcttattccatgttagtgaaggctacaacttgggggctggaacaaggagatttcctgcattggccaaaacttaaagagctaaattgagaaccctatgccatcgctgctgtctgcatttccctctgtgcactgggaaccacctagggtctccaggccttgtttcgtggccaggacaagctttgctgctcctgaaactgcactttctttccagaagtctcctctccacatccaagaatggccatgtatttgcacactctttgagatggctttccttgtattgacttatatcactgacagtatgaatttattttgcaccttgtctttatgatctataaaccttctgaaggccagatctacttctaacttacctgattcatttatgggtctgccccctaatgtacttttcaaaaaagtacacatttatgggaagacacaaggatggattacttctagaaaagtttatattgcaatccctactataacaatattaatagatattgtcacaggatgtcatgtagcccaggctggacttgaattaataatatttaaaactcaaactcccaaatccttgcatgcaggcctgtcctactatgtggagctgaataggcactttggacttgaatgccttttgttgtttacaaagttcttttacgtgcatttctgtgtagttcagcacttatcctatgctatgcacataagtgtgtagtataaatgtgtatgtgtatccattttgtgtctgtgtgttgcttatattgaacaaactcacacattcatatacaagctgagttctgtaagggagaagctgctatgttggctgctggagcctcacttcagcacttggcaagaaggaaaagctcagggaggatttgttagctgaaggaatcaagttattacctcgttcaggcttcaccataatcatccaaagtgcataaagtccatattgtatcttgtgtcttttcaagttaaaaaactgagtcccaaggacctgctcagggtttcaaaggtacacagtggccaaacaaaaacttgaaccctagctttctagatccataacctttcttcactgacttctgggaattttctatattaatagcaatgcatgaactatctcacgaggaaaaattgcttccaaatttaaatgcgtgatgcatatgcaggaaatcactgacttttcaatccaagggtaatgcggttggtgtgactttcagggaatagggctttcttttacccactcttcctgatgggcatgtgtcagtgcacacaaatgcataccatacatccctcacttcacactttccgaggcttcttaattcctcctcaggttctccatgctctggtgtcttttatagcttctgctggaccaggcacccacatgacatttgttattgggatgtcagcaagtgtaaagactgtgggaagagagaaagctgacccatctaatgtagacgagagcctggtactagtagaagtttgcttccgtcctgattgtagctcatggcaggaagcagagtaaagcctttattgatgactaagttgtattgaatattacagcatgtcactaatcgccacgagaccctaatggaataccattcttactgagatgggagccaaggttcagcactggagagaggtgacacaaacaccacagccagggaagggcggccttaagccctgtgcctagaacacacgaacccttacactgaaattggccgcatagtgtaggtgtttgcacagtcactttctcttcttgggaaactatctcttgtgttctttaacacatctttgtaaatgagaaaaaggcacacagtgccctgagatcacagtaaaatacaagggaactatattcatttcccatattcccatattcagacagacagacagacacacacacacaattgaaaaatctttaaaaggattgctgtggggaacaaatgatgtcctacgtggctcagcagttgagatctcactgctcttgaaggagatgtgagttggttcctagcacccagggttgatagctcataactgccagaactgcattcccaaggagatctgacgccctctactggattttatgagcacctgcactcatagatccctcctgaccagagtctgtctccttgcccatctccctgtctctgtctttcatagggaatgttaaaataatctgataaaatacaagagaaaagtaacattagcttttaatctaaagtgcatgtgggtagggtgagtcactgaaaattgtacaaaagagatcttaagttctgtaggatgtttcaaagtctgtggaaatgcagtgagtagcccaggaactctgtaaaagcctattttggtgctcggggtagacagatggtaataaggtaatgggatgtctagtctatgcagattcacaagtctggttctgcatttgaccatgagtcaggccttggacatggtttctccatgtagacttatttctttctcttttcgtttctcataaatggctacgaagacttgctggaagctgtgtgtggttctttttactgaaattatcatttggggaaacacttgttctctaagacttactgaactccaccccacaaagcatgccccctactcagatgtcatctcctgtacatcatttggaagatggattattggggtttcccaccagtccccagctcagtttctatttccaaattccggctgccagttccatacttggttaagatcctgcttctgcctggtatcctagggaaacagtttgtaagggctgctgtgtccatctgccttcctgcctgagtttttgactatacaccctgattatttcctaatctagaagtgaatcacaagactgcaaatgcagggaacagccttgaaatatgttcagagtgtgaatacttacagagttaggcctgagagtgtagagcaagacacttgcatttgtgactctacttatgtatatatttataggcactttgataaagccaatgtaagtgcatacatagttgggctgtgtatcaagaaatcttaatttttaaatgcagagacattacaattacagtgtgaacatggacctggaaacctccctgcacaccattcccagtcagctgtgacattgttcaagggacccttggcttgaagttgtcaagataagataagttggttagcttcaggctgtatctcttcatctacaagaagcccatcctccacttgtcatgggaattttgagcctttgtcctagaattttttttttgaccaaactaacttgttaaataatatattctacagtcttggttttatactcctagatacataggtattataccatcagaatcataatttggggtgtagtggtgaatgtctgaaatcccacacagcaggatccagaggtcaggaacattatgagttacaaaacaggactatatcacaaaagcaaacaatgtagagtaatataagcagtatcctagacagatttgatttttatatcaataaacagtcttctaccagataaatctgtatacttttcaagctttgaaaagtttgaaccttactcctaaatttccatccagcacacttaatatgaacagcaggttattaaaaatttacctatttggcttgtaaaactttggagcctagttgctaaattcaccattggacattgttggaagtcaaagatgagcagaaaagaagaaagcataggttttgacatttttgagcacactaaccttgtccttgtagttattctagccagtacaatgctaagtaagatccagaagatgtagtgagtaggtgagctgggcctctcactggaagcttgtgaataaaaatgtttggaagggtagacagcctaggtcttatcatatccctagcattagagatggagcccttagcagctagaatctggtgtttcatttaattacttttcaaaatgccgttaccagaatttttatgtaaatacatattttattccctgaggcatgttaatatgaaatcaaaattatacaacactgaaaggaaaacacaatttcctttcttttcaccaggtctctctaatgtgttgttgaaaacatgctataggatggtgaagatgctcagactgtgcctgtgattcctgaagtatttatactacagagccatagcaccatgtcatcatgatgatcgtcaggcagctcacagaatgcagttcagtagactatgggcttagcagtgatcctgagctcccactgtaggaagtgccgctatccttagggaaacaggccctaaattgacaggcacagagctacactatgtggtattcagtggttgatgactcaaagagacatggctatttcttattatatgtttatatgtcaaacattgttcgtctgtcttgttacccacatcattcctagaacagaccttgcatgtgtggctgctacagttatcttcatttttagagggcactgaaccgtagagaaggtgagttatttgcccaaggctatacagttaacaataattgagttttgtgatgtattctcttgttctattctctaaaaacaagctgaaaaataagttatattggatttgacaggttaaaggacaagaacctgaagactagtggagcaaccctgcagtgtgcaaaggtgggggcgggatgtgcagtgcctggctcctggtgttcatagtaatagacattacatgagcagtggatggcctgggagtcaaaaatgttctcacagctggtgttgagagcatggagtgagctgatctggaacagagagagtaggtgataaatacaatgtaaacacccttagggatggcaatccataatgaagaaaccaaaggtgacatagttcattccttctattggttaagtagcagctgttcttgtccctggtcatccttcagaacttgctgggaagctatctaatactgttaacgcctggtcctcccctagtcacggagataatggtctttggggtagaattgctgtgaattcagtctctagtgattctggtgagcaggcctggctacatgaccagcttagcagagagattgtatcctgtgtttgacatcagaaagcaactgcttaaaaatggcatcccaagagttcccatgtacaaacccaaggaagcctaagcatttccccgctggtcatcccttgctccagcctgtgagcctcaacaggcaggggattcaggttgcatacttcttccatcccctcttgggatacttattcagtttttctttaaataatttctggtttgtcactttctagaaccttttatccatgcctgattctctatgtaattatgattttgatatagtcagggtaatatccccttggccttatagtctagggcttggggtcagagccaaaatgttatcattcatgacctatgtaatgcttaatttcctcatccatatcatgggggacattaactgcatttgcttcacaggaagttctgattattaaataaaatatttggtccagtgctctccacagagttgccagtaaatgtaatctttatgattgtggataataacatgaaacactgataatgaatctcggcaagaaagcacttcctatggctgactttctgtagattccagcctctaccaacgagaatagaagatagaaaattctaggttcctttaaggtaagactctgaattgtcaccatgccttattttgcagactgacctgtgatagatgtttctgtagagaaaccataaaatattttgatatagtcactcagcctaggacgtctagccctaggatcagataaccttggaccaaagtgttgcctttcatgacctatgtcatgctaactttcttcatctatattatgggatgatacccttagggatggcaatccataatgaagaaaccaaaggtgacatagctcattccttctgttggttaagtagcagctgttcttgtccctggtcatccttcagaacttgctgggaagccatctaatactgttaacgtcctggtcctcccctagtcatggagataatggtctttggggaagaattgctgtgaattccttctctagtgattctggtgagcaggtagtataaagaacttgtggcgtatacagacaagattggagagcgtgggaaagtactcatggtgccacacatggtcttaatgtagcgagggctgcacaagagtgcaacaagttacatcgtggcttctgctgggtttcttatctatctggtgtttgcaggaagtttgaaacagcacaggggaaaggggaaccacaacatcaaggatgtgaaagctgcatgtattcaagcagggtttgggcatcagacttaaactaaggggaaaaccaaaggaagctggcttgtgtgtggttaagaggaacaggggtgctgattgagggcctcagagtcaagctctccaaaaggctctctcttagctttgtctttaggtgtgtgcccactcctgaactcaccaggtcacagcggataattccaaagtcatacagatagcccaggataatcccaaacaaaacaaaacaggcatccgtttagttgtgcttagtctttcttccccatgctttctgcttatttccagtttctaagagacatgttctagttcccttctgccttgttcattctgcagatgagcaaacagtgatgacaggttctcatcctcggtctcctggctgcctgtgtcctggaccatagtctgctctaactccaagtacagagatgacagaccaactttggaatgtattcaacttccttgctgagaataagtcaacatgagaactggtgttcttatcttcaagaataactgacttctcttctttttgttgaccaagttcttaccttaactgcccccacataactactttagaagaacccatgaccttgctgagaactgctgcatgccaaggaagacttaatttcctctaagtacttgagaggagaaaaacaataatctatatgatgggcttttggctgaaacccatatcctctagaaggtagaacttggcataactcatggtctagtttaaagaaaaatgttttgttctgatgtcatctgcctaattaatgtaaaagaggattgaatttttcctatgcaatgtcatttagccttaggttttagagttaagtggctcagatcaatcctggtcttttgaggctttgtagatgccctcagttggagtgacctgcgcctggtatttataaggtggtgtactcatgacatgggagcagtacaggaatgtcccttctcacatttgcttgtccatgccttcgtatgttgaacagtacctacatgccaggataattgaaggagggtattagaatatacagaaaatggaagaggagactgtgtagcaggggagtcatagacttactaagtaataatcagtgtgttgatgaagaagagagaaagcttgggaagataagctgttgatctggctggatttctattttttaagtacaaatgtttcctatggctcgtgttttcaataagattgtattaaaagcctgttttcatggtgggcattccacttaaggacaaaatgaggaagcatagaggtggtccctaccttcaaggagctcacagtctattgagttgcctttctgattctcccactagattgtgagctgctggagggcaggcacttgaattcatctgaaaaggtagatataattcagaatgaagcttgtgtggaatgctagctctgttgcttgttttatgatcgttacagctacttgattactttggggaaatgaaatgtagaaagattggatgagcaaaggaagagacaggttaacacagttttctaccttaatgtttgttgggactcagtgaatttcggctgcctggctcatcccttgatgcctcaggattgggaggagtaaaggttgagatctgacatctagtttggataagcagcagaccctgtctctgcttggtcaatacttataatctaggctgtaaggtaagagccagggaaaggcttgggctctgcccctcaatcccaggaatctactaagcacacgtcagaaccaaagtcaaaagaaaatgatgaaatttactctctggccaaaatgctattatttcactgaggagaaccaagtttcttggcaggacatgttgatttgattgtacttatgtaatcaattgtatttgcaagtggcatagtcattctcacaagtgtcttaaaggggaggtattggctatctctgctctctgcttgaaacttttcagagcatttttacaattcattactcacttgttccaaataaagtctctgaagtcccagtggtaggagttgtcacccttcacgatagtcactgtttcatgaggtatgactaagtcccagaggagttggtgactagcctgaagtcttatagcacattgtgcttctacctgtttgtggatgatatgctaatggctcagagaaacagaaagagagaagtgctaatcatttctatctggctaacacattgggaactctgagcttctgttctggcttatggtttagaaattcagaacagagtgttaaagattgcttctttggcttatgaaatactgtcttctattcctgtgactttgacaaggtaaaccttgtcagttacgagcattatctcccattcagagtattgtcaatatttatgtttaacaagcacttaagtcattacatattgttcctagcagccattcgtgtccaaacctactttatacataatagaagcagtgtactcaagaataggaaggtgacatgtgggaaggttagaatgtgatcctctgatttctgagtccaattttcttgcatgatggagcatctctgtcccaagatcttgtctccctgctgttgctgtttaggaattatagcttggaaaaaccaagtgtaagtttgctgtagtagcatgaagtatctgttgatgtaaaaagaaaaatcacacattattcaaaggctctgctcatttgtctaaagaaatttattacctcctatttctcaaaaaaaaaaaatctattcagtgtttcttcaatgcacacattgagatggagaagctggcctaattccacattcccttctctcacaagtaatgacacattctaaaggatgctaaataggttgtcagagacgtagatgggttctataaatatgtacccaaatctcagcagtcaaaatcacatacagagagaggcctgcctctgtgaccttgcttgctgcatcttccttcttccaggatcactatggttgttaaaaacacaaaggcccagagccaaacagacctgcattcctagttacacttcagctggctgcttgaaggccttggtctctgtttcttcatttcagtgactttcatttcatctttctatgtgactctttatcaccacttaagcctcttgaatttatatatttcttagaaacagtatcaacttcaccttaatgtcagtttaaactgttgaaccctggggtattctatagcatgtgtattcttacttctacattcaagtgcttaccagtgcagtatctgcccatgtctgatcagttcatgctatttggagtaacagatttcacctttagttatgcatagactataacaccatgacctggagcttggaaagagaggagggaaaatataccagcagtgacacacttttaagtttccccggttgtgcaatggcaagagactaaggataggatctttcttggctgtagtagctagcattttctgcttataccttggtgctttctgtccccattgctgaatgagggcaaaggggaaatacctaagcagggaaaacggatgcattgcaagtatttagagtagaccttgccttagcaaattttagctgttatggttttgggtagatggctcagcagttaagagcacttaactcttaagctcttccagaggatcctcgttcaatttccagcacccacgtggtggcccacacccatccataacttcagtaacaggagatctaataacttcttctgacacccacgagcatcaggcatgaacatggtacacatacatacatgcaggcaagacactcatacacataaaataagtaagtcttaaaacaattaactgccatgttgaagaatgccagggatgggtggtagtggtttgtaggtccttgttgtgcatcttatctgcttgcctgatgttgcttctgctccatagtttgttgaaaaagaaaaaaacaagtgtgtgaagcagatgaacattaaacacagggaaacaggacctcgagaagcaaaaccaccgtctaatagcatttggaaactttatggagaaaaatctagagttcttactggtcaggctgctgtgtccttaatttatatatttctataatttccttgttaagagaagaggaagagggggaaagaaatccctgactcttggtcactacatataattgtagaacaagttttagaggcagtgggtattgaattctttcagtctgtctgtataacagtgttggtattatatgaagatgcctcctaaactggaaagtaggtgcctaggcagtggatggagagtgtttcagctagcttttagataagcacttatctaaagtcaggacataaaaatactttcacgactctatgaaaactgccaaaggagaagataaaactaacccagattccgttattacactctcccccttcccccgtggaagcatgaccatctcagtgcagtcctggggcacccagatttctccaccccaaccttccccctgcatgctgagttcttggcatgctcatttttctccagcctctcattaaagtaatcactttaaaaaatcagcagcaagagcgtgcatttcggtgagtaatgtttggcctcgtctggaacagctggcctgctgtgccacggtcctgaggtgatctgcagacagctcactcagcagcctcctgtgggttgatgctatcagcagacactttccaccccttcactaaaacaccctgctggcttcctactcggagtggacagtagagcaaacaatgagcacagagacactgagggacctgaccctgcgctgacctgaagcaattaggctgccagcctgatgcacctgctttttctccttgggtcttcacctgagatgccatgtgtctacatgcccaggtgtcccacgtccacctgtctccaggacgcagttcagatgttactttctcttatgagtgtctccccatgaccccaactgcaacaccccttttgctatgaagaagtgtaacacttcagtacagtttgctttggctttgtagacttttctctcattttattttcttttcctttttttttttttttctctatgagaacagggcccatatctcattagtctcttcagtaaatcacctgctatgcatttggttaatactctcataatgattgtgttatttacaatcatcttgctgtaattataattgtgccaaatgaaagcagtgtgctctccacatttcttgtttcctgctcatctcaaaagcctctgtggatagttaagaagcctcgtcttgaagcgtgaaaatgttgaatgacctggggcggtggctgaactacttgtaactcagaaaaagaatagagcctgggggcctggtgagatggctcagtgggtaagagcacccgactgctcttccgaaggtccaaagttcaaatcccagcaaccacatggtggctcacaaccactcgtaatgagatctgatgccctcttctggtgcgtctgaagacagctacagtgtacttacatataataaataaataaataaataaatctttaaaaaaaaaaaaaagaatagagcctgggacaacatggattctaccccctactcagaatggagtgatgaggctcagaaaacctccagagctccatgttgttcatgtgatgctacatttgtagccgtaggattgttacagcgaatagatgtcattctgattacactgctgccctgggctaccttccctgtctctaggggtgaaaatttctacaaccactgcattttattatagatcctgtttcctccttatcccagttctgtgatcttgaacaccttgccttcattatttcccagttgctcatttgtgaagtatcaaaatacttctcatggaaaatggcaagcatggagtaagaaagctgaaggccaaaacagcaccagtgatattattccagggctggagacacacgtgctccatagtgagcatgcacgccactttaacagagaacctgagttcactgcctcgcacccacacacggcagcgcacagctacctgtaactcagagcagtggagccaaccttcctaatgctgtgatcctttcacatagttccatatgttgtggtgacccccaaccagaacattattttgttgctacttcataactataattttgctactgttatgaatcataatgtaaatgtgtggtattcaagttttttgttatgtgacctccaaaggggtcataaccctcaggttgaaaaatcactgcttctgagggacctgctccccctctttctctctgtctctctctctctgtctctctctgtctctctcannnnnnnnnnnnnnnnnnnncacacacgaaataaacagataattaatactgaaaaaagaagagggagaaagggaaccagctgtagggaagaaaccaataaagttaaactgtaatgatctaaatgtatgaagatgctttaatgaagtttatttgcatgctaacttaaagaatactttttgaaagccacaaaagaaatataaataaaacctcaaaaatacatactttgctgacttatttcaaaagttaaagggagaacttatccacaagatagtgatttataaatattacttttgcaactcccaggcattcacaaagtctttccataaaacagtagtgttcttagaaagtcaagtcgttggaaaatagcaatagagacagaagggagatgccttggtgctggcttattagggctttaacctcgagttaatgacactcagcctatggggtgcacagactgaggaggaacgctccttcttggtccagaaaaagaactcttcagagggctggcatcagcacagccagacttggaattcactataagaccacatctgtctggaccagctgttgccggtctgtgtacactcgccaagaataacagcaatgattttcactttatagcaacttccatcttgggaccgcagaataatgcatcagtgtagattagggctcccatgattcttgacaggaatgggcatgcttcacagagaacggggatgctctcatccacagcatgccgctcttctgggggagccttctggggtgcaaagaggcgtgggccggttctgagttagacctgcttttctgatctgagctttcctctgttgcagcctccattttcaggtaagcttgagcagcacagccccctcctcaatgctcccatcagccagcaaatgatctccagtgtgctctgcttctgtaaagactgcaaagtatggcaagcctggagatgccgcctgaattagcgagggcctggttcttacagggcgcaggggagttccctgatagtctagccatccttaggacagaacccaacaggaaatcttctcgtcctgctcattaggagatggccccgaacttgagcttttaatgtaaaaaagactttttacagtttttattttcttctcttctgagattagcattgatccttgtgtcagatattgatagaggagacagcgtttgaaaagcagtttgattgtgctgaattttgaatgaaactattcaatctggagaagtttctcagcagtgggagcttacccttcacagacgctttttcactcttggctgtcatctccatgcaaaaaaaaaaaaaaagtattttcacctaagaaaatttctattgatgttactttatactatataattttaatcccttaagactaacagccgtcctgtgggaaaagtgtaggtgggttggaatgctgggtactcttgtggtacacatcagtcttgaggacacctatcaaggtacgagtgacttagtttcaccccttggcaagacagtgtgattgcctatcaaaggtgcttggtgattaaatgagttatttaatgtgaaatatttcgaatattatctgatacctgctatatagtgccctgtagctactttcagtttcccaagttataaatcaatgaattatataaatcaaactctaatgtatgccgagctcatagaagtcatgaagacatgtctgtgggtacatcacatggctggttgatcagaagtggcagagctcctcgactttatgttcaggatcagttcctatctccccgctccctgcggtgttgatggatggcacttaagtccttcatgttctctcacccaccttctgccacttttgaaagacagccatagctcagatttgacaggttgtgtgaacatttaacacaaataatcatgaggcactgttaaatactagcacatgccatgtatcatctgcataccactcacgatggctctgaagtgcctgttcctcacgtcatttatcctcggaaatgtgatggtaagtctaaacacccccaccccaccccacccccgccgccgccaaagtaaaataaaaaagaaataaataagaacagtggagagtaagtggtgtgacgtcacactgctctgccccaaagccaacactttctccaccacaccacaatcagtgtttctgaaagcaagaagggccgcattagtctccagcctctggtataattagcatcaggctttaatcagtgaggttgactgtcttgattaacctttatgatggatcatgtaagtttcatatttctaaatgaatatataaagatagctgtaaatcagtgggaaaacactgagctaagatcagaaggctcataggtaactcatggctctgctgctccctgggtgtggttttattcaaatcactccctcccagataggccattaacaaaccactgatttgattttctgaatgaggaaaggtgagggtggggaagaggatggaatggaaaaggaaaccccagggtcatgatgtgacagtaaaactctggtgtttgtcagtgttggaccaggttgcttacagacggtgaaggagcaggaaaatccaaagaaaatttaatcttacagtgtttaatctctcctgaattcttttacaccaggtcctaatccaagcccctgatcctcttgtcttgtttaggccacaagaacattctgtcctcttgaatccacattatctaatgatggttttacaaaattgccacagcctgggcacatttaacgcagacactaagttctaatgtgccacagggtacagtggcttagatggaccatcttacttaactcataagagctagagaaagtacccaaggagctaaagggatctgcaaccctataggtggaacaacattatgaactaaccagtaccccggagctcttgactctagctgcatatgtatcaaaagatggcctagtcggccatcactggaaagagaggcccattggacacgcaaactgtatatgccccaatacaggggaacgccagggccaaaaaaaaaatgggaatgagtgggtagggaagtgtggaggagggtatggaggacttttgggatagcattggaaatgtaattgaggaaaatatgtaataaaaaaaaaagatctgttaacacacatttatatcttaagtaactaagacatatttatctcaatctctaaatatcttgctccacgtgtcaaatgttgattagtgggtatggagttaaagcagaagtaagaattgtctatctagaatgcaggcattaagcgccttagccacactgattgcttttctttgtccttttgttttttcttcacatgccttgatttcctgaccaaattctaaactgttaagctagacagatcacagccatcatgatgtttgccctgatactgcacgagtccctaatatttgcgcagccttaaatcactaatttaatgcagctttagttgagcttgcagtttgcctacggtatagatacctaagaacaaggacttttcactacttctccatgttctctctgtccagttgtttatctccccacaaggctgaacttttgtgatttgcttttcattggtcaaacaagaaaacatttttttcctgttattccctcttaggcaccttggttacattcctacaggcttgggcattcagcaagatcacctgtcagagggcaaacttgtttgtagatggtggcattttcacagaacaaagcattggcctttctctgcctcccaggtgccttgggttgctgagcaagacacctctctgactcaaaagaaaaccacctccagttaggtgaaatgtgggggggttaaccatttgtttgctggtttgcgtttcccacgaaaaactcaaaaacagaaatttacctcagccatggaaagtgatgtgccaagcactgtatttgcatattaaaactgaaagcggatttgcatgttatttcagtgtcttgtgtcacgttcaggcatctgtcaatcccactagctagaaacaacttgtgtagtgggaaagtgtttctgtgcatagaagactgaaaagctcaggcctttcgctttctcaacctgtcctcagtctggattcccttggctggcctagtctcataccgaaaactctgaagaggagactagaaccctatgctttgaaaagtacatttgttattttccaaaagccattcactatactatattctaattaaatcattttaaaataaactgcttatattccatcactgatactttgctgggcttctaggattttgttttgttttgatgttcatagtcagtttctcatgtatgttatacactattttaatacactctgaaaattataatagcaagaaacatgggcaatctaagtacctaataacaagtgactaggggaaactcattttaaacaggcagcgtgttagaaacaaggccaaggctacaggacaggtaacagacaaactatggtgtctgtctcttaaaagtatagcttcttcccagatgcagtggtacacacttgtcatgcctgcacttgggcactgggtgatggtggaaagaggatcaggagattaaagccaggctcatggcatggcaagtgtaatatcagccaagattttatgagatgctgtctcaatgaatgaatgaatgaatgaatgaatgaatgaattggtgtaacttcaaatcaaaagcatccccccatccctgtactcctaatagaacaacacatgctatgaaatctttcttcacaacaaaggattaaatagctactgcactttttcaggccatcaaaataagacgaaaccttttcctctagaaagccattgctacctacgtaggctataagcaaggaaatggtttaatttgaaaatgcaaccatagacagttcattccatccattagaattccatgtcatccgtctttgttgggtgaaaataaatgaagagatgtccgacatttgtctacccttgttaatggcaaatctatttccatgaggtatcaagtctaactggtaggctagagactatagtgattttccccatcctggttttataggaataggttccattagcctcctgcagaacaaactgagagggatcctctcactcccaaggtgggcttgcttcctcctcaagaggcaccctgggaggcataagaacagcagcattaggggatacctgtggcacagggctgtgtcatcaatttttctgcatctgttaatggaggtacccactagttgttttttttttttttttagttcttctctcctggttggtgtggcatcattatttatggcttagatgcctggagaagcaggaaagggacagaaacattactccatctaacatgaactttatgtcactgatgtatgtttcaatgtcaaaggtattatatataggaaggttaaaagtttggaggtccaacaaagcgtgcatttactaacctcagtattaggaggcctgttttcaaaagtcctcataattattatgtaaattggtaaaacattctctgaaattcaagactatgaccctgacagaaaggtgggggtcactgcaaagaccagtgagcaagcgcttcactttgttcttcaagaagagcatcgccatggagctctaaatctcttctctagtaactgagcaggtagacttagtacttactatacagtgcttctttgtatgaattagataaattactccagcttgtaaatgaggaggtcagtaatagaaaagcaaattcctaagtgattaaaagatatcaggactcaaagtcagcataggcaaccttgaggcaattacctgtgacgtgggagactaagggtggtaactgtggggcatgagagccactttggcttgttagatggtcacaaaaccttggtgtcctagcactgcagctttctaatagatgcccagccttgcccttggatgtagtagcttttcagtaagcccatcttgctgaaatacagattcataggtcctctcctgtgactgcagctttggcttagggacaagagtgtgataagcagccaggtgtagtggtgcacccctttaatcccagcactcgggaggcagaggcaggcagatttctgagtttgaagccagcccggtctacaaagtaagttccgggacagccagggctatacagagaaaccctgtctcgaaaaaccgacaaaaaaaagagtctgacaaaaaagaggttgtgggttctgcctagcaataatcatgtggatccctctcctaccacatgacttctccatggcccacccctgaaacataacaggtatcccagtggaccctctgcccttggccagaaaggatacgtcatccctttacccagtgaggcattaagagtcaacctgacatctggtaagaatctagaagtagaagcagccataggaaattgagaagtgaaaacttgatacagctaaatgctggggggtggggaggggggctatcagaaatacagacttttttttttttctggcaggctttcagctttaaaatggggctaattctaccttttgaaaagaagataatttcaatgtttctttttacaagaacatataattgaagtcattttccttctgagagaaggaacctcttgtacaccattacaaatggacaagaaaaactgcgcatctttgctatccaaaatgatagagtattcattatcatggaatctttcagtacattttggctgctttttcctgcagttttatttgcctgcgcagtgctgttctggtaagattcagattcactaagttcaattgtgtagtactttgtagataagaaatcaacagcaggtaaggacacagaggaaaaatgaccaatagcaaggccatcctctgtaacctgagaggttgatacattggcagttagggagtgactgattcatcacatggatccttagagcactgagctacattgctattaggaagcttcattgaagcgagggggcattggcctgggaacctccactaggcatctcagtgagggctctttatcaagcattcccgttcttcagaagatatgggtcccagttgcacatacctattatctacctcttgtgaggctaaggcaggagggtgacagctttgaggtcagtttgggctgcctagataggttcaggctagtttggctacatagcaaactctgccacccccacccccactcccaccccccacatatgcccgttggtggaaactttccttctctgtgtaagaacagggcaaggaggataaagtggttaaccttcctaggttcttgatttcggaagccaggcgtagtgaaagttcagtaggctgcagaagccctgcaggctgccccgtgcttactcagactcagaacacagagtgaagctccaggtgcttcagaggatgctgacaagtggtttatgtcttcttataatggaaacctctgtactaatgaggtttccactgactcagtgtgcatctatttttgcagacgacaaaatatctctaaatatagagacatgttatttcactctcaaggtggacaatgacacatgctatattatcgtcacaaacacatggagttgaagaatcaagcaatctttgagaatgtatttctatgcatgaagaaactgaggcccaggaaatgaaaataattccgtaaagacctttagtcaagttaaagatagaaaaatattaaagatgccctgaatagtcggatatttgtgatcatgtaataatatacttaatcctgtataagactatgccaaatgcttcaagcataatgaaatgcaatgtgactatggtggatagcagttgctatttgccttattattattgtggcaatttttcttgttcagaaacgattatgtccttttgtatttttttcattattatgcaatatcacccataatactcccataatacttagcaaaaaagtagacttgcatatgactgtacatttggcaccatatgtcttttctaatgacagttacctgggcaacaatgtagcagtgcatatcagaccaagtagataattcgatcctttatctgacacacacactcaaacacacacacagagacacccacacttggaaatagacaaacacataaatagaataataccactcagtttcctatgacttttcagcactggccttttagtttatcagtttccatgttccctcttacagtgtgaaataactcagcctatgagatagagttctcttcattttccagtaactgaaggactaagcccctaccttcttgtgcctcacatggcaacttcaaactgggaatcagagatgctttctgtgtgcctagagacaagagagcaagttgagccaccacccagtcctgattgcatttgtaaatagccttgcaatgtaaaatctcatagtgttctctcagctaaaatgaagacctggcattggctgctgtcttccttacagctctttttccctctccatttcttccgtatgcagtgttcctgtgtgtccttccttttctcttcctttctctgtcttatgaaatctaatctatccttcaaatacaaagattcttgtcttcagcagccttctcctggcacatgggaacatcggaaccatgcctgtatcttagtctctacacacttttgtgactatctaccgtgggtcttattcttctacaactctttaagttgtcagaggttgaaacttttcattgggattgatatttgcagttcttggcacttagtaatttcttaggacgtgtatgttaagaaaagtttggagttgtctgaaacctgtccacttgacaactcacctgcctatgatgttcctatgtctttactaagtgattcatacatttcaaagaacacacatactgctgattaatatgagtatttaaaagaacatctccccccccccccagaaaatgataggctgatttaatttgttccacactgagcagtaaactttcttttatgtacataaaaatcttggcttatactagagtaaatagatataaatctaaattgctgttaaatactgcagctggaagggcttgaagacaccagtagacaacattgagaggcattgcattgtagcacatatacaaacttggtccaccgtggagtctgatctgctgtttctcagagatggtgctcacttacccacttgacctgtgcagttttcttatccttaaagcagtttgcctgtcaaacagggcatctaagcatctaagattagctaaatgtgaatgcaaacatcctggaaacagtcatgcaagcgagggatcctggaagcaggtaaacatttcaccaccactgttcacatttctacttcagaagcaccaactcagaaagcagtgggagtcatcccatcccagtgactcgttcacataatacaattgaatgcttttaccctaaactgggctatgaattgctcatttgaaaattaatgagttgaacacagctgtttggtgtcctttagacatcatgagcactaatctctattagaagggagaaatttcggagataatctgcctatcagagggagaagtaaagttgaactcaatgccctgggctctcttccttggggtaaaagccaccacttacttgaagactctggtggtttccaccatttattctacaggtggtcagcattagacactggatgggaaggtaggagagtctcatagacaaaattcagaaataccatcaaatcatctagatcctttctcataacaactaatgtatcagattttgttccttgcttaactggggttctactgtcagtttttcatttttgttttgaaatcaggcatccattctatagaaagcacacaaatctagggtatgtttttccccccaagctaataatattctcttaagatgctgtgcagtggcactggggcagagctcttactgggccacatagcacatgacagtcaatgcttttagtacatacaatgcccagcatgtgaggtatataaaaggctccttttgtttataatgttttcaacttacaaatgggtttatcaggacatatcaccctgataagtcttgatagcattaatatattatatttgtcttatattaatacaaaaagtagaatttaaatgggaaagaacctttctaaatttggcaaactaggcaagaatatttgaataataacaaaaatagcctttccacatctgtgaaatactgataagactactttgatattagtctttttttgaaatgtaagtgctaaaggtagaaaatctaaatttctgaacttgttttgtggaagatagatttaattttttaccgcgtgtttattgaaacctagactaaaacaataataaacaatacctggttgaaaggaaagtgcatgggtggaatttgggtttagatgccagcataatccgggctcagcctcaccttttattgcacacctgaaggaaagcaactgaccccttttccatcttcactatttaattgtgtaggccatgcatggtaggtcaaccatactcctgttgtagacccaacacccaagggtgtatgtgtagcacatatttgcttgattttttaaggggatgttaaaagttaaaaacatagggaagtagggtgaatctagggtgatttggggtgggataagtaggatcaaaatacattataattctcaaagaattagtaaaaatgagggaaaaaaacaatgaaaggataaactaaaaaaccagcaacgcagtagtttctttaaggtatactgcaatgcttttagtgcaaaacaacatctgcagttgagaagttgctctagatttaatgtaactggatggtccagcatggtgtcttggcccgatgtcaccataactagccctgccctgatcttttggcatttcagctttcttgtctcacaaagaagagagcagctggcacaggccatggtctgtccacttctttctctaaagtaaatattctaacggggaataaaatcctctgagaaccagagtagtggcctaccaaagtgtttcttgggatttttactctgcatgtctgtacttcacatatatgtatatctcaaacactagaaaaatagtatagacaaaggactaaaacgttaccagtgaagtattattcatgttgtgaaggcattccatgccttcagcatcactcaaacaagtgaaactagaattaggcatgacaacatcttgaagtcatatatagtttacagaattttcatgcctgataactccttgtatttattggacatggtgagagaatgaatgcacggcttggggcttcataggatttaatcttctgtgatgctgaagagtgaaagtgtcagccaactatttcaagagtgtgaacaccaatcgagcactctccctctcctcccactgagagtggaccagtggtatccccattgctaaactatcggtttttatttcctaattaaagattctggattgataatgacatgttcaaatgtaagaaagggaaatctggtgagctcccttatgcgtatgtgggtgtaagaagttttatgtagcaggaagctactctgctgctaccatctgaccgtcccttctttgcacgtgctgggattttcagtgattgtctcagggatgctctggcctgagttcccatcctcttacgctgccgttcttcagtctcacctgcctacgttaacactactggctacttcatcctatctcatgtctgcctacttacagctctaggaaggaaaattgtgcagcttccttaagtaggaccaaaatctcttcgctttctagatctcaggaccaataagattcatcttatttcccatcttaaatgtatttgaacaggaaagcacaatggctgagagcttttttattgtacctgagtcccccctccccccttgggtttaagaagtcttatgtatttttcctctttctctgcattctctcctaggaagcttcccttaacccctgacagtgcactttctactgtctttatggatgtgcctgcagactttcctctggactgtattgtctttattggtcatcttgctaattaatacacaagtgataacatgtcaacttcttagcagttattgaaatattagattcctactattggatacacagattctaaagtgtgatagactcgtctaaaaaaaagaagtaaatggagtgaaaggccaaaggtcagacactgttgaatgcacctgtcctactccttcccaggacaaatactcctcggttaggctgattgctgcagtggatgtctagatgacaatgaaatggttgaatgctttcttcctttcagggtggataccctgggcctatggggcctccttccatccccccatcattccgcccagaagatgagctcgaacacttgaccaagaagatgctgtatgacatggagaacccacccgctgacgattactttggtgagtggggaagagagccgacttgtggagtaaattcctcatttccattttgctagtgagcagtgaggactgtatcagctcctctggagtagtgttcacatctgctgcatctgttatccacataccagtgcgcgtgtctgagtagaccaccatgaacctcagtggtggatagagttattagacatgtaaaatcaacacataattttgccagtttattagcttagcagcaggcaaagatttatcatcgtgtgtccaagtagctctaaatatttatgtctaatacttggaatctgatgtagcttaactgtattttcaggtcttacattaactgaatagaggaggaaaaaattatctttgttttccacttcttctctcttcaaacctatgaaaacttatgaagtgatgttgttcttgccagtctattagtataagttggaggtatgtgtcatttgtgagatgctatggacacaacttgtcaagggaacctacaatgcaaaagggatgagacaagcacacaaatgattatgagtgcgtagaggagaagtgagagtcctgtgaatgctcagatcagattggacagatcgtcaaccatcgtaatatagaggttgtttgtccttcagtctcataaagaatggtatttttgtagcatctaagtaaatttatttctgtgaaaacaattttgaaactgcaacatattaaaatgtgtaaaatacgagaccaagtttgactattacattgaagagatgctgagttaccaattaaggtggtataatattttctaaacattcattctctgttttgtgatagtcttatcacaaagtgctttctgagtaggttcttgaaggatgtggagagaagcatcatatgggtcgcagtaatgagtaaaggctccgccaaggtagagaactgaacaggcttttgcctcctcaagagcagttgccttccatcttgggtcagctgtccatgagtgctggaactgttaagccagccttaccttcctcaccctgggacaagcctactatctgcctgtctgacagactgacaccagtcaagactacaacaggttaaaggtacatgccaccaagcctggcaattatttactccctagaacccacacagggaagtggaactgactcctgtgagttgccctttgacctccaccagcatactgtggctcacacatccttcatgcccgctccctgcacctctgaaccacaaataaataggcaagtaaatatttttaaaagtaatttttttaaaataaatctacttctggttccttctgtgtgcccagttagctcagtattgttagctgttcccttatcacctgagcccagtttcctaccctgatgattcaaagatgtggaaccaatgttccctagcattctttgaacactagaaattcactatagaaacaacattaactcaaagaaagaaaagcgtaaggcttaacataaagattatgagaattggcacaaatgcatggaaatagtaacacagaaaccaaagcttaaagcagagcataggaaaagtttattgtgctctcttcattgtaataggaggagggtgtatattagaatccaagataaactaagttaacgatgaaaaataaggtgtctgtaattaaagaatattaaaagtgaaatgctgaattctgagcatatgtttccgatatcgtgcaacaatatctgctgtaataaaccgagcaactgtatcgactgtaacaatggataagtgttacacactcaggaaaacagataaaaaacgatcccttagaactaccttagctttacgacatacaagcttcaaaaactggagcaaagtgttctgtgagcctctgttggtgctgttttatctacaggatggaaacaatcgctatcttatattgtgattgtgagtaatgcatgaaatatttatagaaagcactcagccaagtccttggcatgtagaatgtgctcaataatcagagttcaccaaagctccaggggcttacagcttatttaagaaaataagatatccctattaaaaatctatcaataacatttgagtgaaatttaacttgtagtaacaataaaaggtgcatcaccagccgtcaaagtcatcattgccaagtggaggctgctatctgtgagaggagaggagagaagggcgtggttttactggctgtttataatatggtagtactattttatgaacggcagaaattaactgtaatttcatcttacagaagaatgtaaccccttggagtagatgttactatcatgttcccattagagaattaaggcccaggaatgctaagtgattttgctcaatatcaacaaataacgagctgcagaagtaggtttcaattcgtgtgccaagcctgtgttgttgagcaccatgcctgggatggagggaattagagcaaacactcagggaagggtttattggggagattgcctttggagagttgggcaacgaaccatgaggattctcttctaaatataaaataagcggaatgtaagtgaagacaggattgttgaaagatagcgtcctctatgtggaaaacctggaagtggctctgtacaggctgctctggcagcgcctgccccaggcgtgggttgtatctttgaaagtgtgtatgtcccagagggggctgtgaaaattatagtgtgttactccaacaagaacaccaagtgatgcacagcttcatccacattcagccaaggttctgagagactccaggaaaggaaggaagatctagaaggagccacagaaaggtactagggaaagattaagcttgaaggagtcatcaatcttagttcaagtcatttggaaatgggtcttagttcaatttggaagataatagagaaatgcggtgttttctgatggagaaacttttgatttgaaagggggaaagtaatggaattgaagcctggtacagaagtggaaaatactgggcaacagttggcccaagtctctgaaaggtttctacaccctggctggtgtggccttctctaatgagttgcatgctgaagtctagttccatgtggattgttctgtggagaaggctcaggagcatagctgcagggtatagtttaaatgacacctctaactctgcttagcaatgtgaagtcgggagcagaagtacttggtgtagacctgcctttagcctcccagtctttaaatatggcctgttaccatcttggctgcagagaagcagtgccacgatgggtacagacaggagaagcacggggagctaaggtgatgctgtgtgagtgggagaagagaggtccatggacccacctgaaagatggaggagggaagatgaaatagcactgtttgcatcatgggtgtggccagcagaggaagataatgtcttctcttgcttttcctccagaaggaggagagaggaagcagaaagaacttggagactgtagaagattcatttcaccatctattagaagcaaggctgcatgcttttgctcgaggtcatatcccttggagtagtctgtgttggtgtaaaactagcaaagggtgtgtttgtttgaagggagcctccactccagtggtagacgcttagagagaccaaggggcaaagaactagaaatcactacgacttttgacggattgaaaacttaaagagaactttaaaaataggtatcaaatggcagaactaagcagcaagcatggccactgttcaactccaagcttacctcgtgtgagtagttttcaaggaaagtgtgaaaggaatattaagctgtagaccatcttggaatggcttctcggggttatgtgagccttctatgttgcctcacataacagacttttattttcatccattgtgaaaggaaacacagttggctgtccatttggaaaggaagcataatttaactgccacacgtgcacatacactctcatatgtgtgtgtgtgtgtgtgtgtgtgtgtgtgtgtgtgtgtgtgtgtgtgcaggtgtgtgtgcaggtgtgtgtgcaggtctgagtgtctgtctgtgtgtgaccatagcatggcttcaaatgaaagttttctgactgagcccttcctaggactgaacacaaatttgttggaatgcagaatctctgaaagtggatatactatatctgagagtggatcgaaaatatctgtcagcgtattttaagcatgtaatataattatcttggcattgtttacatgctgttgtcttattccaaaaaagaaagaaagaaagaaaagactgaaatgtgtgcatttcacatttttttactaggctatttgaagaatcactatgccttcacagtagtacaaggtaaaatcttgtgtaagagaatcttgtattaactggaaggattgctagtggaaggcattgaaaattctttgcatggaaacaggactttgattggaattgggttttactttccttccaaaagatacttggactagagtggaaggtatgaggcagcaaagacatgacacttgtgttaaatcgaagaggaagaagacagggatggtaatacactgctattcctgaagtgatgtcgcctgttcaccacacttagtgctaaatatcttcccaaatgaagtcaaactggaggtccggtgatgttcatgaatcagctctagaatggaggtccagttcctccctaggttcattggagcacgtggtagctgaccatatccacaaacattgactgcatggttcaggagtctggaaaatatgatttaggtgcatttgagattttggagggaagaagccctgggacccttcctgacaattactgaaagagagtcacctgtgaaatggacttggccaattctaacagagctatggggtgagttgctaaattcccattcagtgtggagaattaatgctgtgaacagacaaaacgaaatctctgagaagtacaggtgaaaaatcaactctttgatggggaagccaatgaaatacacatatgctaatatatcagtacatctttcatccagtgtccacgtccgacattgagtgacttagttatctaaaatcacccttagctgcaccttcaaagtgagtctacaacatttagttttaatcctgtgttcagatgattaaatgaggccaggtgtggcagttcacacctttaatcccagcacttgggaggcagaggcaggtggatttctgaattcgaggctagcctggtctacaaagtgagttccaggacagccagggctgcacagagaaaccctgtcttggggagatctatagatatagggtagagatagaaatctgagtcagagtaaagattttctggcggttttaaaacacttacatacttcttgcatcatctgagttagacaagagcctgggtaaggggttaatatgctcattttccttggtagatgaaccagatgatcatgagcttccctgctctgtggacgccatgctgccctcatcagtcagagagctgacaagaagcagaatggccgtggctcagacctcactctggagtctcttccctctccttcattgtgctctcttagaacgttgctgagttggtcatggtgcagcttagctcagttagctgtgtttgagcttccagatctgtacaaagagccgcgtgattgctttggaaatcgcttggcaggtcttaactaaggtgctgagtgatttgaacctgattgtcttcattgttgtgtgacaagaaaactattcctggagtgtccctgttgattacagacaggggcctgactccaggtgggcagtttcctttagaaaagctgggacctcaggtcttgttttcacacacaaataacctaattaagtaaaaacccaaaaccacagcgttggagaaaaagtagaaaatgggtggtttagaaaaaggtggtactgatcagaggggaaagttggttttttggttttatttttttccctttttgaagtagctatgggtcatgagagtacagtggtgtttcgttagacatattaggtgtatctcctttatggtgataactttttgtgaagtattttctcagagcaatttgggcttatagcactaagtcatttatgtcttccaccatagcatatgttaatttttagtaaactcagccagtatgctattaaaacattgatttgaaacctaagattcatagggtttttttaaatgtagtcctagaagttttgtgaaatagtttttcattttctagaaaattaaagctcaaatcattcatccaaggtcatacaactgagactgatttgaaaactgtagatagaactttttttttctttctaaataaagagtagaaattaaagctacagaaatggctaggttagtgctagtgcctgctgtatagacatgaggatctaagttttgacccctagcaaccatgcaaaattctggtcacactgtacatggttgtaaccccagggctgggtgggtgtgcaaaagtagagactggagaattgctgtggtttgttgccttccagcctactgaaaaatagcaacttccatgttccatgggagtaagacagaaataaagggtgtcacctgatagcctcttctgatcttcacatgtgtacctgcatatcttgtactctctcactctctctctctctctctctctctctcacacacacacacacacacacacacacacacagacatacacacacacacacttaataaaaaacaaactggtggtagaaatggggaaggggccatccaaaggttaagaagcacattggaattgatgtttttgcaaacttgatctggatacaccattgctatactcaataagaatgcatttgccattataaataatgaattaataacttgctggtatctatatatgcacattgtcctgatcttcttaattttcaaatacaaaaatatatcattgcctctatctcaccctttacaaatacctggctgtaccttttgtgtccttcttcctcacaagtgtatagatgcaagggtagtgcttacttcacggtagtgccccatcctttatgggttggcaagtgagaaatgagaatgataggttggcagttgctgcagagtaggggtattcttccactcatttttttttatcacctttgaatcataaaatgttagtcatgcaaggtacctatgcctaaggacctgctacagatggggagaagaggaaattcatctcactcccccacctcagggtcacaaggcacttagtgacacagccgtgaattataacccaaattttatcatttctttctttttaatcacataaaggcacaggagaatatgtgagtagagttgagatgttgttgctacattcagtgaggttaaaattgggctgacaaccttggacttgatctcatttccatgtgtcttctgtgaaatccaggaggaaatcggtagattgaaagcttacatagttgagattttattcctaaagtactatatcgtattttactttatactgtttcctctgtaacctttggctcccacaagagattcttgcctctgtaatttcttcctgttgcaaaagaattgggtcagaagacagggaatcaaattgaaagaagtatgtccccatttgtacataggctgtctatagcaactgttctaaaaaggtcatccttaaagtagctccctccaatgccatgaaccaccatccaaaactgccattttatatggacttgatagaaacaacataaatctactcacgggattacagttagcagcatccattttatcagaattatgaagaaagtaaagatactcctacttcataattcaacatcctttgatgataagccatggaagcaattggaattctgaaggaagaaagcactggtgggccattatgtatggcataacaacgtcttacttcctagaccatacacagtcttgtattgacatgaacgtaaagctgagtcctgaagctacaatgctaattatgcattttctgaccttacatcccagccatcttttaatgagaacacagctgcctttcccctacaattcgcccttcctctctacaacctgacctttccccctgcctgtcccctaaagcacagagatgatgatcttcttgcagatgttgaagtgacatcaggattgttggaagacaattaatttaccatcaagctattgtttgaacatctgtagagttatgcttagtaattctattgtgtttttaattaagcaggttcattcatctacaaatatttattgagcacctactaaccaccaatcattgttctgtgtacctccggagatcatggaaattaggtacattagtgaccaaagaggagaggcatttgttaaatcctcctctgtcaaaggctttaatgtagaacaaagttgtttgcttcagagttccaatgtaacacaagtcagtttccaagaccagttatgctcattttgagctacccaccccaaccccgttccctggggtttatgaggaagatcactgcatcgaaagatcaagtgccaaggaatcagattaaaatagggttgtagactatgacaaagcacagcactgatgccatacacttacttaagggcttctggggtcagtgtcactaatggtacttggcataaataagagatactaatattgctgaccatcaatgtgacattggtatttaatgtaaatgatacagcactgtcataaaaaagaacaagtcatcatttgatggatggcacagaggaatgagcccttgatttggaggcaagtaatccaagcataagatgggtctttttctctgtgcccctgctgccatttgactttttgtgctgtccttaggatgtattcttatatgttaactgagaacatgttagcagtcttcagattatttcccagaaaacaaagacacagaagtaactcagcttgcagtatagctaatggtatggtacatgaggctctgagatcagtccccagaacaagagagagctaaagcagagagtgagagaatgaaagattcaggggtaaggctccatcacaggctttcttaacttttctgggcctccattagaagattatctattttatacacctattgccagaataatattaaataagtaaacaaacatgtaaatgtgttatacaccattagtagaaccctcaaaaactaaagagatgttagcatttcctccttgggctacatccagtttgatttatggcatttgaaattagcatatcataatctctctgattgtttcatgaattaatgctttgtgattttataaggtgttatcttgttactcttgttactggagtatcactagaggatctaagacgtgggttttactcactctgtgtgagaaagcaacagcccaagatccaccacagtgttctcatttgctgagcaaactactcttgctttttcatgtggaatgcagaaaactattgaacaaaaggacaaaatgaattttgactcagatggtacaggatgaatcataaccttctttcttatctaagatgtaaagaaaaaaataaaactaatgcagtagatggctgtgtcagcataatccagacagcctgtttttcaacagaacagagaatacatttctaccaagctgagaattgcaggtaggacaaaaacctggttaaatttttttctttgttaaaactgtaatcaaaggatctctatgtccttgcttcaagcaagccaatcagagggttctgttcccaccagcaaatattgcccagactgttcataaatccacctataatcccagctgagcaattaggggacagaaaattgactgtgtacttaatgtgtgctccccatatcagcctaccacgtggtcagtatgggggatataccatcaaaagatgcttcctaagtcatagtgttcttggccttattggggaaattgtttaaaataaaatatagaatttatccttctagagtctcgacccagatttattatctaatcagttgcctgtgaatgtaatgtaaaaatattctttaagtaaaaggcacttttaagacctctgttttctccaattgttcttcaatttacaattctagtgggtctcatcatggtcctgtatgtatgtgtgagcatgtgtgtgtgtgtgtgtgtgtgtgtgtgtgtgtgtgtgtgtgtctgttttacatgcctattgatctacttactgatttgtaacattccccaggaaagactacaaatctttaagttgctgtttcttcttcaaaaagcaaagtgagcaactatggtgtctttagaagtcccatgtcactccatcaaggcttttgctctcagtagatattccctagaatagttctattctaaaaacctgcactattatctctggttaaaactggaccaacatagagtaagcacatagtctatttggaacactttaatttgcttttagacaaaaaaaaaaaaaaaaaacgaaagtactatgtatcattactgtgaccctttgagacagatgttcttcttttacagatgataaaatggaggcataagcaagttaaagatgtttcctaaggtctatcaattatagttgctatttgagcccacagcctgtcttttgacacctgcatatattgactctatgaccacagctggcagaagggattcaagtcatcgcaaaaccacaactgtgctaatatcctaacccatgtctccctttgtttcttctggaagatgtttcttagagtactttcgtttcctctggttgaagggccccacaaatgaccaaggaagtagatgggaatccagacctgccatcagtctctttgccctatgtcaaatgtctgcagagacaaagaattaacttgtctaacaaatgttcagtgttcggattcttgatgggaatgtacctgagacctgtatcccaattccttttctcatcttaggcttgactgaacttggctattcatgttccagctgagaaactctgcacactgtctcagcccttctttcacaagtggacataattacttttgatttttagccatccatctcagtgatatcttctaagctaaggaaccttttaaaaagctggtccagtccacaggcaaactggaagagagagagagagagagaacaagggacaaggatttcatattgaaaataaggttaccctgttgtcatgtccttagacaaaggagttcaatgcaatagctagcaattggctcgctcagtcggaagttgatgctattttaggtcatcagcaggagtgtcaatgtatctgtgaattttggcattttgtttcattaaggtggttcaggaagccagacactgattaactgattattcaacttggttcccactcctaattttggatgtgtggtgtcttcaggcagctgttgtgacaccctgcttctaaagaaaactttgcttgtgcctctaaagcaattctgggaatagtttaccccacatcctactctcctggattctctgcatctctggtgacagatgccatggagatactgttgcttctggatcctggcatttctaggaagtaccagggccatccaaactgcctgcattctcactggtacactgggctcaaagtggactttcttatggaaattacataagaagatgcccatgcctcagcacgaaagtctttctgaagggaagagaaaccctacccagaccacaggatgtgtatagggaagactaggaaaattctagactctgctggtaagaatttggaatctgattctctctgtaagtgtgctgttaagtaagcaggaagggcaaggatttctattttggaaacctaagtcgtctttgtccatttgtttaatcactgagtggttattgtagacctattatgcgccaaacattttcactaagcattagtctaaaagctgagggcagaaatgcctactaaaaaaattagataatgaatatattactagagatttgtgatactatggaaagaaaaatttttgctgagattgaagccacaggtaagtgttagctcgtgtacattgtgtcagagctaaatagtaattaaatgtttcaggtaacccatttccaacaatccagtaggaacacagggagaagaccaacagagattgtaaagcatgcagtacgaatacagaaggtgcatggaaaagagaaatgagaccaaagggctgaccgatgtctagatagcttgtattgtagctgctctttcaaataagtaaagaccaagatgggtttctttctttttttttttttatatgcatagatgtgatagtgtcagatacctcagaactggacacgtacagatagttgtgcgctgccatgccataaattgaacccttgttctctgaaaagcagccagtactcctaaacactgagccatctcttcagtcccatagccaaaatcttagggctaattctggatcctgttgtggggagagctgttgactctgtggaagcttggagattggactgtgctcatttgcaccaatctgaaggagacaagagcctgaccagagcagctgaggtttaacaattttgcagggccagtgacgacatctgggtgaggagaaagggcaggttaaggttcattgctaagcttctgtcttaggtaggaaaataccattaagtgcgatgagaaaacagacttagtagtggttgtgcacgaacctactaaggctttcctatttggaagtagtttaattttcatccatcagtacttattgagcacctgctgtgtacacttacacatcatttcacattgttacaacaacagagtaaaacagactaagtcctaagaggctcacattctagtaagtggagagagaacataaataagtacacactgagaatgatagacatagagggccatgtagacaacaaactggaaagggtgacagcacactcatcagtggggacgaaacagggcagagcatggtgggtggtaggacagctgccaccccctgtggtcagatctcctgtgtctaatattggtcctgatttattggtattatcttataaattgtgtacttcccctgagacaggaatgcatacaatgaaaacattttcaatcacacttatttctatgtagcaatatattcggccaacataaaatatgccaggagaaacaaagagagaggaggaagacactcccccatacactcatccttgtttctctaaaacctagggcttgaaggtaagaagccacagaaaggaacccaagatttaatccaaatctcttccaaggatccagtttgacatgacaacgttccactgtcacctccaaatgtgttgggatgttttgtagcactcctgggcatgtgtagctcatggcagacaggttgaagattgacagtgaaacctgagagtagtgagcatattagcataatatcagggctagcagaatgtcaaaaacttaggtaatttgacttctcttgcttgattctgaacttggaaccaatctcaaatgataaccaaaggtaaaattggcaattgccagctcagatgttaagatatttcatatttgttggatcactgtaaatactgaagcaaagtataagacaagacattggtatagtgttatattcatttaactgataggacgctctagaaaaataagtcaagatagagtaatctgaagttctttagcataaatggaatcctagcctttaaagatggagacatttcttgtccatttttctccatttagcacaaaatcagcccttaataactgatgaccatttatggaacactgattatggactaagcactttattaaatactttagtaatagatcatgcttcatcatgccggcatagtaggtagtcactcagatctagtatatgggtgaaaaagccagtgctaagacagttctaaacctggaccaaggtcacacagattgttaggaggctttctaagggaagtctctgttctgacttgcttaacaagtaagtgtttctaatggagccacttgtcctcatagctataatgttctacaggattctgccatcagtaccatatactactgtactttctgtcagtcacatggttatccaaggaatatcaaaccaagattgttggaatggaaagggtccagactttttgggttctaagcatgaagagtaagaatcatccaagggagcaacattttcatgagacaaagctatgtgcccatatgcgctgtacatgtataagtctgtatatagagagatgatagatagacagatggcagatagatagatagatagatagatagatagatagatagatagaagatagatagatgatagatagatgataggtagatagatgataggtagataggtagagagatgatagatagaaaattaaacagacacagatatccttaagcccatacccactgacaaattttaactgactatggcatattcttagttataatagaattaaaatctaagttgagaattactgatcaagtttcatcttgtcacatcatagacccgaagacagaaacacactggcaactactttcagaaggtcctctgtgacacatctgtgtaaggaaccctggttctatgactttcactaatagtgattttcatttttatttcacaaaacgatatttctggattgcatcatgtcttgcttcatggttgcggtggaacataagcgagcaggcaggggtttttactgtgtctggggtcccatgatagatgtgttggtaagggaggatgtgttcactggtttctgctgagattcacctgttcactaatgacagctcctcagcacattttcatagtggtaggtccgtgggctgcatagttttgtgtgtgtgttttcaatttcagttcctttgataactgagcaaataacagagatgatgaaaccgaacagaattaatctcctagattgtgtgtcacttctccttttcagtgagtcagtacgtttggtaatgacacgggagattagaaggttgcaacgtgtgcctcagtgaatgcttgtgggaaactcactatttgcccatcacagatttatgtggagtgaatgagagttttactgcacagaatatccaggatggagaaaagataaataaatttggaagtctttgccctcaagaaactcatagactgtcacaggttagacaaccaaaaatgtataataaccctttccctgtgaggtatctgtgcatatgaccaaaggatgccttgggacatggaaagcagtggtagcttaagggctgatacctgagctgcatctgtaaggaaagactcccccggcccctgtagaaaggagaagaaaggcatgataaaatgaagaacttggtagaaaggaaggcagggaaagtgttccctcttgagatagcagaatgtcttcagcactaacagggtgatgagccagcagtagggacgtggaaggcgagacagtcagtgttcagcgaggagctggtccatgccactagatctgtgcttgatccaggagagaacaactgttcctgttgccaagtagcactgctagtgactgagatgatctcacagaggcacctcgtggggcagagtacagacttgccaggtggaacagaaagatggcattgctgtcttttactcacgcttcaaaacaggaagtgcctaagtaagcagcttttcggatcaatgcagccatgctttacctgcccttgggttcttccgcatcagcaggactaggggcatactgctgctgtgcaaagatgccaccaaatgcaacagaaggcagatcacccaatctttagaagtggaaatgtatatacatctagatttgaatgttgcttccaagtttcaacaaaaaggcaagctgtcagaaaacccctcacatgtgtattctcaactgagttcttgtggttttttggtcctggtgcctactgaagagtttgtctatgtttacaatggaaaagaccttgggagccatctccaaatcttgtttgtttgtttgtttgtttgttttaataaaactagagagaatggctccagccatcattgggagcacgcatgtgatccttccattcatgtggaagcctggcttccttttcatgctgttactaatcaagtgttcattagtcatgaattagtgagttatcccaaggcatgccttgatatcacagtccctgttcactcgcgcttatttagtacagtttccattacctagaatatactgtggcttacatatattaagtgaaaaattctagaaagaaacagattgtaaggtttgaatggcatgtcattgtggggaacatgctgaaacctcacaccgtccttcttcatccagtcaggacatgagcattccctggggcctttgcctcacatgacacctgtagtagcccactctaccactgctgataccaggaaggcagtcgtactgtcagaaagggtatggccagtaactttattccatgtagatgtggcctctgaataaaaccaaaggtgctgctgattcagacatgccagaggctgacagctgcttccaataagtgcaaggtgaaactactcatgctaataggagaagggggaaaacccgaatgctgagactgctaaactctgcagaaaaccgaatcttagtatccagggagaaagtaattcatgacgatgtttctatcttgccttaaactgcaaaaattatgatcgcagtgagtaataaatgatatagttctgtactatcaatgattaggggcatcaaaggggacagtctcaggatgaaaatgggcacgtactagagaaataagaaagacaaaatagctaaatgtttggtaaggatgtgtgattgaatttatcatctatatgcttggttccctccactttttatactaaaaaagatctttgttctttatttttctgaatttcatatgtatgtacatatatgtgtgtgtgtgtgtgtatgcaacattatcatttctgcaccccatttttctccttaaaacccttgtatacaccccccccacacacaagatgccttccaacttcatgtctttttttttttttaaattcattccagttagtgctgtgatatgttcccagatgtggggagaccatccactggtatatgagaaaactaccagcatccataccctccataaagacacacacacacacacacacacacacacacacacacacacacacacggcccagcgactatcttgcaagctgtctgtagttcctcagcatatcatgaggccctgggaaagatgagctgatgatctccactgccctttcaaaggggccttaggttagaaagggagcttggcccagttgagacccttagcctttctcacttcttctcacactggctcaataaagtggagaaagaattttattgatgatgaaaattgtatcagtattttttttatggtgcccaaaacaatcagcattgttttattgttttattttcctattgatacagtaaattactacaaatgtggggcctacagcaacacatatttgttatctcactgaatgtatcagaattcaaggtattagcaaggctccattactttcttcagccctcggaagcagtcctgttttgccttagacctctctcgaggcttcggatagcccccagcaatggcatttctgatcattttttccactagtcacatgtccattgatcacaccttgggaagattctgcaggttttaagaaactaactatgtcattagattgtgtccatttggatctcttcagatactctacccctcaagattacatttgccgaattcccaggaacataacccaggtgcccagcgttaagacagtcctccttaggtgatttaggcttgtgttgtggccttccagtaaatagctcagtgacctagagatagcaaagctggtgtggcctttggagatgtaagaatacccatgttgtttgttaaaggatcggattcttgctttaaatgctaatcttggaaaaaaatatttctgacttgtaatttgataaaagggcttctgattggagctgcagctgtggaaaacaccattcttacttgacctaaggccctgacgataaactggtacttccaaggaaagtgggtcttgttttttttttttttaatttttttttttttaagatttattttatgtattcaccaaacctcttcagacaccagaaaagggcatcagaccccattacaggtggttgtgagccaccctgtggttgctgggaattgaactcagtacctctggaagagcagtcagtgctcttaaccactgagccatctccccagctcgaaagtgggtctttttttttttttttaattttttattaggtattttcctcattttcatttccaatgctatcccaaaagtcccccatacccacccacccccactcccctacccacccactcccctttttggtcctggcgttcccctgtactggggcatataaagtttgcaagtccaatgagcctctctttccagtgatggccaactaggccatcttttgatacatatgcagctagagacaagagctctggggtactggttagttcatattgttgttccacctatagggttgcagttccctttagctccttgggtactttctctagctcctccattgggggccctgtgatctatccaatagctgactgtgagcatccacttctttgtttgctaggccctggcatagtctcacaagagacagctatatctgggtcctttctgcaaaatcttgctagtgcatgcaatagtgtcagcgtttggaagctgattatgggatggatccatgaatatggcaatcactagatggtccatcctttcgtcacagctccaaattttgtctctgtaactccttccatcggtgttttgtttccatttctaagaaggggcaaagtgtccacactttggtcttcattcttcttgagtttcatgagtttagcaaattgtatcttatatcttgggtatcctaagtttctgggctaatatccacttatcagtgagtacatattgtgtgagttcctttgtgattgggttacctcactcaggatgatgccctccaggtccatccattgggctaggaatttcataaattcattctttttaatagctgagtagtactccattgtgtaaatgtaccacattttctgtatccattcctctgttgaggggcattctgggttctttccagcttctggctattataaataaggctgctatgaacatagtggagtatgtgtccttcttaccagttgggacatcttctggatatatgcccaggagaggtattgtgggatcctctggtagtactatgtccaattttctgaggaaccgccagactgatttccagagtggttgtacaagcttgcaatcccaccaacaatggaggagtgttcctttctccacatcctctccagcatctgctgtcacctgaatttttgatcttagccattctgactggtgtgaggttggaatctcagggttgttttgatttgcatttccctgatgattaaggatgctgaacatttttgcaggtgcttctctgccattcggtatttctcaggtgagaattctttgttcagctctgagccccattttttagtggggttatttgattttctggagtccaccttcttgagttctttatatatattagatattagtcccctatccgatttgggataggtaaagatcctttcccaatctgttggtggtctttttgtcttattgacagtgtcttttgccttgcagaagccttgcaactttattaggtcccatttatcgattctcgatcttacagcacaagccattgctgttctattcaggaattttccccctgtacccatatcttcgaggcttttccctactttctcctctataagtttcagtgtctctggttttatgtggagttccttaatccacttagatttgaccttagtacaaggagtaatagagcattggaaatgatactatacagaaacctggccaagcttctccttggcatggcccattctccttggtacgggcttcctcctccattcctctggtcctacccccctccttcgttattttcattaacaaattcagggaagaactgcaggaataaagatgtggggaaatttaatatgttaaagaatgaacaggtaactgaaagcaattaggaggaaaaattgcccgcccacccccatcctgcctgatcagttttgtttcctgagaacttgtaagtcaagttctagaactgagcagtggaaagctcccatctggtggaagactagcaagacctgagggatgtaggactgaagctctctgaaagaacatgagcatcctagcaggagttctctcagattaggacgcaaacatggttccctgatggaactgtttctctccagcagtgagaagcaggtcataggaagttcggaaatgaataaagttgttctaagatctagaaagacgatgagtgaggagtgtgttctgcttaaagatgagctcgagaggacccgctctcccacgagctgcagttatttcattaccaccttattgccagtcaaatagagcattatatcaagcaagattggtcattcaaaaaagaatcctaagaggaatacagcaaacttttccaagctgcctgaattagattacattgtcagaaagtaagaagacagtgcattggctataatgttgttgtgcatagattaagctttggggactataaataaaatccttttaaggtgaatgcctagtgttgtggctgctctttgttgttgtcctgtttgttccattttgccttaaaaataaggttttcctctcccttgggtgagggatgagctagacaagcaatagattagtattaggttgtaaagtggctggtccctaattgttacacttttgttacactttgtctgttttactcagcagcaatcttagtctgcatctgagactctcttgtgagcatgagtagctatgatctatggggaaccactcctgtgtggccgtgttgggaaatggatttagagtcaggagtttacagtctatcttcagaatttttgactttccttcaccaaaaaagcaagcttgttcgtgtgtgtgtgtgtgggggggggggggggtatgtgcttacagtgtgtgatagtttcccaacttttaacattagtcttacttactacaatatattgcttagaattagttcaccattcagttttgcagcatcatagtctgagagttagttcaaatggtttaatttgattacacttaaattgtacacaccactctagctttatatgcaaaccatagggctgagactattttactaaatttaaatgttttataattcatttttccatctgagaattacattttgcatataatttttaatgtttttaagttccatttgaaacttattatcaacatacaaattcttgacagggcattaaaaaaactggtccagattattgctgagttcagtgtttcgttatgtaggaacactgaacacctttggttaactgggtattgataaagcttagagcagtgttggggggtcctatacactttggcagctgccccatggcagatttgacaacttctagttccttagggacagacaaaaagttgcctctttgccacctgtgattaagtaaatgtttgagagtccgagtcctgagcctgattgggagacagacatagaagttaattattctgagaacggttggaaactccttccctgaggaatttgtcaaacagcaaagaaccatctgtctaaggtagttttaataccaagctgcctgaaggcaggtgcatggattagatggcttgtgatgacgtggtgatgcctttcctaagactgaaaacggtcctggagaaagacctgccctgaggagtatagggtcaagaacctgacagtattgagcccttttttgaaattacagctagttggtgctgcctggtagcctgaattccagaatatcctgtgataacaatggttagttattacttcctcgaaaattatatgcatcagtcactcaaataggagtagttcaaatctttgctgatcctaaacagaattctccttgaacaggtagtttgcctgactcaggtctaagaggctttgaaacttgttgagtttgcttcttccccaccatgatagattgtatcctctcagaatgtaagaccaaaaaagacccactgcttcctttaagttggtccccattagtcatggtagcaaggaaggcagctcatgtaataggggcagcaaaccaaccctagaggctggaagcctcattgctcaattctactgaactttggaggaactctttactactatttagtcttaaatttgaccaaggtataacttaaagacttttattttattttgttatattgagataataattttctgcctgacccagaattcactacatagattaagctgacctcaagcatgcagacatccacctgcttctgcctcccgagtcctggcattgaatgtgtgcaccacaaggcccaacacgatcatctcattactttgctaaagcttttgaatgtgatgacaatgttaattttcacttctggctattgcagtttggggaccttattcaaaactgccttacccactcccgtgtgcccaagcgcttccccatgctttcttctggtagcttcaccattttaaatctttaatagtgcccagttgacttctgtaactggtgagataggagactagcttcattcctacaaatatggatattcaatttctcagcaaaatatattgaaaagtctgttccttttccaatgcttaattctcagcatccacaaggaagatgactctgtgaacatccttctagattttctagactattctcctggtttctgttttggtcacctgtatgcttcttttatttaatctcatttaacttgctgacattgtagtcagcaagttaaatattctctttcttctttctcctcaagattgtattgtaacttggattatttttgtggtcccatcaattattagggctactttattttcaatatgatgtactgatggggactgcatagaatctgtagtgtggacaaatggaaaatgtggttgtttaatgcataaacatgggatatgttttggtttcttagggaaaatctcctaaggaaggggaaatacattatagtgttattgagagatgagataaaggagaaatttgaataagaagattaaataaggggatggaaagaagggaaaaggagggaatgtgagcaggagaaactgaccctgaaggccacctgtagaggcgtacgaaacctactagtgaggacgcttcctgaaatatatacttatatgtatgcaatctatatctaagttttaaatgtgtgtgtgtgtgtgtgtgtgtgtgtgtgtgtgtgtgtgtgtgtggggtacaggtgttcacagaagtcaaagctgcatcagataccctgggatgaacttacagtagctgtgatgtctggtgtggatactgagaaccaaactttggtccccaggaagaacaacaaagcacttttaaccactgagccatctttctagcacccatgtttgatttttcttatgaagtcgtatttaatttattccttcacttgacaccagcatggcttactttttataaatcaagtatgaacatacctttcaactcttgctattggaaatattatctggtagaaatgtcaaattcctttcataaaaattgctgtcttgttattttaaatacctttcagaagtgatgactttcccctgtgcatattgatttgaattctttgtgataacggcattgattgagatcctcatgaagtacataaataaatgagcagtttgtgttggaagcctaactccaaagcttggggttgatattagacaactacatgattatctttagcacacactgaattaacttgattgcctgttaatttttctgttagtaatttggtgacagaagaagaggcatacaccttggggtaggaagaaaggcttcatgaacaacttaatgggaaaggcccaaaactgtagacaggtgtcctttattagctttctgtggctctgacaaagaccatgaccccaagcagcatggggaggaagggggttgtttaatcctacaattcaggcaacactccagcactgagggaagtcaaggcaggaactcaagcaggacaagaagctggaggcagaaaccaaaaccagactgctgcttgctggcttgatccctgtggcttgctcagcctgcgattttatacaactccagaccacctgtgcagggctggcatcacccacatcagtcaataatcaagaaaacaccccagggctgtttgtagaccagtgtgatagaggcattttctcaattgaagtttcctcctcccaaatggccctggcttatgtcaaattacagggaacaaaaattcacaatgaaaaccagcaacttacagaacagaaacattgtaatatttactagaaaaaaagggaaatatgaggagagaaaagagaggaggaaggatgggtctttttgttttttttcctgaagaaggcagcatttgaagcgcactttggatggcactgtagcttgagtggcgaaatgggattacaggatatcaagaatgttggactagttaagacattgaactagggaaaactggatagatgagaaataaatccagagtccttactccttttcagatcatatcttatgtttctataataaaggggggtttatttcaaacagtaaaccagtgctggatcctcaggagatgaaatcctgacgtctaatgagggggagatcagtttgctaaagctgagactgattattttgggttactttgaaaaggcacagtagatctactctacctgtgtatcagtgctgtggtctggtcttgccctggctccttcaggtgtaccaaactcatccttactttgtgtaaaaggatagaactggaatgcctatgtattaataagaatgttttactgatagcatttcactctagagccatctcaactcttttttggttttttcgagacagggtttctctgtatagccctggctgtcctggaactcacttcgtagaccacgctggcctcaaactcagaaatccgtctgcctctgcctctgcctctgcctctgcttctgcctctgcctctgcctcccaagtgctgggatctcaactcttaagcatgttatatttcatggctgaaactatactatgactataattcattgatattgttaatgccagtttatgggcataaaatgaattttaatgtcctttgcttttcaaatcttcagaaatcagcaatcgtattattagccatgtggctccaatgccaccatatatctccatttatactctatttcctgtgttaggtaggagaaaccaggctattggtgtgagggctcacatatacactaacagacatcatcagatcatcatgcctagtacacacactcactgctacttttgcaccaaggactatattgcctgatgggcttttcaatttgttcatagtaaccacagtgagtaaatgtggccttcaacagtgttctccatacaggttagggctataaggagtactatgtcttatgctctgttgcagttatgtttttcatttaaaaaatgatccaaataaaacactatatcagttgtaacaataacaaaaacatacatttagttgtatgtctattcttccacattaacccaatgtgaatatttctttcactatgtttattaatgaagaacagcatttcataaagagtgtttataatttacaaccacataacttaaagcatttcaggcataattaatgataaggatgaaacataagactgagcttgcatgatagggaccacttcaaatctttggttctgtagttggcatcagacagacttgcatactgtactcatgtgggctttgtagctttctgggatgaacaatgaaaaatgacctcatcataacaaaatgcttctcacttttagaaaatataagttacgaactgactggcattgttctaccacaagaaaaatagcatggtgtcactgaacacatgacatacttacatcacgaaacatggagatccaagtctcagctgaagcatgacctccctccctagtatgcatggcgctggaaggtaatttacatgcaaccagaagagcagtaatcagcaacatcacccaactccaaaccccgtaacctacaacagtgacctgcctggaagatatagtctgcaatagtggcacaagtgttataggagtaaccagtcactttctgattggatttgcagcctactccatgaaatggaacacatacctgaccctactaaagtggccaagaacatgaaactaaacattttatgggccagggctgggcgggggaaccctacaactatattttgctaaaggaatataacagtaaaatgacttctgattacacattgttatggtaaggaatcagtatgtcactcagtcttgattagaaaaccttcttgttaggggttggtctggtgctgtgcatacaaatgttaaattctgaaccccaaaatctagttgctgtccaaatgagtaattctcacttacacctgcctatgaaccttactccccagtttaattcctaattggtcagtaaatgtctggggcttatggctaagcagaaaagataggaaggcaggtcttagaatcaagtggggaggtctctagagagaccactagttggaaaacaagagaaagaagactgagagaagtagacaagatggaccaggagcatgtgaatagaaaagtatactctgaggacaaaagactgtaacagaaagagcctgggcaagactcaagcagcaagtaagaaggcatatgatttggatgcagctgagaatagctcagaacctgcccagtccaggcctacagcttgtaaataaattaccagggtcatatgtctcttatacagggttagctagagtaaataattcatgtgcaccatcttcttacaataaatggtaattaacatacaaactcaacagtgtgtacaaagtgagagaattttggatcactcagtcctaaacggaatgtgcttatcaacactcccccctccccaaattccaagaatgtatacagaagaggaggcagaaagattttaaaagccagaggtaatggatgactcttaggaagcagggtctccgagactaggcctggtatacatgaactcacagaaagacagcacacacaagacttgcagaagccatgcaaaatcaagcacagagaccagaaagtggccgcagagtcccatccctaaccaagaaactactggaaattgatatcagctgggagagtaaaaatcactccaatagagtgtcactggatctatcagccactattcaagacagaacccatgctcagcagtagatagccaacacaaaatcagctctgtttttctttgtgtgtatgtgctgttttggtttggcttagttttgtttgtgtgtaggacagggggagatggggaggatcttagaagagcaaaggaggggaggaatataatcaaaatatatgaaaaaacttaagccaataaatacaaaaaacaagtgtgggttgttttgtgtttgtttaatataaaactaaacactaactctggtctactgataaaatataaaatctgtttgctgatcctccgcttagtctgctttcatggccatacacaattatatttaggaaataaacagatatgagacaaaaacactagtcttataagagatacacagatgcctttctggaaagaagtattaaataattaattatgagacatgtaaacacacgcaaatactataaaagtttgcgcaccttgtgtgtgcgcctagtggctacagagaccagaagaggacatcagatcccctgtaaccaaagttacaatcagttgttagctgccatgtgtgtcctaggaatgaacataggtcctcttggaagagcaacaaatgctattaatcactgagacatctctccagccccaaaggtgtttttcattttgttatttttcatctgtttgaaacagggtttcactgtgtagcccttgctggtctagaattcactgtgaagatcaggttggcctcaagctcatggagatccaactggctttgcctcccaattactggaactaaagacatttgtcaccacaacctgccaagtttgaaacttttacacgtctgtgccagtctacagtctaccctgtgcctcagttatggtgccttacagtaaaccttgctttcaaaccgtttacatccttcagcaagttgaatatagtggtacgtgtctcagccactgtagaggctatggcaacaatgttacaaggtcagttccaccctgagcaacacagcatctccctgtcccactttctttttttgtgtagatagaggatgagagcaaaatatccacctctgttattgtcaaaattggttggactgttctgcatccttttgcattctagaagtggcttgtcaattcatattgataaagcccgcaggattactcataattcaaatgagaagcattgactccttaaaaggacttccaaaccatgaacatgatgtatctgttccttgatgtaagtgttctttcattttgctcggtgacttttttttaattttaaactatagaagtcttatgtatattttggatcaaaagctagaaataaaagccaaaattataaagtttttatgaaaaaaaacactcccaagaaagttcttatgaaattagggcagtcaaagatttaatgtaggatatacccaaataaatctattgaaagataaattcaatttcatcaacattctaaaagcgtgtaagtccaggacatggaaactcttgacaagagaactaaaatttacatccataccagccagggcttgaaacaagaccctgtcctcaaaaaacgaaaagcagaaaaatctaaaacttgttctcagaagaaaccattgaaatgtgaaacaccaagccatgcatccaaaatgatatgtgtccagtatacagagagcaggtttctaactcaatcaaaacaaaaaacaaaaggaggcaaaaggtttaaacagatgcttttctgggaaaaatcatcaactaaaaatatgcttggtatctgtggtccccaagaagagacttcctaaagtgtccccttacttgagttaggaacaaattcaaattgaagagattcgaggctctgccacgtcccaggcgcgaactgggatgtgaaatggctgagattctcctgaactgctgagaacaggatcgtacaatggatacttttaaaagatcttagcagtgtctttaaaaattaaacacacagtaaacataaccaagcttttctccaacatgttcgcctaaagcaaacaaaacccctgttttcacacagacttgaacatagaggttgatgtcaactttatttgtagtagtcaaaattggcagtggcccaagactccatctgtaggtgaaaggacaaattgcatcatcgtcacacagtaaaatggacacatagggaaataagctggtaaaatgtgaaagactgacttgctgagggtagggaggaatgccaagagaaagacatgggtgatagttctggcttggtcatggtgttaactatagcttttacatttattaaaaataatcaaaacatttacgtaaaatggccttggttattacatttacagaatatccaaaagtatagtatggcttagcaactaagaagacttgttcctctttgaaccaagacatggttcctaatacccacactagtattcacagcctcctaattccagttccaggggatccaataccctcttttggcttccgggacacctgcatgtacacagtacacacacatgcaagaaggcacacatgcagacacagaaataaaattttaaattttagtatatggaaataaacaccatgaagtacatttctatattttttttcccgttagactgaagcatgcttaagtgagggttagtgaaccatacatactgcagagtttcctcatttctgcacaccttttttgggcttctttagaaacaataagaacttaaaggctgtttatgcttttcccccttaatatttaaagtttgtgtgcacgtgcctgattgaaccttatttacctaagtaaaatatcctgatgaaactttcccagtgcggtctacttagattttaagaatctgacccattctttccctccctcccttccttccttccttccttccttccttccctccctccctccctcccttcgtttcttcttcttcttcttcttcttcttcttcttcttcttcctcttcctcttcctcttcctcctcctccttctctctgtctctgtctctcatttcactcttttgatcatcatggacagatttggggtgaaatgtagtgcttctagtgactctggcagggagcatcagttggttatgtcctgtaaaaggcatacggctaaagaagcttttgaatggaaatggagtccctgttcttcttttttctgtgtcagctttgatttgattaggtctgaaaaggggaaactattcagatacactaaacagaagagcattagcccaccccctagtccttgtgttactgttaaattttggtaggtaaaaggcacagtacaactcacccctgcctccctgagaaccagccactaaagcgcacagtaggagggctttgtcatgaaaattccaaagcttgaagagactcttgcctacagctttccttggggcagcatcctacctgtagcagttctgaccactctactgaacatctctcagtgcctgtaaatctttccttctgaaagagactgacagagatctagtcacaagatataagtgcatctattaggcaagtaaccagatccccatcttgcagtagcctcatgtgggtatgtaagaagctttgataaccaggtttctatttgaatctggtcaggccagtctttggtttagtatgtgtgtgcatgtgactcttctctccttaacatttgctaacgattggggtagtatttgcatactgctggggactggatgatgtaaaacttgcttcttctctccaatattgttcttcatggtgagtttttatgttttacttacaactactgaactactaccatgcacaacaaagctacacaggtcatgaatattcaaaagtgtagctacctacctacctacttacctctacctctacatacacacacacacacacacacacacacacacacacacacacacacacaccacatttaaaaccatgtactctcatgtaaaggcacataaacaaatgtacatgtgagggcccttattaaattaacctctacagtcccccacaaactatgtccacaatgggaatgtgaaagctgtcctccactctttcctctttgcccatttagtctgttcctttattctgtgtattttgaaacacttttggaatcatcccctcttccccaaccatgctgccaactgctggtaccatactttatagccaggcataatagacagcatggattttagcactgagtaacaaatgagcaagtgttggctctgcttgtatttgttgttgtgatcataaaaagataaagcggtgttaatatatgttnnnnnnnnnnnnnnnnnnnnnnnnnnnnnnnnnnnnnnnnnnnnnnnnnnnnnnnnnnnnnnnnnnnnnnnnnnnnnnnnnnnnnnnnnnnnnnnnnnnnnnnnnnnnnnnnnnnnnnnnnnnnnnnnnnnnnnnnnnnnnnnnnnnnnnnnnnnnnnnnnnnnnnnnnnccacacccctgagagaccagccacacccctgagagaccagccacaggactgtatagtgtagaaaagagtttattcagggcaactcaatagagagttaagagggtagtagaggcagagaaaaggagaaagtagagaagtagaggccaaccatgactacatggagagaggggggaagggaatggggagagagggggaacgggggcaggggaaagaggcaagggagaaaggcaagagtaagaggattggacaagcagcccctcttatagtgaaccagactacctcgctcttgccaggtaactgttggggtgtagtttagacagaataccaatatttgttgtgtgatagttgatgagatttaacttttcagagcttctctgtctttgcctgcagattaaagataaggcagtggcttatgagctcttttatcaccctctttgctcctctgtgcccttcctccacttttatctagaggtgttattataacatgcatataggcatgtatgtttaaggcctaagacatatatccactttgttacatggcagtgttttattggttggtcttctgtagaaaccctccttgccctgccttgggcccagggctgcagcctagttcctccctcctcacaggtcagtaggtccagactgccagtgttctcacttgctccatgactgtgtgtcttccatctttcccctaatacagaattccccacttggttttcaaagcctgagtccacactttcccttctaaatctgccctgattggatctatatgttatgtaacaactgtgtgcccatgagctctagagaaggcaaaggccaggtcccattcatctttctcttctcggtgagttccaatgcctgctctgtgcagtaatcacttgacacttgtttatgtggatattcacattctgtgttacctgttccagctacatgttaagattcgttgccatttgcccaagaactgttctattaaaacattttcaattttactagaaatttaatgagaattcctctattactctgtgaatttttaccaatccagtgttcaaagttgtatgtggaaagcagtgtctcagagggaagcaatatgaaacacatggaacatctttcaggagccacatgacaaaccacaagattcagataagaatgaaattccctctaaaagcaggcttagaggctgggcacaggatcctgataaggtagcagggagccaatggattcaggctttgaaagctagctgggaaattccatgtatgtgtaaaagggagaaagccttttaccaagccatgcatgaaggttactgctgtctctgctaggctgccacataagtaggtcaataaatagttcattcaagtataactttagtacctattctaaatggtttagaatcttttgaataagcatgaatttaaaaaaaaagaaccctctaatatattgttccaagatttttagctcagcaaatctcttctacaatcttttggagttggcaagttcctcagaagctatcctaaggatagtggtggtatagacaagacagacgaaggggctcatcactgcccttcatgccccctctccttattgctttagtggacagtaggaccacctagtcctcaggatccatcctcagagcactgctggaagacctctccatcttccttgatcaggtactgatttacaaaagcaagagtttggccagcccatgtctccgattcccactgccttgttcttgaagttgctcttcatgtttccctccagcaaatcccatggggaacctctgaagtgcctaagttactctttaataaatatctctcttctctgaggcaccatccctcctagttgaaccacctgccacaagctaaattattccttagtgtttacaccttgcggatatttatagccatcatcatggcaccccttagtcatcctccagccccggtgtgttacatatatagctcttttaatctttctacaaagtcagactcctcagtctcttaatcacttgtaccatcctctctctggtgcctataagagaacagtttgaatatatcccagatggcaaaaaataaccccaacatgtggtaactagggggagaaaaccacggaggagatgaaaggagcaatctccaggttaattagtggggtggccgcaaatatgtgcacagtttgtttcagaaataaagcaagctgtatttgttgtaactgtctccactttgaactcagtagtatgttggtggagccaagctgtgttgatggtccaaacagccactaaagacctttgactttgtactccctctgtgtatctcttgcttaagatggacttcaaataggatcacatagcgatacaagaaaatattactagtttctgtttagttttatggctttacgtggtttctgagcttcatataagctcagtaagggaggacctttgacttgtctctctcgttattaggcacatgggtattagtcatcttataaaattagcagtgtttactgaatatgatagcctaaataaggaacaacttcagtacaagagtgattgctcagaaatgctccacagacagcaggagaatatggccatttccaagtttgtttttttattagatattttcttcatttacatttcaaatgctatcccgagagtcccctataccctccccccacctgctccccaacccacccactcccactttcataatgttttgaaaggctatgcagaaatgtccactaagtgattttctccacacctgattcagccttgattcagtttatgtacttatcttacaaaatgtatcttgggttggaaaactaaactctgaaggagtccttaggaaaacctcccgattcctttgggggaggctgcaggatgtaccatctgtaagaagagtgtgcctcagctgtataagaaaggtagctggcaaggcataggagtgcatgcttttagtcacagcacacaaagtccagacagcttaaagcaaaaccagagaagaatgctgcttactggcttgccaggaaaggaacttgcaacagaaacaacatgtaggaacgctcttcactagcttgctcagttccttttcttatacacaccagacccacctgcccaaggatggcactgcccatggtgtgctgggtcctctagcatcagccattaatcaagaaaatgcctcatagatatgcacacaggcaaatctgatggagatgggtccctcaaccgagatttcctcttctcagaaatgcatgtctaagtttgtgttgagatgacagaaggtattgcaggaaggtacctgaggatgggcctgaagtcagcctcttcattaagttcctgtattgagtttttgccttggcttcctttgatgatacactgtaaactctaaggtgagataagacctctcctccccaaatgcctcttggtcatatggtgaccacagcaacagaacacacagcagagaggatgtgaccagcctccatctgtgactcctaggaaattttccttttcccagagtctcacgtggtccagaaagtgttccttctggcccagccatgcccctcctatagaattgtatgctttcttctgcagatgtctctaatgttctttcaggctgatcaactctgacagtttcttcgtgttttcttttaccaagcatttgtctgcagcttagaagatatgagtctcaccagagttcattagaatagattttaggctttaatatttgtaactgagcagttctgccagtctgaaggtagccaaggacaaccatttcctctcacacacaaagtaaggttgtgaagggactttttctctgaatgaaggaggggaagaggaaagtagaagccttctcatgttttattcaaatgttaacaaagaaatcgagaagtgtgtttccttaaaattgacaccatttttatcccaaatgttccggtgagtgatagtgggtatggcaggcagtcacagcagggggagctttctccaggagctcagtccccgtgggaagcattacctccaagtaatacactaatcgctttgaatcctgcatattttcacatactgtgtgcatacatacggatattaataactgttccctagacgtcacttcagcacttggagagctcagtgttgctaagcaagtgctggagatggaatcagatgcagatggcagttcagcagagaggattttacagagacgcatgaggagaaaggacggaggtgctgactccatccccatggatctttgagttctgaggtgatcagcttgtgtgagctatgcctgatattcatccacccactgcactgagattataaatggcattgctagtgcttaaaggtacttacctcagaatccatctactcacatcctacctgcatcttattcagtggtttctgtctagtaatttcttacagcattgagacatacataaattttactgttttgtgtatatgttctatttccatatatatcttagaagaattcatattttatactatatatatatatagatgtatatgtctatgtgtatatcatatagaaattcagaggggaggagaccctttttcatactaccttctgatatctcagactaaggatgatattcctatattatataaggctccattaagggaagtagcttgcctaaggtcacaggtcatatgtttctagatcaaaattactcctcctactttatattcatttaagagaaaatgcaaaatgggaaccctcccatggagtgagtattctatttaacaacattgtttaaaacagtgcgtccacactggatgtgaccacacagggcctggaacctatgttcttcactcaggtttgcctctcgcttggacggcaaagagtttaacttgttcttgtaaactaagcagctaagcaatgtaccaggctttttttttttttaacaaagaaatgttttcatcatagattgaaattgcatatgctcaggaaatttcacctgctagtacagagatactagtatatgatgtcacacgtttgggagattgtatgcacagcctgaaaagtatcacttttgagtccccaagggcctcaatttagagcctggctctgctgttggcttcctatgggatcttactcaagtcacaacctgtctcttgacctttgttttatattatgaatactaaagttgaatgaaataatcaatgctcttcactttctgaatcccctcaatagcgcattctgggcatttgggctctaaatagacaaaagaactaattggcttcctgtgaagatagtgccaattgcaactgtcacctgccactggtcccagccatgtatgtaagggtcattagatgactcatagctcactgtctcacaactcaaagttcagttttgttacatatttctcaactcattcacaaggttatttctgtaccagctcattggataacagggaaggttatctaatttaaagttcactgtgaaacagaaattcaaaagattatacatgcatttccgtctctttagatatttctgtctttcccccttagagcaggtactgtaagacagaactcttttagtggccatacattgttatagtctgccttatgctgctatggcataataactgagactatgtaatttgtagaggacagagatttctttattggtctaaaggatgggattcacaatatcaagatcctggcggggctctgctgactcctgaaggcccctgtgtgcttcaaggatggtaacttgttagtatgctgttacacagtgggtgctgcatgaggcctctttatagaggcctgtttaaatcctggagggagatgcccttgtgattttacaatctcttcaaggctctacctttaatgtgatcacattggctacatctgaggttcagattgaacacaatcaatacataaaacataaaagtctaagattaaaagagggtaatatggaaaacagctttgaaggacattaatccataagctggattaaataagagtgtgggggggcagggggagagaaggggagagagagagagagagagagagagagagagagagagagagagagagagagagagagagagagagactggagagcgtgtaagtgcttgtttccttttgtgaaacagagggtaaaaaggacatttgaggaaacctagttccctgtaactgagtcctggttttccatttgtaaagaattgttcctgttcttcttgttcatgtcaatatgtttattaaagaccacatacatgggttctacctcatttgcagaatattcttttgccttggttgattgctagaaatgagttcaaatagtcttctatcccacattgaacatatagctcattccataagtcactgaaatttcaggcatttcagcttttttattgttgaactgagggtggctcttggtattttgccatacaagattattgaaggttctgatgtatcagtgtgtaagaaagtttgtgaagatgcaagacactgtattaatgtaaggatcacttgctgatgtcctgggtagataatgttgttatggtgccaatatacaataccttcagagacatgttcctacaggtcacctcagggctaggcttgccctgaaacaaccagaataaactagagtattttctaccacaaatctaaaagtaagtgagctggcttaacctttgagtggaggtaaaggtaagagagattttcatgatagaaatcatggaataaattcaaccatatctcaaaagtagatattctggtagtggttgctgctatacttaacatcaatttttctgttaacagatcaaccatgaaatgaaagccaatatggatggcttcagagttaaaagcgggactaaacaatactatgtagaaattaacttgagaagagacttgcattggccaaaaggcagggtaatatttttagtaagtgtattctatgtttcatgaacattctatcaggccagatgtctttaggaatttatatttccaaagttagtaggtggaaagactctaaagccaactacctaggcaggcatgaaagttccagtactgatctctcagacgaagaatgcacagtgcgcccctgccaccttttcttaaatatactgatggagctatatatatctgacggaagattagaatcaggaacacacagccaactcaaaaaaagctaagtaataagaaatcaaatgacacaataaataggaaatgaacagacagtttaaaaacataaatacccaatacatgtggaaaaatgttcaccctcactagttatcatagaaattcaaattaaagctcccttggtattccattttatccctgtcagaatggcagtcattgagaaaacaaatagcactgcccctagaagcattgtgggtgtggctgctgtgtcatatgtgcatcactaggtggcagagagtgtagagaggctatgcctgtgctcagttctctgatctataaacatctgaatgattagcagcctaatatttcctgaaagaaataggcctggaatgaccaccagtctggaggcttgcaggccccagcagttcccaggtttgagagcaagccagagactggaagaaccatgcctgagactgaaggccccagtgagtttccagtattgatagagtagcagaagcccgaagccttgtatcagaccaacaagtcattgcaatgaacatttgcaagcagaaaagtgtagacgaaaaggtctgctttgggacccactacagctttcacaataagattgtctgatctctgctggcaaggaggtttcaagggtggacggcaggtatgatgggactaggtgtatgatgtgaaatttacaaaaagaaaaaacaataaaaacgttttttaaaaggacaaaaaaaaagaaaacaaataacaatgaatgctggagaagatgtgaacacaaatgagaccttatgcaatgcaaataagaatgtaaccgagttcagccattctgaaagtgtgtaccagagtttctcagactaaaaatatgtctgccatatgaccaagctctttcactcgtgggcacttagctcaaatactgtatacatcacagagatacttgcatattgatggtagtactatttgcagtttaccccaaagactgcaaggcagcatatcacatggtacttacatattggtggttatgggagcagtattcacagtaatgaatttaagtatccagcctaggcgtccatcattgaaggaggaatgaagttggggctggaaagatggcttgaggattcagagcactgcctgatcttccaaagaacccaagtttgatttccaacatccacgtggtgcttcatacaactgcctgtaacaaccctcttccggtctcctcaggcaccaggcacgcattgtgcacagacatacgtgtatacaaaacacctgtgcacataaaaataaactaagaataaataaaatgtgaacaatgaccatatcaggaaacatgctcatgtggaagagtgaagagtctcacttgttacagggtcccataatgacttctgagagtgagagaacggtcctctcccaagattgccccgattggttatccagcacaaagcagtcagccctggatccacatacatctgaacaaaatggatagaaggtggtgttgtgtgtgtgtgtgtgtgtgtgtgtgtgtgtgtgtgtgtgtaacaataatagagaaaaggaggatatcaatttgagtggtaggcatgagggagaactggagacaggaaagggatacaggaagtgggataattatattttaattaaaacataaaaattatttaacaattatttttaagttaaaaagaaaacaggctgagcaagctatggggagtaagccgctaagctgcattcctccatggcctgagtttcagcttaaaagcaaaaacagaagaataatggaaggaatgtcttgtcaggaccaccagcccagggatggcacactacccatagtgggcggtaacctcctacatcaatcattaaggaaatgttccatggactcacctatagcgtgatcttatgagggaattttctcagtcgaggtttcctcctctcagatgactataccatgtgtcaagttggcatacaactagccagcaaaaaagcaaaggactaacaagagaggaaaaggaccacaaagggaaggatagcagagtttgaggtactgactatgtccttatagacttgcttgaatatgtcttttgcatacagttattactaggaagatgttttaaaataacttttgtgagcaaatacaaacagcaagcaggcttgaaaatacctctggaagctcatatcctgtacttgcttagcctattggttttcctagactgcctgtctctccttacatctcgcctatcatgcatttggaattcagtctggctattcaggcttagctcaactattaagacatccataaggcatttaaatttatagtactagcatgacaaccacaggtttcagtacattgaggaagcccttgtagtgtcccaagataaaggagacctgatttatatacttggtttcaccaacattaaggacattgttacatgtggaaaagagaagataggtacacaggatcccaggctggccacagacagtagtaacatatgaaatcttttggtatgtgtatcagctttccggacctctgctcctggaatatttgatttgctaagcatccattgcttagaagctctgcatgccggccctgtgccagagctccttgcttcctgctgcctagtcaactgtgcttccttcatgccctggtgcctagaggcctgccgacattcctctggcctttcctgtttaaggcactgaggattttgtctaagtgacaggctgtggtatgcttttactaatgtgttgtctgagtccctctcaaagcaaagataccctctgcctgagttgcttgctctgcattctgaatgctctcctgaggaatagtttatatattcttgttaatgtaaagggggaacatttgggcgccttgttttctgttgctggtttgtagacctatttttaacttttgttctttgctgttttttccccctatgattgtgaattggaaggtgtcagactggctgcccttgaggctggtgtccctaatttatcccaagaataggaagaatttaaaggaggtaacaaaactggtcaggcccaggtccgggtccagcacattagcccaacctactctggaagaatattctccagacgtaaagagagacttgtttctgagaatgtaggccatctgcttctgtggcgagcacacagatgctcgttgaggccagtggtttgcatccagtaagccacagatgttcatcctttctttggcggtgggggtggggcagaaagcagcatttttctgcctcccccctctacctgtcaaaattgcattctcaattgcctttcctgggaaaactcttgcagaggtgttttagatgtgacttcccttgcatatttcggtagcacttttctctgcagtgtgccacacatggtgccttagactgttgaacccgggaaattcctcagtcatggtaagaagcgctagtggtgactagtccacttcttcttgtcacacaaaagcacactgaagtactggacaacgagctgacgtgaaggagattgaaaacgaaatatttttctttctggagcaggctttcactgtaggctggtgatcaaagatgtcccatacctgggatagctgtctaactctccagatgccnnnnnnnnnnnnnnnnnnnncttaaacaaaacaaaaggggaaagttaatatagaagaataagtgtgttgacttatattgaatttataatataaaaatctacttctcattcgaatccagtggacttgtaataatgttcacatgctttaatctattttccgcaaccctcagtgtgttttctacagtgaaatgccatttgttggcataaaattctcagaggtatggcatcatttttcaaacagagtatgcttcatttgatagtaagccagtaaagtttggagatgtggttttgttttcagcctaattacgaaaagagtgacaaatgaaaaaattaattttcttattctaaccaaaaaagtatatgaatttaaagcatttctaactatatgtctaatgataaaacaactataaactatattacaaatatcacaattgtattaaacatcaagaagatagcctgaaatttcacattaatatagttgtagcagacacagtccattttttaagacttaaacttctttttctcagtgtttcaaattagtttgtttgttttttaagatatgctccaatcctgcaaaagaatacaaaggaatatttacaggaccacatgcaatctgagagaaatatatttacctcttctcactcattgaaacatttacccctcccagttttgagtgtgaagtggctgtcagtccaatgtgacggggtgctgaaagccttcttcaatgagaagtcattccataatgccccatataccagatctgcactgatgaacaggcagtgcagctgtggggctggaatagatactttatccaaggatgtttaggcatgaagttagttagatattttctgcaacttactttcctcttctttagagtaagaataatggtagtatgcccatgtaagggtaccatgaattagaaaggagttaatacaagagcctcaaaaaatgttggcaattcatgaagctaggtctatgacctgcaaaaggctgcaggtccttgttgatattcctagttgcctatggttatctagtaggatcttgtttctgcctagtagacatgaactataaggagtcaaggtgactatggcccttacgatcccagggtattgggttacagaagctgccactcagagtaatacacaccctgtcccattatttactttctttccttctggtcctgtagtttgaacacatgatcctagtatatattaagcaaatgctctatcactgagctatacctaatcctaaaattttatgctagattatagtctgttactgtttaaatgttaatatgttctttaaaatctaatctgatacacacacacacacacacacacacacacacacacactgtagctttatagaacagacagtgagaagcaggttcttaaggaactcccaaccatacagtatatggtgccattaagtgatgtagatatgttcaaactaagtgcagactcagaggcagtgctgactggactctagtctcttatatgatgtcaagtgtgtggaatgagacttggcttcaagatcaccagaaatcagaactagaaccatggggaacggtcagggtggagttgcagtagtggctccatggagaacaaaatggtctagcagcctcagtgctctggaaacagctgaccttcccatcagtgagggccagctacagaagagtctgaatttagatatgaagtctgaatgtagacaagatacacacacactaactgatgtactgactcttccagggacggaggctttcctgaattgttctgttcagtagattgtgcttttcaaccccagtatcctgaatcctgctcctacctgtatatgattagagacagtgcccaggccccttcatcaagcatatgagtttccctccattgccttctcaggagccttagctgtctgctcagttgactctgggagattcccgctatgtgcaggggagatcttggtgggcttgctacttaattcagcaaaggcagtaatgctatgtctcttgctactgcaggataaatcagctgtctccctcatcttgacttcattggacaggtctaagaattcctctgtaacaagcaaccccttatcttctaggccgttgtgcccgctgtggggaaaatgttgttggagaaggaacaggatgtactgccatggatcaggtcttccacgtggattgcttcacctgcattgtctgtgatgtcaagctccgagggcagcctttctatgccgtggagaagaaggcatactgcgagccctgctacattgtaagttgccacattaggtcttcatctgctctgtcttatttgaccaaatacaagtcactccatataaatgtcaccatcagttctttgacgttcaaaagatgtgtacacatgtaaattgacatactgtatttttttctatataattacagttcacatgaggtcaaaaattgtgttaggagggggctgcctttcaaccaaaggtcagccagaaagctgtcttgcctgtgttttttatccatgtatataggaacagtatgttctctgtcatgtatatgaaggattcctgttctcagagtcatacagtcttatcatgcatttgaaatctcagtattttaggaaagacttagcaggtggcagaatttgtcaatggccttctaaacttctggactaattatctctgcagaatcattttacctccctaatcccccaggttgtctatggtgtagagaaactctttattataaagtattaaagagaattgcattctaattctgactgagctagaaatggttttctgttttaaagaacaaagctatttttgaatagcaaaacttagtgactaaaaataaataacatttccttagcattttatatggctatttaatctatttagctaccttctgatagagtagattacttaataagaaaactttatacccaaagtaaattcctttactgtcattctggttttgatctatctgttgaacatatccatggaaaagtagtactttttacaaacctaaaaattagtcacagttgcaccctctgtcaaggcatttcaacagcaaagaaaccttgagaataagggactcagaaatttgtagatctccagagtttaattttattggaatttctgccttggttgatgtcttagtattactgctactgtgatgaaaaaccatgatcaaaggcagcttttttaggaaacagttcatacttccaggtagcagtccatcactgatgaaaatgagggaaaggccatagaaggatgctgcttggtggcttgctctccatggctccctcagcctgatttactatagaacataggaccaccagcccaaggatgagctgagctcttccccattgaccactaatgaagaaaatgccttacagacttgcctacagccagatctatgatggcgctttcttcattgacgttccctcctttccagtgactccagcttgtctcaagttaacataaaattaagccagcacagttggtaacaaaattctgaaaactcaagttcattgaaacccaaggatgtgtggcacaaagaacagttctccacgactgacatttctacgtttcatctcttggtttccatcttactttgttttccttccaggaacaacttaaacacatgtggcagcattataatcccatcagctaaagcaggtgggagagaaaggaactgttttcaggtcactcgcctaactgctctctttagaagtgagactagagacacaggcgtagggtggcttctggttaccatcagtcagagtcacatttcttccttgtcctgcgacttgggcagtgctgcatgtcactagctgttcagactgtaacgataagcatagcagtgccctgtctatctggaagcagcagcatctacaataagaaaaagtctagtcagcaaaacctcacctcttacatcattctactcttcaagtaccaccctgtgaaatcattgttgaaaagaggaaggccttttataattctgacctcttttaagtgggctgcactttctagcgactcaggacagccttgtgcaatcgtttattgctgcaagttttggcagccaagtcagcaaagcctcgtccagccatctagctctcgtctagcagggagcagtaacctttttatagctcctgtttggtccctttttactgtgccactgatcattgctactgtaacaatgcttctgtggaaggcatcttaagctgtttatttttatgctttgtaagcaaaggtcttacataaaatactgggaaactgtagcagcatgcaaagaacgtgagtttgaatagaattcagtcaaagctttctgtcgtgggcaagttacttgctctttccaagccctggtttttctttctcatctatatactggacataatgggatatttttccatcagctccctgaggatgaaatgaggcaacccttgtaagcacccttagtctactgaggaaaagctattctacaaatgttgcatctgtacttagtagttaggtttggggacctgttcaccattccgtatgtgtgcagtgagactcagactcacttagctcaaggaagctggtttgcttcttggatatacctatcttccatttttttgttaatgtttgcttacctcggtgcacaacaaagcttcagtttcatgtttttagtcattttctatagtgtggcagattctattatccagactctattatatgatccttgagattgcttaagtcgctggctccctctgttcaggttgtgtgtcatagcactctgcacttcaagcaacgcagagtatgtgggaaatatttaatcatacacatggaagagctgagtgaattcaaataatagagaaccttactatcctttctgtgttttctccccctcataagaccctgtcattgaggtccttgacttaatggcctcctttcatagctacccagaaaggttgaaatcttctcagacttcagttccattttacctaaaggccctctctgttcagaatcgattccaggatgcagcctggacctcgtgcccttgaccgaggtatcggcacttccaactccttctaaactttcacagttctgataagctgcatcagaacttcagagggaaacagagagtgtgaattagaacaagctgcatggcaggtggacttagtacaggcggtgctaggattgcttgtctctccaggagctaaagttctagagcagaagaccctgctcgtgggatccagcttcgtatcacacggctcgacacaggtgtcccaaagacattgtgaataagacaagacaagcaagtccctgggtgccagtccatgggactcttttctttctgttcttgtgtttggtttgttgttacttaattgatggaataagatataataagaatagcaaaggcaatggcttagttaattatttctctgtaagcaccaaccactcatgcttgactattgatccaggagtaaggcctcccacctgtaaaacaaaacttaaatttccttctgaattggttattgataagcctaaaatcatatctaaatgtaatattgtataccctgacattcagtgcccagtaatctcatcatatttggttaatcacattagttctttcctatggtctcttgagctcttattctttgtgtatctgcatctacagttaaacagatttgattcagtgtggtggtatagctctcttcacatgtattttacctgttttctgtcaagtacctgatatgaatatatgcacaccatacttcagtggcaatcttcacttttagcctctcatctacttagatttatagtatgtttatgaactaccttttaaagcaaaagtatattttccattcctttatcattatattatgcttaaagaaaattgagtgaaaattttatatctttatttaaaataaagtacaataaaataaaaataaaataaaaaataaataaaatacttttaaaataaaagtaaaataaactaaatttacaattaaattaaaatttaaaagtaacataatttttaaaatgtagtttattgttttgcttagggtttccattgctataaaatgacaccatgaccaagcccactcttataaaggacatttaattggggctggcttacactttcagaggtgcagtccattatcatcatggtgggaagcatggtggcatccaggcaggcatgacactggggaaggagctgagaattctacatcttgttctgaaggcaaacatgaggggactgtctcacacatggctaggaggggggtttcaaagcccaccccacactgatacacttcctccaacaaggccacacctcctgaatagtgccactccttgggccaagcatattcaaaccatcacaattatcaactcaaattatcaacatcagtaattctaggacattgcctgctgttcttagttttgacctagaacacgtgatcctcctgccccagtttcatagaatataccaccacacctaacactttaaaatatttctttagaaaactgtttctggttgacaagcctgttgcaatcagtgagttcatatattaaacgatatgttattccctgttagatttatttagattcatctgggtcaatgtaataagtatattatgtcctagttattttaactgatgcttatatcagtagtagtaaatgatcttgtaaatgactcgtttcgattatgcttatagttttgaataaataaaaagattaaaattaagagcacttaagtttattaggaagtaaaatgatttaaatagaatctatctaccttggtcctatctgtctggttataatgttgggtacatcatttgcctccaagtaccagggtgtttttgtttataaagttaaaattccctaatgtcatagataaggaatgagcaagtgtgttatttttgtatcatgaaactattggattaatctgctgagtgaccttattgtgatacgatggagaagctgtagcccacaatgggcatgtttcagctgctgttgctatagaaatattgaaagtaattggcttgataggaggaacacagggtacatgggagatgagtgctttgcttacagtcatttgtggttttaggtatgaagggcatcaacaaggccttcagcttgtttgaaacttctctggttgaggcaagcttccttctgagtgttaatgtaacaaaggagcacttgctttcttcttggcagtgtaaaggagcctaggccttgggacatacacatcagacgtcctcaggcagagtctgtttatgaaacggtgatccaggatcctccactgggtcagggcttttggacagagtagctggaaaagagaggcaggcatttttattagaattgatatcctactgactagcagacctctgaaagtagcaagccagtctcctgggagactaacttgaaagtaccagaacctggcacattaataaccagcacattagcagccttttgctctcttatggcactaaatggtgaagttaaagcagtctagattttcaactccattaagatgtagttttcttgtacctctgcaggaaagctgtccttttatgtactaacgtttgtcctaatggaatgttttaaaagcagggccctgcgtgggtgttggaaaaggaaccaaagagttgggacagagtctgaaaaatccacatgagcattgctctccctaatcgcccacctctgctctcatcagcatgatgctgcttctgcctccctcggtctcctactgcacacaccacctacacacttaaacacatccattcctgctgtcttactgtcaccccaccagcactctcccaataaggaaaagggttcgagaatgagaaacattgttttaaaaaacactctccaatgaggttgagtgtatgaacctgggtgtaatcaccctcattcctgaccttccatatggcacaccatgtctgttggagctgtgataggcaaggggagagtattaggcctggttacaaatgaggctttgatatggtcaaaggaaaaggcaaaatgaaaaccagaaagctttcttctgacctggtgtccttatttgttattttatttatttatcttatttattttattcgctttatttatttaccatgctgttaccctgaaaacttacattcatccttttgaaaacaccagaatgctgccagtaactggccactcactttaaagtcacagaagctttctggtcccaagatttcatttgatagcaaccactgactgaattgtgccttctagcattatagacaacgggtaaaaagccatgacacctggtcttcccttcagtatctacaaatcatggagtctcaaaacaaaaagaatgcatttatgtttagagttaagtgtagtcatagtgataaatgccatctgcccaatagtataagtgtattttttagtggttttctttgtctgttggtctgaaaggagccgtggagatattggttctgctccttttactgtcatttccagtagcaagaaactgagacttgtacaactctggtgtgatgagctttgtttttatcttatattttattttgttgttcttttttttaatgaaggaaggaaggaaaacctaaatgactggtttttctctattgccttctctaggtggggtctgggatttttgtggatttgtttgttcattttttagatttaattcaagctggatttagggatatataaccttgtcttattttagagaaatgttgggatcaaaattgtctttttaatggtagcgattcttttaaaaattaatatcttttaatatacagtcattagaagactagaaaaagaaacatatccaattctcccatgccgtatctgcagtgtgctgaatgtgcatcttctgcctctgtgattgtttgcgtggtcataaccatggggctgtaatagcctctgatgttggtgacacatgccgagtactctcaccttacttcctaattagctacttgcttagttgtctaatagtgtgtcaaactttgttttgtacagaaatattccatggacattcataaataatatataccctttctgaagagtgactccaaaagaactattttgttagataaacacattaatgagaacattccaaggtcagatgaaactgtggtaaacaaagagccagtaaaactactagctgatgagaaaaaaaaaatgggatataggatcgtgctcagtggtaatccacttgcctaccatttgtaaggcaggaaacaaacaaggaaacatgaaaaggagggaaacaaaaaaatagaaaaataagcaaagataaattagcaaattctgatagttatattcaagttatagtatttcaagagaatattttacaaagtcaaatatcaatatcctataatatgaaaagcaaaatacaatttatgacaaaactaccagattaaccagcggacatgatgttattcgcaagcctcccgtattgcaggaaggatcagacttcttccccttctgtaagtatcgctacacagagaaaccctgtcttgaaaaacccaaaaataaaacaaaacaaagtctcactgcactgaaatatatagcaagcaatcctgatgaatgatgtggcaaaatgaagacacctgttctttagaaagcacatttctttctgtctttgaccaattaattacaggagttggataatacaattaataagattgattgagtcaagatacattgagtgtggggctggtgagatggctcagcagttaagagcaccgactgctcttcgtaaggtcctgaattcaaatcccagcaaccacatggtggctcacaaccatccacaacaaaaatctgatgccctcttctggagtgtctgaagacagctacagtgtacacacatataataattaatttaaaaattttttttaaaagatacattgactgtataataaagaaatttattttcccgatatccataaaatatttagaaaaacatttatcaaatcaaaatctaaaaggaaaatacatatggtacaccagtttagtcctacatcttgggaggctgaagtaggtatgttgcaagttcatggccactcttgattacatagggaaaccctgtccaaaaggaaaaagcaaacaaattctgaaagggaactgtagctgaatccagcagttgactagccaagataacagccgagaaatgaaaagttaagtaaacaaacaccctgcttgtgcagactgcttcaactacggaaggaagatgataatgcctgccagacagaggacgtggatggaggtctaagtcacagaagccactgtaaggagagtacagaaaataccttgatgctcataggagatgctgcctaaagaaggggtgggatgcaggccattcatgacaagttgttggtaactgaaaaaaaattctaggatattctataacagtgaattcaaggccagctgaggttagaaaagaccctgtctcatggggaagggtcggaggtgggtgggaattaatgaatgcggtacaaataaatctagacaaatgttacaaactgtgggggtgaaaaaagtgtgggcataactatagaccatttcctttctctccactgaacctaggctcctttgctctgagtaaaatgctttaatcctagtacactttttctcaatgtagccttgctaacatgcacaaaaccttaatttcaaaacccatgcttcataaaccaggtatgctagcacatacctgtaactacagccagggaggtgaagacagggtgattaggagttcaatgccagccaggggtgcagtagaccttccctcaaaaaaaaaaaaaaatcacatgtttcataggaaagatgctttttctgtaaatctaaaatatgcaaggggggggggggaccctcaacctcaccaatgtagatgaaagtcagaagtgctacctgagaaaaggcgaggaaatgtcactaacagggtttctcctatcttcaaagaacaaatgatgcctgcagtgtctccaccctcagccttctgagaccctaacttagcctgcctcagggagggagtgctaatctaactgcacatgtggagaaagcctaaaagaaatgttgagttcagtgctgcgtgataaattggagtggtaaagtgaatgccacatagtaaaatattctcaattatttgatgagtgcaatatttgaacaatattagcagcctttaaaatacttggtttaaactcatatagcacattggggcagggagagaatatgagtgtaattctctccatggatacgtttcactgaaatgatacttcataaatttgttacaaattttttaggatttaattattctaaagagtgtgtgcgtgcttgcatgcatgcatacatgtgtgtgtgtgtgtgtgcatgtgtgtgtacgtgtgcatgtgcgtgatgggtgtaccatgctggtagatgtcagaaaagggcatcaaatcccctagaactggacttacaggtgtttgtgagcctatgttttaggaaccaaacccaagttctctgcaagagcagcaaatactcctaacagctgagccacgtctccagcctatcatgcctttttttaaaaacaagcaaccaccccagcacaaagccagctctaaataaaatgaggaaactagtttagttgaataaggccagccttcctacccttgaatctaggaatgtgcacgatcatctcttatatttgtatttttctaaacatgctttttaacttttgaagtaggactatgaaaacaaaaagaaaagaaaaggctaaatgcatatatgtttgcacaattatgtaggttttatttttttgacacagacataacaaataatataaaggtccacatacttgttacccggtttaacaaaaaactattagaaatgcactggattctttgttctcatcacagtccccaaacttccttctgtcatacccatggggttctaatgcacatctttgcagtgtgcactgttgtttacatgcagggtttcatagctgtaaatatagaacatataaacatttatagacaatggtagactataaaacatgattaaatctaaagtggtaggacaaagcctaaaaagctgacaagataaaagttacaaggttagatttaaagaatacatgagagatagcccttccataaaagccgtaagaaaaactgagcaactaggcaacactggaaattgtgtctgtgtaacggaatttagggtgctttggagcccgcctgacacttgtatgccactcttagagccactcattcataatcagcagtatgtccaatctatggctaccttttctaatgatatagctctgtcctcctgtggacactgggcagtactttactgacagagaagctgaagcacatacctcctagttgactgaccagagcaacaggaagtccttattgataacatttataacatttccccctaactcttatcccaaagtataccaatttctattgtatttgaataagaacatttaaggcccagaaggaactaaaattaaagaagtactttaattcagtgctgttgttttatggctggaaaagctaacagccagagaaagtttgttgatttgcctgaattcacatgtttggcaatggtagaagcatgaatagaaaccaagagccttggtggtaccttcagagaccctccctctttaggagagttttgaaataactaagcctatgtgtctacagagacagagtgatccctggggaaagctggactctgcccacttcagtaggaccgtgaaccaggacagcatttgcttcagctctgaccagaatgaagggtctcgtatttccaggttcagtgcctctgaaatgttatgctagaaccttcttcctgccccagtttgtttatttttaaatgaagcatgaactcaccagccagtgtttgacagagtttggatgaatgtcagcatcaggccactgcaataatggtttaagatttatatttaaatataatcccattacttatacacttcattaggctgagtgaattgctggctgtggttcagcaaagttcctactttaaagataaaggatggaaagagaataggaaaggagcctctttattccttgttttctttcttattcatcttgcagctcttaatggacagaaggacaatagttagccatctacagcgtaacgtctgcactgccgaagccctctgaactgctctgcaccaccagaacaaattgtccatagctttaaatttcctataagtagaaaaagaaaggagtggacttggaggggggaggggggactaagctataaaattctaccttgaaactctgtctgaaatgagctcctgggtcctcagtaatataacctttcacttggggttggaaaatacaaaaggaaatgagtgtaaagatggagaaaatcaaattacaaccagccaccattcagcatctactctgtttctttagcttccgtttctgaacatatagaatgacagtttctccttacctctcgtgatcacacagtgaaaaaacattccgagaggggggctgagctagagtcagtaaggtgtgcgtttgattgtttgtatgtgtatgtgtgtgcttgaattttctttttaactgggtaattgcactaggccagagtccaaggcccatgagcaaagccttcaaaagaggtcttccttgacttgtgtctctagctcacattgccttccagcctctggcacactcctggaccccgatggtctcagagctcagggaatatgaggccttgaggtcctcaaagcttgatttttacagcatgagtcaaaggtcatctgctttcaatcactggctgtgttcattaaacaaatacgttctagaccctcccaagtccctgtacaggaggacaagagcatagcacattctgtaagccgagggtcaaggaaggcctgtagtttgtatgtatacaaagatctgagatccatgccctagtctttgacctcacatgaaaaatgactccaggtttcttctccttccctctcttccacgagacttgtttccagtagcctcctgtgaacattgacctcagaagcttctctctctgccctggtctaggctgctggctcccttgtgtctcttcccatctctctccctcaaacatctgaattaagcagccttcagaaactttcttggacaagacttttagcattttgttgtttttcctgaggttttgcttttattttttttgagagaaaaaaaaatgctaacatgaagttagctgggtagttagctaggaaggggctgggaggaattatgagaggggatcagaatagctgaaaacagattttaaaaattaggtaaaattaaaaaataactatgggaagtttttcaactatatgtgggttttcttgaacgttcaatgtcctttttaccaacaactgcatagggctgaaccttactataagtgatataaaatttgtggcttcttggcatattccttaatgatgtaaatcctaatagaatatataaaggcagagaggtcacatgtgactcacccctgttgggttttatggttttttttttcaatgtttatcacagcaggtgatcctatcattgctttgagagatgaaggttggaaggggacaagcttcatgccaatgtctcctcacagggtttggcttatatcctgtttgtttgccctctgtgcacttgaacttgagactctctgaaatggaagggaacaggaaaacttggcaacaggagcctatgtgcagtcattgctggatataaacatgaacaattgagagagaaggcgtgagagtgaagcaggctgtctagtttccagcccaaaaactatcacatgagctgtggtgttcaaggtcaagtgcacagattttccccacacagcaaaattaccaggagtttgatcagaagttctcttatgtgctgaatgtgacaggccacttccctcccataacccggttcacaaaaccaataaaaaaagttcatagctagttaacttccaggacccctttagcacacttccctgcagaggaaggcgtgtcagccccaaatgatgccatcattcctgtagagcaggttcctttttccttatcttacagagatgtaatatatggggatgtaatatatggggatgtaatatatggggagtaacagtgcctaacacgggaaaatctgcctgaaacgtctccattgcatgactgaaccaactactctaaagcaatctggatgtattgaatgcatatattttgtgatattttgcattggaccaagtatttttatataaatagtaaacaccttccttaacagttattacatgttctgagtcccttaatgctctcaggggtggctgaagtaattcagaagaatacagttgatggtatgggtcagttgaaatgaaattgaatcttctaagatatattcctcttgaaagtaaatatttatattcttccaatttagccaaatgacctaaaaagttttctgttgtaaagcataacatatgcaagtagttctccagcaaatagagaatagttgagtatatttaggctcaaagggaagaaggaaggaaattccggtatcttgggagggaagtaagtattttcatggtcaaagctgcctgcaggatgggtcagatggctgctgttattccctctgtttttaccttctttttattaataagaacagaattaagacatgaagtaaaaccattttggaaagcaattagaccagatatcccagaatctatatcttagccccacccttgtctttaaataaccatcccctgccatcagatgtgaccttttcttctctttgtcagcaaggctctcatgtcagcctcgaagtctatttctgttacctacctctgcttcaagggccttcctgattggcctgtagttgagggtgtgcaatctttctgtgcctccagagtggctgcctttgcttctgggtacaccatttacctcttaatccttttctgtctacttcccacattggtagatgctctctttccctcacacatagacaagagtgacatgggagccagcttgtttttccttatgtgtctcttttctgtgaaaccccaaacctaatttcttgtattcagaatagtaccggaagctgtacctctcatcctaggggtagtcagtttgttcttaacagctactacaaaacaagtacaagcatcagagcgacagcaaagctaaccataacaaaacagtatacccagcggctatggagcctttagagaagggaggctctgactcagcagcagtcacttacctgcaatgggcctttaagcgttaagcccacagattggtccgcccagttctctcctcttcctggggtgctgccatgtgagcactcactatcatacatgcctgccaccagttagaaccgacttgcaccagacgttccttgctataacagactaaaatcagagtcagaccaaacctccgtttccttggttgccccatgaggtgtgttggtcacaggcacaaggagcattactaacccacagaatcagaaacaaacagcatttagctgaaccttttgaccataggttgatcaatgtattatcagtcctgttctggggtggaaaccacaactctaccctcctagtaataggagccgcctaatcacttaacaagtattcagccagcatcctcttaacttgactttcttcagctcaccacgggaatggcactggggtgaaggtattgtatggctgctacattttctcatcagtatatattttccttgctagttcttatcatattgtgaagaaaacaagaaaaacattgttagggaattagtgcagagtgctatgaaattgttcagaaattggcgcagttgacaggaagtggccccgattctggctggacagtgccatttcagcaaaggagctggcataacaccgtgttcacccataaagtccttcttgtcaaagtgtcttatggaattaactcctcatgcatggatcaataaacctcaccaatttgccaatgtaattaagaggtagcagattaagcattactaattaagctcaaagtataatagaatgaagaaggttatttttgtgaattgtgctgctggagtttcatcaaggatgttgcaattcttatagaggatactccagggcaggttgggaagacagtctcctctactttgaggggaaggagcatttaaccttatgtattttaagtcattgcaagtttttataactaaagagtgaacggggcatcagctgtgaggggcgtagagtgagcccaagccagctcctgcattggaatgtagagcatagcagagttagctgtgttctagcagagcacttgggatactgagaagggtcagacaaacaacaaagtaaggcagcgctctctgacttaagctccagagatccaggccctgcaaagagatcagagaaaagtacaagccctgccctggggccacgggaaagctgaccagcgtcagagaaccccaggatgggctgcattggaccatttggcctgggcctagaaaaccagcttattattcaatattttcaggaaataataacttggttcccaattgctgctggatggtattaagtagagaggagaaaaagtttcttcccaccctctgaaggagtaacacttgcatccatgaagtatactcagagttgacagataaccaggagaaagttgaagtttattaagtacatgggaatagcccaagacaggaaagtgactacccaaggaaactcctttacccgtctcttagaggatgaacaagctactaaagagtaattactaaagagtaatgaactcttagaaaaatagagcctagcctatggtcagctgtggggctctgttcaattccagtctctattcctttgataatgtttgtattccctggttagtgagattcccagggaagcaacccatgacagttgtcttccttttggacttagtcaaataaactaaccagaagaagatggacctgcactttagagagaaagaaggaggtggacactgtggcctttaagtgtccagtctctttcttctactcaaagtctacagcatatcaaaggatcataatttgggacattatttcctaaggcccatccctggcagcttgttccctgtctatgttaattatatacccttgaacacataaccaatatctcagtatagtaatatcttatacttgaattcatgtacccaaagtatgttcaaagttgtttttcctttgatatgtatagcaatcccatgaagcaggtgttttctaggatagatgtgtaagaaccaaggccctgtgaaaatacccaatagctcatcactgaggatggggctttgatgttcattgtctgactgggagtccacttttctcatctttgtagcctagttgcctgcctaaatggcccaatccataaagtccacctattgtaaatcctaatgtcccaatctgtgaagtacaccttactaagcaccttctgtactctagatttttaaaagaaaccacaatctttgttaaatgtggttaatagaccatcaattggatagtagaaattaaaattcaataccatatgcgcataaactgtcttcagagctgggcagtgggtagggatatggaagaatgtggggatgagtttttgcagttgatctaagcatgacagagtctgccaagggtacctgtgtttccatgttctttgtctccacattacctggggccatgtgcaggagcttaacctctgctgaccttcctttcagagcagctggagatgcagtgatcgtccctctaacttccaaatctctgtggagattttctcttgacccttgagcatagcacaagataatttaggtttcgatgttaaggctttaagattatttgtaaggaaaataaataactttatgatagttatacttcccagtggcctccacctgaaggatgggatctcaatagcatgtagtggctaagaacatctcttccgcctactttaaggaaatctgtccttaagagaagttgagattgattttgtcaattttacaaggttggaactctaccaggaaaccacattctaggtcactttattttggtcatttggaactataaggatgtttcatagctcttttctatacttatccatgttctgaactctttctagcaggcattttgagcaaatgttttccaaaaacatgagtggcaagttctttgcatctgaagagattataaggtgtggtgggtctaattctgggttaagttggagatccaagatattctctctagcagaagccccctgttagacttagcctcagcatctgtgcaaatgtgtaaatgaataaaacaggtttgcattaccaaccaccaaaacatacatacatgtgcccacacagacatgagaacacatgcatgcagaagccaagccaactgggaaatagttatctgccttgaggggaatctaaaacctagctcatcataaaagcatatttttttaaaaagtacaggcaaatgtataaacagacactacagcactaatttatcaaccaagcaagtttaagtgggacaagataaaaagaaactgtaatttaaatttttttctgtatggtacttgtgtgtaagtgtgtgtgtgtgtgtgtgtgtgtgtgtgtgtgtgtgtgtgtaggaatgtattgaatttgaaagtaatttatggaaagtgctgctaccatggtatttcaaatgctccacaatttgaatttaaacgactcaatgggatcattaagattattatgcatgttttccaaagactttcaaatgacaattttaaaaaatggatgccctttaaaaaccaaagaatgttattgcacttgtatagattgatgcagcttgaagtaattgccaccgccccttctgagcaagtacctgatgatagctgttcgagagacataggtattagcgaggtgccaagctgcacacgcatctgttgataagtaaaaccggattatagagcagactttatggacaaagacttatttcatttagtaaaactgacagtataaaactgtgaaaggatagagtgttcagcatcagtgtgaattcatgccgggctcaagcccagagattgtgatagcagaggctcccagagtgaactccaaaaggaaggctccctcaaacccagtacttctggcctttgctccctttgtatgggtgggtcgccttccactgtttgcctcttacccagtgaacaacataccagggtaggagggatatttaagcatttttcaaaaggaagggtggttgtttggtttgcttttgccaataaacttattattttaatttaaaaagttgtaattctgatctttggaaatatgctcgtcctttagttgtctggattttgggttttttagacagtgtctcactgtgtagcccagcgttaggttattgtagcctaatagccacatctgccttgaacttatgtaccaaacacactgtacagcaatacagaggaacacggttgttcctttccacactgttagaattttattgactttgcaaacaacatcagtttcctaggctgcaatttacaaagcagtctcaatttcccatgatagctagcagttggcaaacacagttcttttattccgatcataattactaatattaactcccggatcacacgttacacttcctacagtaattatatgtatatcggaaggttacagaatgactactaaaaggttaaagaggctgccgagttcaaagaggtcttgatgggagcagaggtggagggctgatcctgattcagagagtcactgcaggtggttagatgagctactgaggaatccagttgaagaattattgaaggttcagagcctggcagcagtagtatcccacatgatcctgacccctctgctgctgaagaagctcagttggtcgagtgcttgctcagcactgtagtggcatgtaagcctagaatcccaggatttgggaggtggaggcagagggttaagaagttccaggttatcttcagctgtaaatgagctcaagaccaccttggcacatacatgaccctttaaagctggaagaaaaatctgataactcgtctcttcattcaagtggaatcaatctgaatacagaccctgctgcttcctattgtgtaagatgaactgatagagactaaggtccttcagatttctgcaagtatttcttcctattaagggaggctgataaaaaaaaagtggttctaattttgttaggttgtcacaaatactacatgagttcatttgtgttaagcggccagcacagtgtccccctcctgattgggcccctgtaatactgactgtcattattgactttaaccctggaaacacctatcacatcacatattttatagcaagtagattataagtatactgtgagcatttgtctcatgttgacatcctttgcttttccctcctgttccactctcctggcagtacttcaacctggatgaatgcactacttgtcttttgcttgccaaagcagctgactattgtgagagaaaaccatgcagccaggcatggtgatgtcattgtacattctgaccaacctagagctgggcctcagtccactctgcattcctactttctgctcccaagcagttcataaatctcacattcttacccagtttctatctgcctcatccctactcctttcttaagggatgcttttgcttcattcttcatagtgacgatggaaacttcaagaagaaactcccttagctactatcttagttggtgctgtgaagagacaccatgaccatggcaactcttaacaaagaaagcacttaactggggctggcttatagtttcagagtccacacaagtatatgtccacacgcaagtaagtgaacacaagcagagctggtcatatctgggcgagactgacaacttgtctcaacatattatactggctttgacactgcactaaagttaagtctttttcccagcaagataaagggcagatagccttcagctcccatgagtcagtagtagtcagactagccaacttttaattattttaaatgatatttgaatatttaaaatacaaatgtttcctttgactacagaaataagttaatatggtataaacaaaagtgaacttaaaaatcatttcctgtcttcttaccccacaggccataacatttcctgccacctctttgatgctaaatacattgaagccttttaatctttttttaaatttttttgagaagctcatacatgtgcatacatgtatgtataaatactgtatttacatttccatacctttttctgtcttttttaatcccctatgttctcttcccattctctctcaaatttatgatgttttctactcaaattattattacacacacacacacacacacacacacacactcacacgctgctgaatctatttggcgttgtgtacacacacacaccaatctgttaaaaaatggacacttcatcttccctctgggactgaacaaatcttttcccttcacagaacatgcaacctttcctattgtatcctcacctctagccaagaactcctaaaaattagaaaattctggagatcttagtctcccagtaccctatgtgatagcctcctctttgcccccatcaaaatatctaaaagtctctatttcaattgcctatttattttccaggtacccaatcagtaatgaacttcccctggggcagaaggactccaatttgttttgtattctttgggccatagttgggtcaagcctgggacgttcggcatagcaggcaagcactcacacctgagttcagtttctcagtgcttttttaccaaggggcaggaagtgagaagttctgaatgaatatgaggtctgaatgaatatgaggcaaagaactaggattgatccttcctctctctctctctctctctctctctctctctctcggattgctatgtggtaagttgttgtgtgcttgttaagtgtttccacaaccgtgctacatgaaattgcatttccgatcctcttagtcatttcctacgaatgttgccaaaattattttcagtttgcttttacattctctccatctcccccacattgtgtagactagaataaaacaatgtctaactaacactgactggtttgtgaggactggggttgattggggtaggagggagagaagggaagttaggctaagagtaattaagaatatatatgtatatatgtatatatgtatctgtatacacacacatacatacaaatgtacatgcatacacacacacacacatatgaaattcttaaggaacaaatttaataaaggattgtttaaactcccctccctttttggtatgaggctagctgctcataaagaaaacaaaactaaagaatagaagtgaatcatgatgtggggaaagtccagggactgtaagtgacgtgtgcctctagtgcctctggtgggcacaggtccacatctcaaacagcccagctgttgtagccgttagcttctcttgaggggctggctgacagaaggaaattgatgttgcttttgagggaggaacagagcagcaaatgtaaagataatcaggccttcctccaccctagtgagaaaaactgaggccgacccctaggtgatgtagctactcacttcactgctgtgcagaagcacaggtaaccagcagcctgccccgctgaggcccatgttttcctttgtggcatgtgtgtggcattcattattcaataggatattcatattcgggctctcttggaagccaccccactcctgtgcagaggcagcttttctgcctctctgtccagtcaccaagagaacctttgggaagctgcatcctcatgtgcagatcagtatggcagatactgggcacagctggaaccttcatgaactcacatgcctttacctaccagggactttatttttattcttgtcttatgtggtagatttacaaagtgtataatttcccttgcaggacaggagacagttatttctgtccttcctctcttccttccttccttccttccttccttccttccttccttccttccttccttcctttcttcttttttatggttatatttggtgctggtttctataggtattgttttgtttcttttggttctcttttgttttgttttttgagacagggtttcattatgtagcccaggcttctacataacactcaattcttttgtctctgcctggtatgcattagcactacaggtatgtaccaccatgcccagccaggagtccttttcttagctgacatccaggtggcctttcttagagatttctcatgaacctctggctgagaccatatgagtaatgggcagaagtcacaagaaaggatagcatcgttcaggaaataaaatgagcctggttttaagaagtgttttggcaacattgccttgtatcctctgctacagtacttacacatgggtgcttcgcattggtagttggcagttctcaatgtgtgttcagtgtttctgacctctggctgtattagaattaacatgggaattttcattttttaattctcgtaccgaggtctatatccttgatcaattgaaccagactttcaagtttgaggcctgacattgacagtttagcattgttttgaatcacataacaataaaatatcgtataaaaactttggggtggggaggcctaggttgattgagggtctaatttaaagtgaatgatcagcagagtttgaatgactcaggtactgtcttctgccactgtcttgctctcaatttatattttgttgggctcagtaggacaaggagggagcaaagaaaagaaagcaaccttttccgaatgcattttcatgtgctaaccaaggattttttttaagaaaaaaagccccagcacaaaggagaaaagtgacagaaattagtctatgcagtgaaggaaggactgctgcaccagaaatcagagccttaggctggtgctgatctggccatgacctttacattgaagggaactcaataaacatcaaggccaggcccagggctcagtagtttaaagtgcttgcttcacaaggctattgccctcatgcctggagcccatggtgaaggtgagagcagatgcccaaaattatcctctgaccaccatacacacatagtggtggtagtgtgtgtgtgtgtctgtgtgtgtgtgtgtgtataagcacaccaatactagttaaattaatgacaacatattacatctatatgtttttgatgttatgttatattattattgcatatttaaaaacttagtgctttaatacaatagttattttttcaataatggctccttgttggtttccacttgtggactcagggacatgaacccactttgctgccaggtctaccattgctctagagctctaaggcccacaggctacagccttagccttggacacaggaggaaagatggtggccagggtctcatcaggagctgcagctgattgccatcctggaagagtgaccccatgttccttctaccatactccatgggctgggactcaggtgataattacaagacacggttggaagtatgactaagctgagccacaaagcagggatgcttcgatgcatgtctagcctgtctttgctctctgtcaccattccagagccattcgtattggtgtggttcagtctgaaacaggaagctgtggtacctcagaacaaactgtggttgatttagctttctctaagtaaaataaacttatatattgttcctatatgtgttccttataataatctaatttgaaccagtgactaaaacatatgttcttggttcaccccagttaggtaatttaacctctaatttctctgttttgaaaattggggacaccttattttttgggaaggaaaaaatatatttacctattaacaaaactcatctaggaggctgctgtttgtaagctgtggatgttgaacagtcagtgaagcagactttcagtctggtttaggattttcatttccaataaagaacagacagaagggtcacggcactcattcctaaggaagtgatgccttactgagctgaggagtggacaggaggttagacgtctcaggcagtggaacttgctgacttgaggacctgaaagaggccactgtggtcagagaccgagagagcagcttgaagtaaggcgggttttgagatggacagaggtcttgctaaggactttgggctttctcccaaaaggcaaagactgcttagctatttcattatttcttacacactcatccattaccagcttttcctgaaaggtctttggcagcagggaagaggcggaggcagcaccatgagtaagtgaacagagaatctgctccctgagtgttgtgggttttagccacaccccgtgttccatatctctctctgtgaagcgccttactttctaaagctgaaagaaagaggagcttaaattaaagcatggctcagctaaaatacaacctaaagagtaaaccatgtttcctgctccagatgtgaacacatctgcattttctatcacatgatttaggagagacaccttgaacttggagccatccctgtctttttgtctgttaggcaatgcttattacagatgacttcctggcacttgtttccagaaagaggtccagcgtaaatccttctgaagccagcatactccacttttctgtacagtgtgagccatggtgctcccccttttataatcttttaaaaaaatatctatcctgactgagctagacctccttaatcttcattccttttcttcctgttgaaatggcaggtttcctctccaaaatttggacaagctttaaaattagatctcaaactgccagcctcacaaatctgccctgacaacaaatttgttgattgtgttttctcctcaagaaatagagtagctctgagaggcattgtgtttagctagctgtcctggaaacacagatacagctctgggctctgagccgaccaagggttgtgggcttcagtgacttggcaaagcacaacaggacagaagccggcagagcatgaagcctgtctttgtcatagtttgctagaaagccagagtcaggctcccagcatgttctttcccagactgccacatgccataggagtgagggacaattcaagtggctgtaacgtatgtaagtcagtccagtctgtctttccatgatgcctcatgtgtgactgttcctacacactaattgttgctcataaattaaaatcatagaattgtctaaacctttacatgtagaaattctgtgaattaggtttgtgtttgaccccagttgtctgaccccatgcattctgtctaatactatactgatcctggcctcctttatagtccccaagaaatcatgtttgaccttgcctttctgattctatgcctggtactgaaatatcttgttcacatttttatgcctaaatgctatatgaccaattccagcatcatcttgtctttgaaaattgattcaaagtgatcattttctgtcttgctctgtgacacaggtctcctcctcctcttcctcctcctcttcctcctccccttttccccctcctcctcctccttcctctcctatagaaaagaaagggagacattacccttgtctgaatgattcagaacagcaggcagacttccattgcaaagctgtatggctgtggcctggtaaggttctacactaagaacaggagttatggtaaggaaagctgcagcatctcattaaagagttactattccatctgactgttcacagtggtgagggatgagctgcctttcaagaggggatcccttggccaaatgattggcacattccaactgtgatgtgaggtctacacccaggctagagatgctattcatgtgaccataagtttttttttttttcataaaggagtttttgttgctacactaacattgcttttttaggagaggcgaccttaaagtcatttaagaaacatatcaagaatgaggactcctaaacatttttggcatctctaagcctctggcaaggatgagtgtatcatgaggcccaaggacacttcttggtacgggatacttgaacctgcttctagttagggtgtggttcagatcttagcacatacctttaatccatctggctggaatacaaacatacccttcgcacacacctttagtcccaaacaatgaaggtaacattagcttgtagaaggaagcactcatgtttgaattgagtggcaggaaacgtgatgaatcagagaaagatttgacagaataggatatgcccaactctccaaagagaggagggggaaaggaaagctgcttaatggagagacagacagcaccggaagaaaagcgcacagtacaggatattctagagttcatggagagcaggacaggagagttgaaccagccagctagggttcaggaagaccaagaaaggatgaatttgctcagcagtaagtctcaggaaacattctagccccagattagattgtacagaggctagaagcttccaaaactaggcctagattagctgaaggaggcagtaagctttggagacaacagttactaccggagaataaaagttacgtttacaatgtctgtcttggccaacttggacagagaacagttggttttccttgaggtctttgcagtctcctgagctggccagtttcttcctcatatccgtgtcttctcatctcctttctcctatgaagatgcatcccttaatgctattgtggaattgggatggtcactgatatggctccttccagctgaaaggggacactggctatggcagttggggttctcctcaaagggcctatcaaaaagactccaaaaataattggtaattttatttgactgttgcctgggaaaagatgtgagggagtaaagacaagaattattagcattccaaatcaagcaggtaactagaagccagaacacgggctgcttttttttttttttaatgtccaaatcaaaatatagattttctttattttaaattaatgaatttatttattctacatgtatgggaattctacatgtattctataagtctgtgtaccctatttgtgcctggtactgtgaaggacagataagggcataacatatcctaggactggagttagtaccttgtaggtgctgggtattgaacccaggtcctctggaagagcagccatggctataaattgctaagccatctctcccgattcccattctctccaacactgaactcaatagtgatgaatccagtatgtttataggaattttgaattacagtgtgaagcctttcctaagatgacatctaaagaggaagagcgtgaacaagtttctcccaataggaactagctcatggctgggacaactgaggtccttttagaaaccagcaaatatattgtgtaaagcaatgtgccaaacttccaaaccatggaggtctggtgttacctccttattctgacataggaaatgtaccaacctaatcacattcaaatagagcccttgctggactctttcatctccaccagccctttatgcttctgcatacacacacaccaaatatgaagacattggcaggagatttgggttcatgattgaatattagtttatgccatatgattgcattaactaatatggcagcaaattcatgcagtcactgccaatttggtaatgtcacagaccaagatagctcccaattcatgtggctgccctgctcctgatgggtctctaagcctctcacacggctggctatgctttaagcctttgaagggtcttcgataatttaggattggtcagtttaaacaggagacctgactagctcacaactgttgaataaacatgtcctgaaaatcctactgatagaagagaatcagctgtccaggcctgtgttttaatttaccagggttttgtgtcatgagcgtaaggaagaagccagccatctggaattttgccatctttattacctagtcatagccctcctcttgtctgtctaacttccagcccttcagtctagagtccctctgtggttgtcagacattgcatggcagctttgtcctcccatgaggtcattgttgaagctgtatgactgcagccttgtaacctactgctaccacagattttccctattgtatatacttatgtctgtgtcttatattcctcgtgtaagagcttttattaagggaagaacctagagcttgtcttatatttgtttcccagtgtccctactgtgggaaaaataatactccaaggtcagaaagcactgagctcaagttgaaatctgatggagacatttgattttggacttggacagacctgttacctcccctgtgaacttggacaaagttgtcaccttccttaaatgtcctaaattctttatcaagaatgtgggaatatctcattagtgatgacttaatgaggctatggtccagactcatgataagtatttagaaatagcattctgcatccccccaggcctctgttttccattgttagtctttcatattcacaaaatacaaaagtaataatgataattgcagtgtgccatgaatacaggcagggcttatgtgtcacattgcaccctcaaatttaaccaactggaaaacaaagtcttaggtatattgatcttttttttttccatttaacatggctgtttttccttaattttattttatgagtatttgcctgcaattatatacgtagagggggataggggtgtgtatgggcgtgtttatatcacatttgaccacaaaggccagaacagatgtttggatacccgggtactgcagttacagaccgttgtgagccaccacagaggcattagaaaccaagcccaagtcttctgcaggagcagcaaatgctcttcactactgagccatctctgcaacccctaacatggtagcttttagggaggaacttaaaattgaccctagtctctgcgatctgtattcttgataatgctccctggtgtttctccagttcaagagatgatgcagatcataaaagtctggcactctccaggagcctagggatgtctgttcgctctctcagacactggaagatctcagagctgtttcctctctgccttgctcttccttctccatcagctttatagctagctatgcctgtgagcatctcgactgctcagccctggacagaatccacttcttttatgtacatcgtaaagtgcaggataggtgtcttggagatatggcttagggagatgagagaaatggataatacatagttgctagtgtagagaagtgtgttagtgagctcccatgtcccacaagtcaacttggacaagctctcctagcctagagtagaggctgggaaggtgttgagcagaaacagcccataacatcagagagaagcgaggttgcaaactctggcaagttcccatctggattttatgctttgatttcatgaactgcctcactggtgaattttgatgttcaataccctttaatacagccatagttgatcagattccaccctcttcccttaaccgtctgattgcctacttgtgatggagaccgatttcattgccagttcagctacatgtgtgcagttgttttcttttctcctgtgtaagccaggtcttctcgattaaaaaaaaaaaatccagatttagtcagctgctttttaccaggtttccattcagactgtcatagtaaaaataaaaagagtccgattttataatatcaccttctgctttaaaaataaataagtaaaagttcccattcaaccagtcagatttttaactctcagcatctccagtaactgctaacgaaatctgcacttcatttccaacatttcactctattcttgaataaaaatgtaatcagaaagaattattgcctttttttaatacccatttaacctttatattcacagtggataccaaaaccacttaaactttcaagctctctttatggactggtatgcagatgcatttttctggagattttttttgcggttgatgaagcatgacatgcaggtccctgctcacttcccagccttaccgttgactgctttccgtcgccttgtcgcgggtctattaattattttaacagtgacttgctgttttaaggaagttctttattaatgccactaaatccttttttatggttgaaatgattcttttttccactattcgaagtatttcgtgattttagtctttgtaatgcgtaagtgtctaactgagcataaagtgctgctggctgtcctccattcttggctttcccagaagaaaggtatggaagtgtaaaccagagctctgtttgcagttttgtttgtaatgtgagcctcacttccctgcttcaggcagctttcatgtacgacagcacgtgacacagtggtgcctttttttttttttaatttccttattatataagtacttcatcttgtagtccagaatcaaattatgcaacagcatagaaaatgaacaacaaaattcttccaaaactccccctagaagaagccactgttaatagcttaagtatactccctgaattttatatgtgctataaaaccatgcatgcatgttcacataaaatacatgcagcatatgaatattattatgtagcttgtttttgcttctattccaacattgcacacttagtgtctttgtctggaaggaggtgcagtatagatctattttttgtgtcctatcaaggcattcagcaggctacatggactacaacattctcagccatttttcttctgataagaatttatgtttcagttttttacactaaaggtaaatttatttatttatttatttatttatttatttacattgcatttcaaaactttcttcatatttgatttctggcgcaggcttctgagttcaaaaagacatatgtggactttcttttcgatgcctattgtaattgcactgatgaagagacttgagtgtgaaagaacggctgattccccacactctctgtaaactggaacatctttcacttttgagactgtctgctgaaaaatttgaaagtataatctcaaagtttaatctgtattattattactattgttattattatttgtgtgtgtgtatatgagtggatgtagttgtgtgtatgtgtgaatgaatggatatagttttgtctggtgtgatgtgtgtgtgtgtgtgtgtgtgtgtgtgtgtgtgtgtgtttgaatgaatggatgtggctccatttccagggttcagtagacacttgcctctgctctttctccattttctggttgggttattcatgtccccctaaagactgctttggaagatagattagttttaccttttggtaatggtgattttgaaaccactcttcagaggtaggacttccttggagacagcctggctgataagctctcctccatatccttaaacccctttttctacagcagccactaccaaaccctgttcaaacagaatagcccattgcccccttctaattcctagtggcctttaaaattaagtttaaacaaaagtttctgagcctacaaggaaagtctgaaaaccctgcttttgaggaaagaaccctatattttgtcataaagagatctagttcctggctcctcaacttagtattagcatataggaggagcatttaaagatttaacttcgctcccgttttataacaagcactaatgtaacataaactatagtttgataagttgatatacttaaaatgcattctgtggctgataccttagtaataatgtatatttgattttgataacagcctcaatatatatttgaaactgagaagtattcatctgtctataaacaatacttgggtttatgattatgataatgattcttacacatatgcttattgtctaccattttatttgttgcatattgatatatttatttaatactttgcttgttttaggtctaatcaaaaatgttacagttctaagtagcttatttgagccaagcttttaattctgtaagttgagtgaatttttgtgagcatcgaggcagctaatactaaatagatgcccacagccatagtctcctgactcctggagcagtatattctccctttcggccaatgctgggtaattgtatgcaggtcattttacctaagcttccatttttttttttctttttcaattgcaagagtgcatctcttgatgtcctgactgggatggagaattgcagataatgacatttctggcttttgtgaatacacttagtatctttaaaaggctgagtaattatctgaatatctttagtcctttgttgttgcagtagtaaaggtaggattactttcagtagtaactgtagcaattaatgtttctattttagcatattataatattatatagaacagtgttgatattttatctgtagtcgcttgtgggcttgattttttttttgcattattatgttttaaattacatatagaaatagttctgggatagttctttcactatccatgaaataacaaaagtcacaactgcaaatggtcaaggagttgccaaatggtcaaaggttggggatgactttccaaatgctcttttccgtggtccacatcttacagaccttgtttcagcaaccacctacaaagttcctagtaccggatcaatcgttaaataagacatcattgagtgggccaaagacttatcataaaatgagtttcccaaatgagacagtagtagattgttacaaaatgaaatagagtagtaggttttcacagtgtaccacgaactccggttgcctggtaactgtcagtaggtagggtcatccagccagagctgttgatgaggctccatagatgctgcttctccgtttctcacagcagtcttcttactcttctactctgacactgtttctactgacacccctcataagctgtgattcctgaaccttgagtgcaggagttgtattgtaggtcatcagttgaggttgagagcaggagaaatagtcttctcaaaggaaaaggccctaattagttatctagttatctgataccaagtagtcaacctttatctgtgcacatgtatgtgtgtgtgtgtgtgtgtgtgtgtgtgtgtgaagctttatacacgtgagcaagttgtatttaaatatatgtgtgcattatgttttatatatgcacatgtatgtatgtatgtgtctatgtatctatgtatgtatgtatctgtgtaggtatgtaacaaaaattaaagaaatagagaccatgaatttaagagagaaggaacaggtttcatcagaagggttagaaggaggaatgggaaggaaaacaactatatattttaatttcaatatgttttaactattcatccaatagtgactccaagactttttggttgtgtagcttacatgaggttgaactttttttttctaactgtcagaatacagtgacagaaatgtagactacttaccagtctggtaatggccattgatcaacaaaattttacttgaatgctcagtaagctgccactctgattgtaggatgttatagttggacctcctcattttattcataaaagactgagtcttataaaaattataatcaaatgatacccagtgagtatctgaaaatgagagttttaatgcataatataaatatatttctatatcagcatatacttggcttagttattataaagtgagcatactctataaagagctctgaagagaagccgtccttatccatacatcagtgccttgttcatgctagtctgacctcctgtctttcttacctagaagatcagcacctagacttacaattccacatatttgtgttggcgactattgtatatgcttatttgggtcattttgggtcatatggtctttctaagacttgaagtggagtcatagtttgttttcatgtagacattttataactttagggctttgaatgttttctcatttcaagttaatctgtataaagtcaacaaggttcagtttttgtttgtttttctcatttatgaatctcaaattactccagcaccatttcatctaaattagttaatgatctgtaggtcacatgaagggtaagtgtctgtctcagcacacagtgccctgttcgtcggtcagtatatccacccatccttgaatcactacattgttttgactgtagctgtatagaaatattgaaatcaagacatatgctatgttttgctttgttcataattattttgagtgttctgattactttgcctttaattagtttgtcaatttttaacaaaactcctgctgggattttgattggaattgtattgaatgtagggataagtctaaggaggaatgaaatatttacaatgctgatttttttctatccttgaatggattatattttttcatttactttatatttactatttacttagattttcaatttgcttaatcactgttttatagttttcagcttggaaatcgtgcacatattttgtaagatttataataagggttttatgattggaaggatttgataaatagacatgaaaaaaataaattccaaagtagtcatggctactatataaaattagggttaatttttacataccaattatcctatgacattattaaatttattaattattggagcccttacttaaaaattcggtgatacttatgaaactaacaagacagaattcatttctagtagacttgtagtagaagaagtgtcagaagtggctttctaggtggaaggaatgtgacatcagattgacacttggatttacacagttccaaatggggtacttgatacagtttgggtgtaatctaagtgtgtccccaatgtttcctatgctgggattcttgctgtgcgaccttcctttccttttatggatcttctcnnnnnnnnnnnnnnnnnnnncccctccccctccccttcctttcctctccccctcttgcctccccccccctctctccacggtgccatgtttccatggatagctgtgggtctaacaaacccacaaatttctatgtgtttagatatccgaaggaaaggaatgacatgagaggagcgcatgtggctgttgaatagtctttctatgactctgcttttcttctctagcatgcctgtttggctctcataaagcaatgataagacatactctaatttgacatagtctgtgtctctgatgataatgtatgttttcttccttttctatgaaacttattacattaatcatgcctattttaatttattcttctgtagttccaacatctgtcttccttctgagtttgttttttttcccttgttatttttgtcttcttttttatgtcttataatcttcattgaaatgctgtatatagaaatgtagagacatgggcttatatatcttacaccaagaactggacatgtgtttttttctgttagacctttcacgtgctgtgattgtcgtggtctatgaggacggaccttggtttggtttgagagggagaggggctgtggttagattaacctcagtgtagtacacatcatgcatgcctcccgatcaactctaaggtggtcttgttcttgcagtagggaatgaatgctttgcctctggaaccttctcttttgcctcctgctaattagaagtggtctgtgtttgacatttctctcagctctctcccatggtacattgctattccttaatgtctgtgggtaaaggggtgtttccggtccctccttagccttgatttttcaggctcttgtttcagtgatcctgcctctgcctccccaaaagttctgggtttgctcctccctctggctgtagtgaacctcacaggtgtgttgagggcaaaaggattggctgtatctttcccatggcgtaagactcttgtgctaagtggaagacaagatagaggatctgtgtggctctgggccttccatgtaactgctgcttgccagcttcttaagatgcacacatcagagccttatcaaggctcctcctctgtcaggcttcactagattgcactgagtggggatggtgaccaggagtagaaactgaaagcctgttttgtctgtagtgtgcaggggtgctatctccttagacttgtgcaaagacagccttcagtgctgactgtcaatgttagttgactttctcattttacaaatagtatggcatttaagagacatttgccccatgtaagcaaatatatcctttctccctttagaggtattggtctttccttaaaactgtgcagccacagctctccataggatttgaataggctgtgagtttctgaattgtctggtataagttgtcctgtatagagcactgctcattcatctctctccatctgtgttggagccagtcatttccacctcagtatcatgttttagtgcattaagaatgtcagcatgccaaggcaggtggttcagaagtctaagtgtagtaagttgaggctagccagaccccatctcaaacaaacataacataacatttccattcagttgttcagagacagatgagggctggggaaatccctcgttatgttcattgtgtcctagcatgaaagcatgagagcagacccacagcacacacatggagacctgggtgtggtgtcaggcatctgtaacctcactatagtaaggaacaaagaggctcattcaccagtcattctaacctaaacgtgtgaccttcaggcatgtcttttgaaagacactcagaaaatatttctcaaagttatgatagactgaaatcattgagctgtagaagcatacttaacggcatatgtataattttttgtgtctatttggtttgcactgctaaggatcagttcaaggaccttacatatttaaagcaggtactctatattgaactatattcccagtctaagatgtattattacatgtcatgttttaaataaaatataatttatgggaaaggacatccatctcaagtggacatagaacatcttttaagctgtaccaccagagtgctatagtcacgtttctagacattagctgggagtctgttattttagtaggcacttagcaaagaaaaggtgtaagaggccgtgtctggagaagcttgaaagatagaatgcagccaccagaaactaaaacaaagaaagaagggaaagaaacaaacacacaaaagcacatcaacagtattattccatgaagactgtcgagcacagctgtttgatgaaaggtagctgggaactggaatctggaaatgtgctcttgatgcctggcccaatgctatccagctgggtaaacacctcacatttttttctctttaaacaaaaaataacagtaacaccagccacagtgaaatactacaatgtcatgtgtcttctaagtgcttcgtaaacattagggtcgtcatcatcactgttatcatctgatatcatttctgtcttagagtcatctgagggatttcatagaatgtagtccttcctcattaagaatgtaaggtggggagggctagagaaaggactgaacatgctgctcttgaagaggacccaggttcaatcccaagaagtctaatagatggctcatatcagtcagtaattccagttccaaggatctgatgtcctcttctagtctccactggtgtactgtaagtagcacacatatatacattcaactcaggcccatagtttctctttaaaagaataaaatatataaccttgcttcatagtgattactgatatttagttcttttgcccttgaacaaataactattcattaagtatcccccatgcatcttgtctggaaatttcacttcaaaataaaattcacatgccgttatataaatgaggatatgggtgatgatggagacgggaagcaggggcatcagtttctgtttccctctggcctgcagtgcagtgggcagatagcattcctcatgtgaccagagaattccagaagcaaacttctagcacagacctctaattccacaatggcagcatgggtggattttacccagtgtttaatgatgaatgtaatccaaacataaaaagatctaaatgcatgctttgaaggaatttgcaaaaatgaggaggagggccccaaaacgtcacaattccttttgtttctttcacatctgtgtttgcttttccccttctcctgtgcatattggagacttgcaaaagattagatttttcaaaccaaataaacattttctacagtcttcactgatagagtgcattagtatgatctttgtagatgtgaacattaaataatccccagtgtggcattctcccgtttattcataaataatttttaaaacttttatcacataccaaagagctaattataatttctcagctttttagaatacctaatatttataatatcagttttggactatctaataaaacttacttgttttactattattttagataggcatacaagttggtgagtctcactgttacatcttcaacaggtgtatagcatgccttggccttcttcccctcttctttctcttgctttcccctcttctctcatgatcagttcttaaatttcatctgtcatgatcaatcatattctacttctaagttatcctcccccattctttcttaagtttttccaaatgctttatccatgttatttcatatctaagaacagtttaattggaagcaacaaaagtatatagttcctgctgttctttagtgtcttggtggttcatgcctttgatcccagtacttgggaggcagaggcaggcagatctgtgagttcaagttcaacctggtctacagagaaagttcaagaccagccagttacacagtgaaactctgtatcaaataacataggtagatagatagatagatagatagatagatagatagatagatagatagatagataggagatagagaaagtactcaaataaataagaattaattagataagtatgaaccaaagatgggtctcccagtaccttagtgagatgctttctcttgtaaagttagtcccagcaaagactctcgtacatttatagcctgtagacttgtgccaatctgattcatataaatttattaactgagtttaaaattggcctttgtgggtagaggttatagcccactgatagagtactctccttacatgaagctctaggctcaactatactaccaccaaaaagaaaaaaaaaagacttttgaataagagaaattatactctataaatactctgaggtatgtaaacctccaaagagactgacaagtactttggttatgaaactagaggaatatccactttcctcaatgatgcatacctgcatgcattcctcagcaaaagcaatgcatgctttgctctatacaagagatcatgctgaagatactgcatgtgtgatatgaactgataatgtattaaatgagagcaattactaatattgtttaattgaatattttaaaagttactaggaatgagaaagctggtaaatgacaataaaattttataccaagtcgtaaatctgaaacacaaaatcttattacttatatatttattaactcatgcttagtgcatcacttcgtggataaacactatgtgtctattagtttcaagatattctctatagttattcttgggttttggctacataatagttgatgctacacaaagtcttaccatgcccttttggaatcattatacttcacagagacaaggctattgagtagttctagtacctacttgagcaaatctaggttatgtaaaagaatttgttcctagaggaattccgttggtaaaacatccatttaatgttctactcggtacattatatcataatcttaggacatatcagaaagctatctcttctcgggggggggggggagtatctggtctacctctttcatttagactatgagaaggttgccccaaaagaagcacaaatttagtatctgggaaaaacacaaaaaacagaggaaagttgaaagaaactttacgtcttcactttatctgtatttataggacactaacttaatttaaaaaagaaatgcaggagaaatagtagcccgagagaataataaaatctctctctcttttggacctttaaacttgttgcagtctattctagcatggaaaccggtctaaggctattaagctttcccattgtttggatacttgaaattccttccaaaggctcccatatgtttgtcccatgtatttctcttcaagtacattaagaggtttcttttgggtcaagtagaattagaatttccttgagttgtttcatgaactactttttcttctcttgttttgcagtgtttatccagtcttggatgagtgcaccttctgtcattctcattcacacttacacacgtgcacttaagttagcctactatataagctccgagcaagcaaataatgcacagttcatctcttgcccaccagaagaagatgagccttacattgcgttaacttatcagccttgagagatactgtattaattagatggaagcagagtctacaagattgccctactttaaatcaggtatcactgggcaagttgcttcaccctgtccaggggtgtcaggcctcttatctatataatagagattaattgtaataattaattgtaaataatattgagtgcttatgattaaatgagagaatacacatccgtcctctcagtgactcacacagaaagaatatcagcttaataatcactactgtggatagagcatctgtaaagatccagacaccaaataagtgcttacccatggggctgactgggattcagtactccaagtactgtcatttaccatctgggtaacaaagctttattatgccttttggacttaatttgaaagccatccccatcatcctatattaaagccagcttctaggccacctggataactgcctggcatagcagtaacacatttaaacaatgtaggcatgatcagatggtccagattttgtttctcctccctagagtattctggagagagagaggggaggtaagaaagagagacagagacagagagagagagagagggagagagagagagagattggagtattatagaaccagttgtatgcttaacttagactcattccctttggccactggttgaagtactgtaaggttagacttggaactgcatgagctgaaataacaggattctgatcccatataagaaaggaacattaagcacgtgggctaaaactacatgaaatatttgttgattaaaaacaattgttttatgggtttaagtgtccgctgcactgtctgctattttgcatgtgttttcaaagaagatcctgggtaaacattgtaattttccaaagcagctggtcttctcctggcattattacagggtcagtctatttccttctaatctgaccataatgccataaaatgctggctgttcccttggcaactgttcagtgtagactagctgctttctctaccttaagccaatactgggctgcaggcaggctcctgcagacagtaaggaagcagttttcctcgctgagggtgtttgtgtcaacaagtcacttgtcagattttctttctattcagagaatcggcatgcaccttttaaaaaggaaaaaaatgaaagtatatctggctcacacgtttggtttttttcgtgctttcttctcagcctgtgtaaaattgctgaccgtggttgacttttctcaagaaattaggaagtacagatgtgagagtctgcatggatacttgcctttgcttttatcctgcgttttaataccttcttgatgtattctgggaaggtttcctgttcggttctcttaatcacatttcctaaattacggtagagcttgtatctccttccatatgtacttcactcaagtccatgttcttagggaaacgtaccctgatacctattttctgcccatgttttctgaaatcatctgccatgtagactattttcttgataagtcacataaaaaaaaacaaaaaaacaaaaacaaaaccttactgtttgggagaagaagaccaagttgtttgaaataactaatttctcttcctgattgctgtaaaaatcttgtatcctggttgttttgaaaaggaagaaatccttcttaagttttgcgtacaaattattggttataagttgtcaaggggatatctggctcctacaaagggcaggcctgttttttacatagaccctatttctaggtcagtaccaataggccctcttcggtcatcccttcacgtcatggtagcttactagagtgccttcaataccagcactggcagccaaagcaggaaatctggacacgggggcagttctcctgcttccagtcagtgtccatggtgttctgcagccttatcaaacctttgtacaaactactcagcactgttagtaatcacctgacagataacctttcagagcaagacctgaatcgagccggcgcatagctttgaatgcagaatccagctccagactcctgaagggctgttaaagcacttagctctgtaggatagatgtgttcaagtgagtacatcatgccggatcctcttctgcagccgtcttaatcaagatgccaagtatcccgttcttcctgcctctgggagtgcatccttttcctgaagcatctcacaccttcttccattttacaagtacttctgctgctactgccactcccaaccccaaaacagcacccagccctgttgggattcctgtgggctgtggtaagtgagacgttttgctcgagtctgaaaagactacagtgtttctgtgtgtacagaacaaaaatggaaaaccagatcatgtgtttatcttagagctaaaattccaaaacctaatctgaagcgaaggaccatattatagtataagacagtgtccagactcactttaaaggaaggctgtgcaggagtcaccttcggacctctatttaacagttccagttcgggctttttgaagccgttttctacagtaggctgttctgtattgagcaaacatacacagatgaaaacccagcaaacagagtgatttaattcattgcttaccctgctgagtatcaaatttcctaactttcaactaatgttctttaattcctctcttttctttcttttctttgtttgtttggtttgggtttttgctttttgtcaagacagagtttctttgtgtaactctgggtatcctggaactcattcattttgtagaccaggctggcttcaaactcgcggaaatctgcctgcctctgcctctgccgctgcctctcgatgctgagatttaaggtgtgctcactgccggcctggcagcttccttcttcttatgaataataatgtgggaagcctagggagtctcttttggcagtcaagacatcttcacttgtgtctgtagcagtttcagtgactgcttttctccctttagctatttcctccctcgagcctcccagcaattgctagggtttcatagttcatgctagctggacagatattactctggagtcctggaaaaagtagaaagtaaggtgagaatcacttagttattctcttcagcaaaactgttaatgttgtttatatgacaggcagtctggaatagagtgccttgggcaaactgtttaacatgtttacaatcggcctccgggcaagtggaaggtaggcgtttccatgcacaaatgtcattgtccttgaagcacccaactccttgtgaacaatattgtgtgtcagcattcttcccaaccaaaagggccaagtctgtgttcagttcagttgacttctgaaagacaagaaaaataacttgccatgagactgttctgattctaatgcaaatttgactgatgttaatttttccttatctctaatgaatttctgtgtgtgtgtgtgtgtgtgtgtgtgtgtgtgtgtgtgtgtgtgtgtgtgtttataaaacctacgagggttttcatctctgtctctaaagaaccactttcgtagaatcccacttttaaaaagatacctgaaagcctattgtgtgcaacatctggctctctggaaatctgtcagaaggaaacttttttttaaaaaaagttgtaaaataaataaaagccgattttgaaagcatttaagtggacatagagattgcacgaggaaggcatttattcgaactgggtaattggcgacacttcctcagggaggatgggaaggtctgtggcacatgatgttagtgggaaagaggggacaaggataagaaccctagatgaagatgtgaaggcaggaagattgacacatgcgtagtcataatcccaggggcaagagggcagaggacgaatggaagagccaggtagagaccaagcagctgagcattttgagagcaaactctccagttgatcggaaagctttgagtgtgctactgcagcctgaataaaagtctgtctgcagctgctaaacagtaagcagatcaaactggcattttatcagaaaaggaagatcttgttctagtcgcagtagatgagaggtctcagaaggttgcgcattgtgatttcagctacacatgcaaatccacaagactcggagctcatttttactgttgtgcaacagggttagttttgttttgagctgagtctcccaaggaagtgtggtaatcagatttctaaatccatcacattaagccctgtcagcagtgaatcattgcctatgtgttaaaggtcaaaaaatttccctttagaaattcattatggtggtgactggaatgtaaatttgaatgttcatgtgtagtgggtgtgaattcaacagataaaaggccagaggagacacagaaaagtccatgttgttattattttaggtcagatatttacaaattgtactttaaaagttatgactgcaaaaacaaagagtgcgtatctttctgtcttgtttgggcaaggctgtgtgctggctagtaagaggaggagccggtgtgctcacactcccagtgtgaactattacactattgttcacatttgcttttcctcactaatgtgcccacccaccttagcagatccccagctcaatttcctggaattgtcctatcagaaagtcctgacttcaggactggatccatgtgtgctgcgtgtgtgctaccattgagttgaagactagtttttattttcagtattcttgaaggtttatcatcattgtcatcactattattgctactactgctactattactattattactatcatcatcatcattattattggtaagtttaactttccgtggagtgaacctagaccactaagctgaactcactctaaatgtttcagagaattaaaatacaacacttctctataaatttttaagaaaaatctaagtttctgtttaaaaacaatcaaaaagtgaatgcagtgtctttacaggttgtgatgcattcaggagtagttacgagacaagtagagtgattgcattaccttccatgaagctcttggggaaaaattgtctatgtgcatgagtgttgtgtctgtgcatgtgtctatacaccacctgagtgctttgtggacatagagtctagaagagggggttagattcacaggactggagttacagacagttgtgagcctccatgtggatgctgggatttgaacctgagtcctctagtgtgcttttaacccctgacccttctctccagccttctttctgtgtagctcttactaatatttccactgcaccaatattgtttcccacgctgctagactttagttctgagcttcttgaacatgctctgagttccaggccatttccatcctcctggccagcacgatgatgctcacgtctagatttggccattttcagagctgacgcacaggcactatgtcaagcctgttaggacagttttctctaaagctctctgggtgatcctgacactacaacatagtgtttccagtggtttccattgtgattttcatatttttacagacattcaattctggactgcatttcaagtcacgtgtaatctcacatgtactttgaatcataaacatttaaatataaataaccaactcatccctttccgttttcaaaaagatttgtgtcagtgtgtgtatgagtgtgtgtgtgtgtgtgtgtgtgtgtgtgtgtgtgtgtgccacatttggatgggtgcccttggaggccagaagaggatgttaagttccttggagttggaggtggcaatgatccacgtaacatgggtgttaggaactaaattaatgtcctctggaagagtagcaagtgctctgaccactgactttctctccagccctatctttctgatttttaaaatgaaattgcagtcatatattcacatatacaaaatatatttgtttatatattatataatatatattctcatatattagacatgtttatagatttgtatataatgtattttactcctaaagatattttccaatatgttattagatgtgtcctttcaaaatctggattttaatagtagtgtaacatttcttctcatgatagcactattatctaacctatgcttgatccctacatattaaggttataaaaccactcttgggcaactttgggggcaataatctaggtcttaccttgagaatattgtagtttattagtttctctgggggttgaatgttgctcacacaaggaagtgagtggtccttagagtgttgcttatgcctggtaccccatttctcctgactcatgaggaaatggctcttttctctgttcctaaaccctcagtgcgtcaaaaagcactgcaggatgacaacaagctcacaaacatgtcctggaaatgaccattccatttctgcttctgagagaggaagagcacacagccatgaaatgttaacagggacttcgcggggtagagaaatattggagctgatatatgaactgatatatgaacaatcttttctcacatataaaaagtagaagccccctccttagaattgggaacaaaacacccatggaaggagttacagagacaaagtttggagctgagacgaaaggatggaccatgtagagactgccatatccagggatccatcccataatcagcttccaaacgctgacaccattgcatacactagcaagatgttatcgaaaggacccagatgtagctgtctcttgtgagactatgccggggcctagcaaacacagaagtgaatgctcacagtcagctattggatggattacagggctcccaatggaggagctagagaaagtacccaaggagctaaagggatctgcaaccctataggtggaacaacattatgaactaaccagtaccccggagctcttgactctagctgcatatgtatcaaaagatggcctagtcggccatcactggaaagagaggcccattggacacgcaaactgtatatgccccagtacaggggaacgccagggccaaaaaaaaatgggaatgggtgggtagggaagtgggggggagggtatgggggacttttgggatagcattggaaatgtaattgaggaaaatatgtaataaattttaaaaaaaaagtagaagctgtctgcttggccccatgaaataaataatcttgcttatcacagagatctgagacaatctctgaaagaagaggatagggagtgttgaggacaagcagaaagctgggagctctaagacccccatggggattatgttccctaataggatgattctcctagatatttacaacatgcttggaaggtaagttagttactacaggatgccaaagatcatcatttactaaagttataagattatttggggcctgcaagctaagaattccagtccatgaattgagcccattgtttttggtctagtggaaaaggcccacccaaacatgtcatggtgggctgacatgactacaataagatgctcaagaaaatcactaaagttagttagagcctgcaagcttgattccagtccatgatgagttaacgccaaagcttttgatcttgtagggaaggcccattgtaacgtgtcacgatgagatgatgtactgaaaccaaccattcactttatgaagcaaaagagggtgaaatgtgagtggggtcccatagtccacttcctgaaaagatcctctgttacctatagactgatgctaaagttccaccacctcctcagagtgcaccataggatcaagacttacatataagccagtttttaagatttttatgtgtatgcaggagtgctcacatatatgtatgtatatatgtatgcatgcatgcatgtatgtgcaccatgtgcagtccagtgtctggggagtggggggagggcgcagagaagaaggcatctggatctcctagaacttaagttacagggaattaggagtttctacatgggttctgggaacaaaaccccatgtattctgcaagaacacacagtgctcttgagcactgaacaatgttcaacctctatttcttgagtttttcaagggatgtttaaaactgaaaccatagtagaaagtatgacagaaatgatcatctctgtatgattctggggcaatgtgattatgttctccactcttttgggtacttctgtgctcatttgccacagccttataaacatttatttctcctctcatacctttattagcttgaatgcattgatttttttaagtctatactcacagggcagaacttgtcactgtgcctaggacacagtgggcacttggtagatgtttgttgaatgaaagaaacatcccagctttcccgtctggtgatctgtcttatgatataacttccaggaatgcattgtgtctaaaattgggtaccatatgtacaggaaattctttctatgtcagcatgaaatccctcccaagtaagtcccttcatacgttgctgttgattgttatatttttttatatagaaaatatactacatggttggccatgtagtaagttggctgtttggagaggggcccatcccttgccggtagatggacataggctagatggcatggctttgcaccttataaagatttggttacttctttgcaagagtcttgtttagaatcccagccaacctgtgagccatagacaaccaagccaggatgacagtcaaggtcattggacatagagagtgagacttgccatctctcctggaagatgaagataaaaataaatggcctcaggatcaatgagaaactttcccctagtgtccaagagggcattaccaagtgtgctgagcaggccttcgtcttcgtgtcttcctaatgcagtatatatatgggagactcacatggccgcactgtgatttagctcgctccttcaaccatgaagtcccttgtgctgcagtgcagatctttgttttgggtagggttcagccagggatattaaacaaaatagtatttggatggaaacttggcgtcccaatttggaaacatttttttattgggtacagtttggggggttggtaagaaaaaacaaacacaacaactatgttgtaaatgttaataaaaagaacaagtaaagcaaattaaaatgttttgtgttgctgaggcctttttgccttcccatgactttaaaatacttgtatgcttttatgataatctataactgctttagtataaaaggcaaagaacaagtgaagttaaagaaaccccaaggggcatgatgtagaattgtagtagccgcttactaaagactgggttgggtattttttgtgtttttgttttgtttttagaatgacttttatgagtccagaaattgtactattaataattgctagcatgggattctaaattatgttttcaaactgccagtactgctattcattaagcctaaaactttgcagccctacccagtgtgtgtctgtgtgatctctggcagactcttttgctgttgccaagttctaagtgattagacttgtcaggatgctgtaattggaaggcatggtcataatctgactcaggggtctctttgtgtcccactgtcatctcagaaatgtgaatgtgatggaagtagtcagatcaggaaggccgtatggtgattctgagtagcgactgggtgatttaagcagtgaggtttcccatgtagaacccatgctctctaaaaatgcattcatctgcttggtaatgggtttaaatgtgatgactactgatagattttggaatgggccatcctgtgtaatgctcactggtgacattgtagtttatggtttatttaactgtaagataaataaaagcaaataaaattttaaattaagctcttttgctatatttcatattgtgcataataacttgttgctggttgatgccatggtgaaaattgctaaagaagagccccatcataggtgagaactgaactcaaattggtactgacctggagtaccaaagtcttccagtggcctaggattgcagtttagatagcatttccttgagctaggcagtgaacttctggatatactgcatcctcaaagatttctggcttcccttgagacatgtgcaatactgtggacctggcatgcaggaaggggggcctattttctgctgaatggcataccagttgcatcaccacagatgtggaattagtgaacatgctttttctgaatttcattaaaattatttttaagtgccatatgtccaatgtcatctttgacacatttatatgttctcctctaagttccaaagagaaacctcacatctctctcataaattaagttgtagaaggcaaaggtgatgatgacatactatgctttagaagcctaacgtaggatggaatagcggtgttgggaatggggagagaaggaacatgtaagaatcctgatgctattatggattggcagaaattcatcttgcatggccaggaacatctgcatcccaagcagaagatattcctgatttctgcgtgtggcttgcttcccatcagtctggtgcatgtcttgcctgggaatatcatgttggctttaatgtcatgacacactcatacataaggactgttcacacggcctttggagtctgtttttcagcccttaacagatgcagaagcccaagtctttctcttggagcctgggcatgtatatgcacacatgaatgcatccttacactttctgatcacatgtgtgtggaaggacttttttcttgatgcatggcagtattttctggggtttgtgtctttgtttttccaacatagaaaggtacttgcaaattgcagttttaccataaactagttgagtggccttggcattactttttagtactcatacctaaaacaagaacagtaaccattcttataacagacttggaatgtggataaagttagcattctggtatgtgtggatataaacatttacatatgcatatatgccagtgagcatatgtgtatatatttatatatgagaacaaatgactgcataagggtccatatacacatatatatcacgttgaacggtttctggcatatcataggtgttattgaagtattaacttagctgtagctggccactgatatgagcacatagtcaaatatggtggtgattgttattattagttccttagctactgatgagatactttatgtgcttgggggcgaatatctgtaacaaagactagtggggctaaggcagtaggctgaacctgttgtggactccatgctagtccagatgcccactacatctttatgagcaaaggcgtccgaactttactatgctttgtcccagacttacatacagacttactgcccagctgaatgtgatggcaaggtgtcttcattagagtcatgcgtcctgactctgggcaatatgagccctttgggttgagtcttccccctgcaagtcggccaccaaccctggagttagatgtatccttcacaacgaggtaccatcaacacttggtgtttcacaggacttctactgtgctgtggaagctttcttcgccaacaatactcttcttaataatcagacaacagacccactccaacttagtagtttttcttcttgccaggtccttataaaggcccttgggtgtctctgttcctgcctttactcaggctcagagatgtcctgttcccatgctattgatgttgacagaagcagggcacatttttcttccacgtgctgctgatctctcagacagaatgtacaagatgttttctcgttgccaaggatacctggtgacataatcctacctagcctttcttttcctctttccaccccctcagctcccctctcaccctctcctcccctgggtctttatgtgctgctctatggagcgtacagcttgtcctctatagactcccatttattttgtctcaggagcagctgccagtggattgactggagaaaacactccactccagacactcccagatgctgccgtagacaggccacctccagagagagcatgcctctcacgctttcttaaacaccgaaggtcttttgggtctttgtttagttttgtattttacactatgacaatgaatccagtttaaattttctgaagatgagggcagataaattattcgatgctgtatagacaccctgccaccgtcaagttcaaggactcttgggtatgaatagaatacccaattttgatagggtagaatttgaataggcaaaagagtgtagacaaagaagaatggggcttagtgtataatgcaaaaatgctcttatctaagaaggcctgtctagagagcttagattggcacaccaggctcactctggtccagcttctgcttgctccagctcccttccttcatgtccgcagtaggttttcattgcactgtctttgactgtaattgctcatcagcaccattaactccagcaannnnnnnnnnnnnnnnnnnnnnnnnnnnnnnnnnnnnnnnnnnnnnnnnnnnnnnnnnnnnnnnnnnnnnnnnnnnnnnnnnnnnnnnnnnnnnnnnnnnnnnnnnnnnnnnnnnnnnnnnnnnnnnnnnnnnnnnnnnnnnnnnnnnnnnnnnnnnnnnnnnnnnnnnnnnnnnnnnnnnnnnnnnnnnnnnnnnnnacccattcccactttttggccctggcgttcccctgtactggggcatataaagtttgcaagtccaatgggcctctctttccagtgatggccgactaggccatcttttgatacatatgcagctagagtcaagagctccagggtactggttagttcatattgttgttgcacctacagggttgcagatctctttagctccttggatactttctctagctcctccattgggggccctgtgatccatacaatagctgactgtgagcatccacttctgtgtttgctaggccccggcctagtctcaaaagagacagctatatcagggtcctttcagcaaacgcttgctagtgtatgtaatggtgtcatcgtttggaggctaattatgggatatggcagtctctagatggtccatccttttgacacagctccaaactttgtctctgtaactccttccatgggtgattgtttccaattctaagaaggggcaaagtgtccacactttggtcttcgttcttcttcagtttcatgtgttttgcaaattgtatcttatatctcgggtatacttataaccaacttaagtagctctctctcgattaccccagctgaaagtaaatcttctgttgacttcctctccactctctttacttcctacgtcactgtcagtcatgttctgtctcacctgatattctctgtgtagttgatgatgtcttagatctaatactagctgtcagaattctgtcgtaacgttaaggtgttatgtcttctgctccgcccctttatggtcagacatagagttcctcacacactacacctgtgcaaagaatgcttcctgaaaaaagggacagaaccacatggcagaaagcaagtactgatgaagacagattccttggctggggctaatgaaaagagtctgattatctaggagatttgaatagtttttaacagattcaaatattaaacaaattacatatcacccccataactaaaccgtctgtgtgttttaagaaagagtcagatatgatggtgctggaccctatcatgagtggctaagatgtgcaccccagagccaccatcagcctagcatgttgttttgaaataagatcacaatcctgtgacatttacataccactgcccagacgcattccagggggcaatctcccactgcacggtacttgacactatagatttatttttttgctaatgtaaatagttcagactagataatattgagagaagcatggtaatttatttcatgtgacgactgtacagaagaacagaagctgagcaggcagaggaatcctactcagttcagatctttgagaaagaactgaagggatggatttttggctggcaagccattaacagtgtaaaaggaagggcagaattaatgctggccgggagtgtgtgaaacccgagaaacgtgaaggaggaaccctgcgctcagcatgggggataggtataagcccagcagtggcagagtaggagattcctcctcttcgctatttagcagccctgtgagtgaattcagagcttgctttgctgtgttccaggctgggtgcctgctggaatgtggactgtaaatctctcagcatctttttcactgacctgcaaacaaccttttctcccatctgctgcctgcacacctgcctcccagtctttgtctgcagagctttctctatccccctgcctctgtctgcctgtccctacctcacctaggccctcttctgagtgtttccatctgacttacttcaaaagaactgaaaacagagagtcaaagaagaggaatcctgtgctcagcctaggagacaggtataagcccagtagtggtagagtaagggacacttccttctgctctgggcacagtctatttagcaatatccatctgactccaggcttctctgaccagatgaagtaacctcaacccttatttttctactctgcaactattacccacacctgctatgtttctgtttcaactatactcgttgagaaaatgtagtaaaaagtagcaaatattcccaactctgtacttacactgtagtaaggtaaaaataatcagtgtgatgtatatagaatattggaagttagtattgatccaggaggaaatgggggtgatatgggaaaatgtgcttggagtctctgctgaaatggaaatcccagcactaccctttccagttgtgtgcgatccgggaggctaactcacttgccctggtctctttcatttctaggtcacgaatcctaagggacattgatgtcttcttgagttgtacagagtagatgacgtgagatcttgttccataaagaatttgatcctatgagcatttaatgattgtttttattaacatgttaaactacatctaagacacacattatatgtatttatttctgtgtctgtacgaatacatctaatcttgtagttttccttgtttcttgtggaaatttctatgagtttatgtatgcctctttctccttgcagactgtggcctatagaaggcagagccgctttgcatttggtcctgtgccctccccagtgcctgcacacaggagacactgggacatttctgttctgggcacagtaatctcgtatgcctggcagtttttagagccttcctctgagctcttgtgccacctccgggcagagctacgttgtctttcccctttctctctgcattctagtcagcatgactatcaagtctgagagaatgaccagcgggttctgtgactcgccttcccctctgacccttcatggaagctctttggatcactgcagctccactttgttcctagaactgtgttctctgcttcaggtcatcttaaccatctgtgaccctctcccactctgtgcacgccctttcccctagccgctgtatccttctatgggaacactgactaattgaagcccagcattacactctctcctttgagcctccgtgtcagttacaaacttcacttataattagatgcctttggctgtcatggaaagctcagagaggtgaagtgagaagtccaagcatatgtagctgaaaaggggagcgtctcgcctgctccaagttccctaaggtggtaggtagcgtggctggaaaatgttggtgcacagagttgaataaccagaattctctacccagctgtgctgtaaactcgacatttgaccttagaggggtccttaaagcctcagcccccacatctgtaaaataaagaagctctcgccctcctcattcaccacgatagtttcatgacccaaaaacaggttaaagaatttcagaaactctaagccatgtgtcaaatgatggggtatgagtaagacccatgacagtataatagtggatagctctctcttgggggatagacatagattttttttttctgcttccacacatgctgcaaaagcaagacctctttaggatttttacatctgaataatgatttacattgattgcagataatctggaatagagctcattttcatttaaacttactagtttagaagtatgcatgtttatagtgtctgacatcaaatattattttaaatagtcccttccaaaatgtatactagggagatagagaagaaggctttcttttttttttcttttttcttttctttttttttttctttctttttttttagcaattttcagtataccgagtcagccccagagatctctgtatccacttacacaagtcaggtacgttaaagggtgccctgtaaactcaccctgtcatatgatagagagcttggtattgtgggtcaagagcaccatgtactccaggaacctagtcacatttgatggatttcttgaattattgctgaactagatgttcttctacaaattagctatactttggtaatagttaattcgacttacagatcttacaggacagaaataatgatccatgagcatagactgagatttctctactatctttctgttaagttcctgagaaagcataagaatttacccagagatggcactaggccaggtcttcacctaagttgtcaagcatggaatgaggggcataaagggtctatccccacatactctttatgggaccagtggcctgcagagactcatagtatatcaactgtatatgaggactaattcaaggagcagtgcttgaaatattaagcagatgagaggaatctatactaaaagttgtgccaaacactgctagagattctgaaatcctttagcctggaggccagggcttaccacagttccctctgtcaggattgaaactgacagtacataagtgtatcctctttctctgtcatctgtcaggggcacactttccatgtagggaatcccacagaaaacaatctattggcctggcctcctaacacttctttgtgttacactgtgtagattggattgtgacccaggccaactattactggccttttcttgaactaaattcgaaattataatattctagatatgattcacccaaggtcagacagtaagtttacataagaactgatgccctccaattccctctgtgatgagttagtaatgcctccctctcttgcataacatataaagctacatatttcttcatacagatcataagatggctactggggaccttgagggctaataagcattcaccatctgtatatgtactgctaaatatgcatttaaaccaagaggggtctcacaaagatggcacctaatatatgtctcctagatttttggtgaggttccagtaagtgaataggaatagtgtttattctgagagactgaaaaagcaagttgaaaggaccttgttctacaagctttctatatcaattgttgtagaggacaggctctaagatggtagttctcagccttcctaatgctgtgaccctttaataaagttcctcatgatgtggtgaccccaaccttaaaattattttcaatggtacttcaaaactgcagttttcctgcagttatgtagtaatgcaaatatgtgttttctgatgctcttagatgatccctctgaatgggtcattggaaccccaaaggggttgtggcccacaggctaagaaccaatgccctaaggcaattgcagtgatctgtccttgtgggtgacttgactttattatagctgttctctgtgagtgccaggtagacctgaatttgcttccaatgcccagaacatgaatgtgtagagatgtaacttaatcatgagcacattacattatattaggatccatctcagtagactgaagagagagaaactcaccaggcaagatgagttggctctggaaccaaagatgggcctttggttgttagccagcaaaaagtcttggctccgaattgtatacctgttgggtaatacattgtgctaatagtctaaatatcttaagaatgtatctcaaagacccaaagaagcccctagaagctgtaagataacagatttacattatctaaatccagtgagatggttaggcaggtatcaaaagctgcggttgattcattctaaataaagtctgttctgaacagcctgtgatctgataaagtacttcctttatagcttcctgtgtacagtatgggtagtttttaaggttctacagaaccacctccattggcaaggagctaccacaggacattcatttctgtgttaaacaggtctgcatgttgtccagaactgctatgttgaagatagtgcattcctcaaaggcagtgtgtgatttacccatgattgacagatagactggtgaagggcacctcatcctttgtctctggactgttgcaagtgcttttctaacagagctgggctgcctcttggaaagcggactgaagaaaaaggcaagtaacaggtcgatagcactagatctcacaccccaagtttactattgccagcagtataaacgttcatctgtttaactaagctaatgagccctgttttatgtactttcctcgtggaattatgctcatcaagtgagatagcatccatgagcatgtttgttggctgtgaatcaacaaatgattgcaaattattattattaaaataatagccatttgtcagtaaatatttgttgaaactggtccacttcgatggaggcagcctctccagggacctgctgactgaaggcagggagggaagcacccccagctggagttgcatcagtagctcagggttcccagtggaacctgcaggacttgcttcaggaatttgttttttgttttgtttggtaggaacaagaagcccctggagccagttatgttgtcatcaaacttagttggtaattaggctccaaagcaaacctgtgggaagagacaaaagttgaaacatgaattcctctttgcaggtggagggttggatcctagaggcagtgtacacagcttggctatttttatgcttctgcctgcaagaaggttcaagagaatctgagaaaagcaattagcgtccctctgtctgcaggcaaaacccgtttgaacatgtttctatgctcttgaagggctgctagagccttggcagataactgaggaaagattccattgagcaaaatgtcttcacttacaaatccagccactttgcactccacatgagcccccagtttcttttctttttctttttcttttttttttttttttttttttttggtcttttctgtaatcataacccatagagaattaaatgaattcccaggagcacaagaagatgcagggtgagagtataacgaacctgttcaaggatatccctgctctctaacccttttaattagactgctcgtatgtttagattctccttacttgaaagagacaagtgtgttttttaaaatgtgtctttcaaggactatttcccatcagtgctaaatgtttccctgttgtactgaagatttgttttgcttcctttgggatgaaacaatacaagtcttattggtgaaggcaagatgttgtacaaacttacatgaaatttttttcatagccatccatccagtggttcctgtagccccaagtatttgatcccctataaaagttccctacacccagtgtggttcttggcattctgtgcacagggcctattctgttgtcagtatgattcatgttttagtaatagtaaatggtagcaacagataatacgataattatatcatcattaaacctaggttttatccaaggtttctagtggtcatttgcttgtctcagggaaagagaggcttctctagttactgactcccaaagcgagtgactgtgcttgggttccatttcccataagtcagatacaacagcctagttcttgtcatggctgtcagtaagaggatttgtgtaatcagtagaactctgtgccaatagctcccaagtcacagatgaatgggcaccacagttcatagagtatgacagattcacttatccttcccagtttgcagatgaggcaactgagccccgggagacatgtcgaaccaagtatcctaggaagagtttctggcaaggctaatccccacctacttctgagtattttctgtgcttccttctctcatctgaaaacagatatacaggttaacaatttatatactgaaactatcccaaaggaggcagagcgaatccagcactagctatggtagctcacgaggtcatagctagtgaggaaccagcgtaggatgtaccctgcccgtggtagcagaggtacccccaaaagacgctctgttaacataaggaaagtctcaccaagatgtcagtggaaaaaggacaggcaacatggctgcaggaaggtacccatcagtcagacgacttttaatattccagcaccagccttctgccccatctttatagcaaagaaggcacgcctttctaatggcctcatgcacacatcttatttctgtgtaattctttttgcttttgataaagagtccacaactgtttttgatataaacatttgtctaccaagatttataagtgctttcaggcaacactgccttttatttcacaagaattccataaaattccttctgtcaggtcgagttagcttttgcaaaacttcaggaaatgtttgttttaattttccttgagaaaagcgtagagggagacgtgtgcactggcagctgccgtttggatttccctttgtgtgagctttggcttctttacctcttgagcttttgtctttgatgttgctctttaggcataaaatgaaagattattatctttagtctataggcttggaggagggcgatgatgaaacattcctgggtattcatatttctacaacaacaattgatgtggtcttaaagctgtcatgcttgccctagtcttatataataagcatttgatgtgccatgagctttcaatcttgtcacccttccaacactgtatggctatcccatgcattgttttagtgtgagcaacccagcaggggctgcataggcaacccctagctgcactgtgcccctgcagggtgaatcattacactctacacacataggggctacatgcacgaatgagtgtataggtgaatcttctggtttgactccataagtaccttagtcctagaaaaggcatcacctagtgattggcacccacttaactgccttttggtattctgcaaatgttgctttgatatattcagcagaacccaaatgaacagaaattaatttgtctgtaattacagagtaataatttttattatcttcacacaaatagcattgagtccatgattggtctgtttgtagatttcatggccctgcttggtcactatctaaatcctataattgaaatcctatgcaaactccacattgcagacacacggctttgggagaaaagaagccaagcaaagctgaataaggaaaaacaaagagatcattgcctaagaatcaagaaaaggaagcagggtgtaacaaaccaaagggatagtagcagtatatccttttagctttggcagttagggatcgtagcagtacatccttttagctttggcagtttgggagagctgaatgctcgctccctgtctggtggagagggtgatggaacagcttagctacacagattgttctatgcaaatcctcatgtgcaggctgcttttattaaaagtactatctctaatagcctgagccaagtcttgtttggtcaggtagctttcaaatgatggccagtatttttttttttttttttttttttagcaaacgaagtttgtgaaacacttttatattgtcttacagagatcttagtcatctagcacaattattagtaccaaagagcttgttttagcaagttctgacctattcctgcctcctcttccaaaatactctagaaacaacattggttccagaaaatgacagcctgacacagaagcaggtccttccatactgcgggttctcatcccccattcgaaaattagaaatctaatctcttctcagatgctggaagttgaagtcagaatacggagtgacagttttcagtagcaaaaacacttttgtcttttagctggtgaaaattgtcaagggacattttcctttagcttaaaattctctgggaaagatagcctaactgtgcctaccagtagcaaaaggcatggcaactgcactgagccccctttgaattccaacctagccagtagtctggaatataaataagaaaatgtttttattgttgctttaataggatcgtatctaaatatctaaaggctcactacaagcatcacttgtcactttgggctacatttccaagcatacatctctcttatagtgtcaacaaggataactgatgtttgttctgtgctgtgagcccccaaggctccgacaaaacatcgtgcacttcactctgaggcaagcataaatgcagcaatcatcgtgaggctgagtagtacatctgctaaggggttatttagtcaagtaaacagcaagttgacttgggggaggacatagaccgcagaccagggaggactgagccagacagaacagcacagacctcggctgcaaggcacccctcattacttcatcttctgaacctcccctgtaccatctataaatcatgaattaaaaactgcagcttttcatataaaatggtgttattcccgtctcaaaatattcagacagatttatcaccagagagaagaggttaggctcactgaacttttgatcccctgcctcagccttctgagttgctgaccttacaaacgtgtgctaccacatttatcagaggaatttttcagtggcctctagcccctgtttcccaggtttcctcctttagccagatgttggtgaagaagcagtaatgtgttcaaatgttctatgaactccttgtatgttcaggagggattctgtatcagttgggactcactggaacttgtgtggtctggattgtcacttctgatttagaggaacaaatcataaaaaaacaatgcaaaggaagccatattggccaggactgggctgtgtgtgaagcccgccctcggaacagtggatcttgtgcacttgtagcaggtaggacctgagcttgccccatttcacccaactctcttggcctcacaaaagagacattataaccctgtcacttttactggtgaggagaataccaatgaggtggtttgtctgtgccatgacagtccacggggcagttctggtctcccaccctaccctacagtgaagcagttgctcctttattgtgctctggtctcccagctaagctcaggcctcctctgtactcaggatggagggatgtgatgtaagggctatccctgtcacttgggaagccactgcttgtttgggacttgttttgattcctctgtgtggctgtctgagtggccaggatgtctctggcaggagagttctaagagtgtcagggctgtgggtacactataggcacttcacagaccagcctgtatctatagattataactttgcaaagttccttaagaaaccaacctctgaaaccaggacactcccaccttcagtgttttagtgacagtgtgaggggatgggcaaaggggctgaatgtaagcatctgaccccgtggcgcagtgtgggtagtaagaagtcatctggaagtgtagacaaccataccccatgcatgtctcctgattcgtatactgctctttgtgagtcagctttctcagctactgcgtggaagcagggagctacctgaatgactgtgtatgacctcactttttcaaaggttcttatgaataggaattaaagtgaccccctttttagagcaaagttttcatgtgtctgcatttacagtattgacccctttttagatagtccagaggtctttttttttcttttatttttagggaggcgggtgttcccagatatattataacccatatattataatgaaaggttagtccagaggtcttagctaggcctgggtcatgtgtgctctagggggctttttccctgggcttatttattttgaatatacttacttcttctttttttttttttttttttttatttatttattatatgtaagtacactgtagctgtcttcagacactccagaagagggcgtcagatcttgttacagatggttgtgagccaccatgtggttgctgggatttgaactccagacctttggaagagcagtcgggtgctcttacccactgagccatctcaccagcccatacttacttcttctaatttgtatattcgtgttatacttatcaatggtaccaactttagtgttgcttcctagtccttcttacagtgttttcatttttattaaggcatgatttacgcgcaagcaaatacttaggttagaaaccctgagattccatttcacaccagtcagaatggctaggatcaaaaattcaggtgatagcagatgctgtcgaggatgtggagaaagaggaacactcctccactgttggtgggattgcaagcttgtacaaccactctggaaatcagtctggcggttcctcagaaaactgaacatagtactaccagtagatccagcaatacctctcctgggcatatacccagaagatgttccaactggtaataaggacacatgctctactatgctcatagcagccctatttataatagccagaagctggaaagaacccagatgtccctcaacagaggaatggatacagaaaatgtggtacatttacacaatggagtactactcagctattaaaaacaatgaatttatgaaattattgggcaaatggatgtatctagaggatatctcctgagcaaggtaacccattcacaaaagtcacttgatatgcactcactgataagtagatattagcccagaaacctaaaatacccaagatacaacatccaaaacacaagaaaatcaagaaggaagacaacgtgtggatacttcattccttcctagaataaggaataaaatatccatggaaggaactgcagagacaaagtttagagctaagatgaaaggatggaccatccagagactgtcccacccgggagtcccataatcagccaccaaatgcagacactcttgcatacgtcagcaaaatcttgctgacaggaccctgatagagctgtctcctgtgaggctttgccagtgtctgacaaataagaagtggatgcttacagtcatctataggatggaacacagggccccaatggaggagctagagaaagtacccaaggagctgaaggggtctgcacccctataggtggaacaacaatatgaactaaccagtatcccccagagcttgtgtcgtgtctctagctgcatatgtatcagaagatggccgcctaggtcatcactgggaagaggccccttaatctagcaaactttatatgccgcaatacaggagaaagccagggccaagaagtgggagtgagtgggtaggggagcagggcgggggagggggggataggggacttttgggatagcatttgaaatgtaaatgaagaaaatatctaacaaaaaacaaaaattttaaaaaattgaaaaagaaaaagaaaaaaaggaatgctaagtttgatgagaatgggctgctgtatgtatcactccagaaaactccctcaggtcctttccaaagccagccccacctgttacccggaagcaactgatttccagcctcttgcgctctgtttctttacttgcagtaagtctcggtctctttctgtgtcccttcccgtcccccctccctggaatctgccttttctcattcagcgtgcagtttctgagactcattcattcctgtagctgtatcagccatctgcttctttttgttgtctagtcttccatgaatatgccaaattccacactctgctataattagcttctccattcttctctactttttttccatttttgttatatcgtaaatttgcctaagggaaaatcatgggaactcgagtactgaatatgtggcataaatgtatcttatctcagtaacaagggcccaagggaccccagcattaaacacagctcattgtctcctgcagttgtgttgcttcactggtgttatggaaaggtaggtagagcaaggcccagcagccaagagtcttgctctgacttggcagggtaactgcctacctgtcgctagctcttttgctgtgtctgcaaacttacctggctggactgggccgccctccaggattttcacctctggcatccagttgtgctctaataaaatccctccttgactaggaatatttcatctttcatagttgctctgtagtccatcttctgcatcaaaatggtaaattagcccagttattatcttattgaacacaacatctctgatcccatttcctttaccatatgccagacttattttctctgctcaaagtccgttggatatttctgaagaacatgctgcaaagaaaacgtaagaagtgtgagttcctaagttttcatcttctcaagcccttaggctactgtccattggaaaagccattggtgggcaggacacttcactgtatttctgcccctacttcagaattacatgtgcagtccattcttcctgcctcactcccttactgcgctgctgctttagctggtacttcaggtcattttctttcctgctagttcactataggatttgtataatctggatctaggtaccaagtgcttgaacgttctggtctacctgtattttaattagtactgcagaatactcatttttcaatgtcagttctactttagggcttggcttatgtggtgtctcttctcatagaagaaaatgcctcttttatatagttgctcccctggcatagagggcatgctttatttgtttgtttgtttgcttatttacttatttatggtttgggtttttttgtttttttgtttgtttgttggttggttggttggttggttggttggttgttattgttgggcttttcgagacagagatacgctgtgtaacagccctgcctgtcctggaactcactctgtagaccaaggctggcctcaacctcatagaaatctgcctgcctctgcctcctaaattctgggactgaaggcatgtaccacccctgtctggtgacgacctgctttctatgctgtctcttgtcttaagtctgcctctccaggctgttctgtgatactggaacaaggcatgtcataaacagggtggaggagggctgagaactcatctggaaagatttactgcatgaccatgggggcccttattgtcttcacttcactccagtgtaaaaaacgtttataatcattgaccaaacatccaacatatccctgcttcctgttaaatctgcatttgtacatggagtttagtgtcccctaaatgacatgaggattcacactgttacatcaacaaaatcaactcttcaaactttatttcctcactcttgagtcaaagggcgcctactacatacctaatgctgacagatattttgctggctatgaaattgaaacaataactgaaatcatagacccataccccaaagttcaaaatgcagtgaagacaaacacttataaaaccaagaacacagtgaaacaggctgacctggtagatagttctaccagtaaggctttcttaatggcagaggagaaatgcattctgttagaggaggacttgttccagaaattctccagaggagaggacacacataatcaatgtatgaaaatatctagtcagatgtcagtgagaagagcattaagaacagctgagaagccaaagtataagtcacgttccaagggtctttggctacagtaggaagcagactatcctgttgaacataagagaatgggtgggtgtccgcagtgccaagcacttctctctagggagacctgtgtgcggttcgcagcaggaaagacatgtgatcttgtatattccttcttttggtcattgtcattccttcagagacttgaaatatatctgagtttctttgcatccaaactttattatgcacattaaaaatttaaggcatgtggggtagtggagggggaatggcatgtgtttgtgaagtacatgcatttatgaagacctggttcagctgtagagtcagaaaacaacctacaggttattcatttccctctcagtgaggaaatagatgcactgtgggtaggtaccagactcctgctgtgctgatgtcctgccttttgcccctgcttcattccactctgacccaagtctagttaatgcaaggagacagcacttatatattatgccaggcatctatgtgtttaactaccattgagttgctaaagaggaaagagaagcagctacccatataatatacactctccacatttctccaactgatgtctcgaataaccttctgttcctttgtagattattgcaactctgaggtgctatcttgagttaagatctcttgtaatatgtacacttatcatatatgtccacatatttgcagtatttcttttctcttacaaaatattgtttttaccagttatgtagataggagtcaggcaggactgtgcaagactgtgttcaatccctgtctaccaacttatgactttggatacatgtaaattttaaaaaaaagaatctatgttttactgtcttgtatgaaattctaacaatgttttgatcctggagttactttgagaatttaatgagttaaattgattttgagagaaagagagagagagagagagagagagagagagagagagcgccagagagagccacaccaagcatttaccatggagcagacacctattactgaagatctttctctgcttttctttcttcctctcttttttaagtctcctcccaaccaaagacactttccctgaaagaaattcaaggtagattattagctccttaacaaatgctttccagaaccccagagcaatgttttcagcctgtcaaacaagcagagaactgtttttaaagctgtatgtgcctggcctcctaaccccagagttaaggaccaaataggctcaaaacttactgtttttttttcaaatgaagccttccaattcaggagctgtgtgaatgtgccttatatcctctgtgtcagcatggaaaagggacatggaaatgctgagtgacatggcagatattactctggttatctaaggggatgatgggatagcacagtagaggaagcaaaattatgtattttctgatgaaaattaagggtacttagtaggagatcctatgggaaacatctttcaacatgtttgcaaaaaaacccctaagagaagaaatttgattataagattagtaatcaaaataacaatatatcacatgacagaaacctaaatgccatttgtgactgcactacttaggcaggggtatgcaggacacacactagctctagagcctacagttctgtgttctattctgggcgccatgtgttgaagggatccaagataaactggaacttgtgctgagaatagtggttggggggataagagacagaaatagcccataagaaagggtggaaagattccaggtagttatcccaagagaaggctcaaaaaagacaatattttcagtactctttagggttgttgcatagaaaagcaacagacttgcttatagaggacagaaggaagattaaatataatcttctaacaattaagtgggccagtagaatggataccttccaaaagagtctactgtccctagaaatgataatttcaggctagataagccctcaccaactaggggtgctatgcaggaaatgtactcaccaaaccgactggcacagataaagaccaagatctcacttactctaatacactgccctagtcctctgtgaaacttttaactgctataaattcttggttatgcagctaaagaaatatattgcttttgttaattgaaaaaaaattcaagaaagttctcttctctttttttcccactaatttatttatccattttcctattaatgaaagttgttgtcttcgcattcaaagatgttaagaatagcagtaggttgccgggcagtggtggcacactcctttaatcacagcacttgggaagcagaggcaggtggatttctcagtttgaggccagtctggtctacagtgtgagtttcagaacagccaggactaaacagagaaaccctgtctcgaaaacaaaacaaaacaaaacaaacaaacaaacaaagaatagcagtaggtgctctggaagagaatgaatcaccatgcatgatcctgcacccggatgctcatgttgtttcctggaataaataatgacttgcaagacttgaaaaccccatcacccactctatggagaaggaaagtctgatatgtattcttaccttctggtttgtcagtattttcactcagcataccctgtcattttgaataaaactctcttttggaatttacagtccattgatcatgagacttccatgtgtatttttcattcattattacattcagccattcatttgggtatttaccaaacaatttctactgtgttttgtgaaacatatctagtgccaccaacataaaataagtttaaatgtctaactttgaacagcttttacatatatggaagctatgctgtcttaatatgacagccaccataactgcttgataaaaaaaaaaatttttggtcacaaagcaatctttttccctcctatatccagttggtcaggggtctggtagtctctcagccaggaagctctaggtcatagacagtgctgagtgttctgaactgaggcctctcagaggcctggactactgatcagctaccttggaacaagtagggcttctcattgatgtgccccaactaaaggtggactcttcaatgtaataacactgatgtagaaccatcctgtggcaattcaagagaaaagcattttgtgtgtgctgcagagagtcatccagagccacaagactccattgactaggtctgtctcagtagcccagctcttcagcacgtgtcacaaaggatgatggagtacattttgctgtatccctctttgtagatttcatgtaaagaggtaacactctatgcaggtcactgccttaaagaatacaggaccgctgtgtgaaagggcagaagaatggagaaaacagtaacagaggtaacagctgtacgcccttgacctttggaaaggaaaatctcagagcagaggtcccaattaatgaagagcaagaacacagagaagtttgggttggtttctgagcgaagactggagaatgggatacctgtctgcaaagggaaggtcccatagggatccagaaggaccaaactgtccacttagagctggccttcgaaagccttccctcgtgtcagagcacagacactcagaatgatctcttgagcaatctcctctatactttctttcctttgatagtaaacacaccgtctctgttaaaatctgcttcccagctaaaactgaacacagactccaaaccaccaaatcactttggacttttcttttcttacaccccaccaacaactgggatggcatgcatttgaacaaaccaaaagtgatttcgctcttctagttttcagagctttttggctaaatgcagagtgagaaattcatacctttttcaaacagtgtgggttctttttcccagttcctctcatccatctggttctctggaggtcttggaatccaggaaagtgttagttcactgtgctgaaatccaaaaaagactgctaaactgtgaaagaaaatttgcattccagagacaccaaaggagttagtccacaactctgtgcagcaaggagcaaacatctgtatgttctgcctcctttgtctttgaggcagttggaaaaccctgtagcatggaagaaaccctgcattcactgagcctttcctacctagctcatctaaatgtagtgcagagtacagaaagaagaaccaaaacgtgttagtattttatttctagtgtcaaaaattattacaggcgagataccgtttaggagaacagcaaatcgctctgcagcctgttgagattccattcccgtgaatgggttcctcagccgggtgtgtggctctcccatcagcgggcctgtactcaataggaaaccacaatcacagccctgacactggcatgtcaccgtgacctttctaagcccaagtgctgcctttttgtcttccattggcagaagtgtaattagaaggacttgttttcaacagaagccaagtgattgccaaatgtgctcaaatgatctctagaggatcagaggtagctcaccgccctctggctgttcccactgccactcccaagagttagaggcttaactctaactcttttgaaagagatcaagtttggttcaaagaagcttctctgtcacatgcatatgaacaaggagaaatcttccatgaccctggtggttggctcagacctctcatggctgtagtgtaggaaataattgcaatctacacatcaggaagaaaataagcaccacgcagtcctgggtttcagaaaacaggcacgtgagcagaatggtactaagaacatttctagtctctgctcgcatatcatgattctaatggatgattcagggtggtttaattctgatctgcaatgtgcacacaggtggtcattactgtgtatacacatagctggaaagagctttgcttaaactcacattttagaatgttcccctagatgggtcaattaccattgataatcagatggcgttaagcaaaagggtgttgccctactgactgtgtgtatgaataatttcagatcatttatgctcttaggggaggttttaacatttttttgagagataccctcttgctgagatgaaaacaattaatcctaagactaaaacacacctaagatgttactttatttaatgcagttcattttcttctccatacaacaaatactttttgcaggcctgttatgattgcatgctgttatagaggctgataacgtattagtcttcaatgcctagaaacaaataatgatacaggctgccactggcaagaatgatgagaggtgggccttagacagcatgacatgagaatcagtgtctgaggtccaggccagaccctccttttccatcactgtgtattcattttctgctctcaaaggcagaggtgcagcacagaagcaatgaacagtggcttttcacttgtgttcatctggtcttcttgaaccatttgccaccacaagtttggcacttcggaaggcacccagtgattggattggggctagggaacacagacgaaaggatgtcattagggtcctggatgtgacatcttcatcaatgagagtaatactgggaaaaaacatcttcctagtgacagcatcctgctaaataatgtgaaaagggacaagaagccccaaattatatatttgtgaggtgttctgggacggcaggatgctaatgatgagccaaggcattttgtgggatggccactacagggagctagaagaaacttactgattagcagtaagtgtgaactagagaaaatcttgtttgcctttggtgtagaagtcatagattcaaatcctgatcaccttaagatgtgtagcatagaaattctccattctgcctcccctgctgactgctctggagatatctgaggtcttgtgcatgcacagttaatgcccatgtctggtgctagattttctttggtggagataaaggcctggagattactttttttaatgaagaaaagttatataagatcaacattaaagctagcattacataccagaactaaatccttcctcccacatatgggatctcaattaactattaaaaatatatggagacacttccaatcttagcaggtgaggacaccaaatgtcacttaattcttagactttgaaacccagcctcctgaagtcagcagcagttctttgactgtatgtcaggcttgctgcggttctcacgtgaataagccctaacaagactatgccttgaagatgttgtaaagacagctctctgattggacttggctcggaaggaaaggaattctattctttcttcccctctcacgatagtctcactggagttctgtgatcttttaatttgcccctggcatgaaggtagctttacctccctccatttctcagggattctgacacatccaagaaaaggattttggaagacctaccattcaacatggttacaggctttaaaatgacaaaccacttctctgagccttaaggagtagctatactaatgttcgtttttaatcaaaaggttggtttgtttgtttggatacggtctcttgttgacctggaatttgaccagtaagctggacttgatggccagtgagccacatggatctacctctcagcactaggttagaacatgtgccactacacctggctttgggaatttgcatttttcatttttttgtgtatgggtttggggcaatatgtatgtttgtgtaccacatgggagcagtttctccaaagaggatgttgaattatcagaactggggttgcataagggtgtgagctgccatgtgtgttctggatttgaacctgggtcttctggaagagcaggcagtgctgttaatggacaaaccatctttccagtccctcacacctagctttaaaaaaaaaacaaaaacctaagtcctagtgaatgaaggcaggtctctgtgcttccttgataagcactttgccaagtgagacatctcccagctctactcttttgtattttaaagctaatttatataattcaaatataaacaaaacttcatgttcctatattaataattctacatttctctgaaatgttcagttgttcatatgcatgttcttgcctgaaaatactgaattctcccacaccacttcaaagtttttgtttttttttttttttgttacaatattctacctggagagtgagttttgtttgaaggtaggcttgtctaagacatctctcaagggggcttagataatgatgaagactcttattagaacataacatcagttccaaagaggattcaagccagttttcttttcagtggcaaatcaaaccccaccaagaagagaggtgtcatcataaaccacagagagcagcctgttctcccccattttcaattagttcctcttttctctgccatttcaggttgttcatgtctttgtgaaagtccataccctgtgcttttaagcagttgtttgtagatgtgctttcttcctactgctctggaaacttgggaatgaagggagggtatctcagactttcatttctcgctgcacttccagggtgttcagctcaggcagagggagctcattagaggaggcatatgaagtgtttgtttaaagagaattttaagaagtttgaagagttataagcaacaatccaaagagttatcctcagaaagatttcatataaaaaaatgaaagttgaattttttttacagaatccccagctatgtgttttataggtatcatgtgtgtgtgtgtgtgtgtgtgtgtgtgtgtgtgtgtgtgtgtgtgtgtgtttctgcttgtctttctatgtaagcatgtgtatgagtgtgtctcaatgtgtttctgtgtgtatctgtatctgtgtgaatgtgtgtctgtgtgtgtatgtttgtgtgtatgtgtaaaaaaagaaactcatgacatcaccagaaaatagtttagagggttttgatatcatctagcaaaattgggggggggtcataatttttatcaataaagaagattttttattctgattagaaaatcacagtttagagataacactgaatttgctgtcattatttctcgtctgcttgaaacacagatacaaatataaaatatacattgtggtcaggatacaggaggagggcagcccgcagtgcaggacagtttgtggtaggaaatgtgtgctcagctgggaagcagggctgctggggttttaactgggagctcctgggagctcccagggctgcatgaagtctttgcttttggagacgctacagcattgccatcctctgggaagccttcttgatcgtcagaaccaagaagaaattaacattccataagtgagttaggcagtagaactatttgaatttaaataattacactggcacttgaggagaaatttgctgaatcatagaccaagctctttctgtggattggaactaccagtctgttttaaccctcacacttgaagtgtgcttctcacggttcacctcaccgttcatgtagataacgatggcatctgcagaacactgaaggaaatggagcatctgcgttcccagatgataacccatggactctggagaccctcctctgccccctcgtaatcctctcaagtatggtacacctgaaactcacttaagcttactctctggcaggtttttacatggttacgtaaaataattttactttaaataaattatccataatttgttggtttatcttctaattaaaattcatgaagcatcagtgttatgcagaaacaccattgtaaatgctggggcccagcaatgagttttctgtctggtggtgtaggagtttaggagacaggtggtcctaagatcacgatgtgtttcctgacttcatttctttacatgtaacttgtaggtaggaagcctgaatgccttctgttttcagtctaaagtgtgtctacaaaactacagaagaagtacaactcgaacattggagttgctccccattgcatagggaaccgggacgtgtgaatctgcttttagcaatagtcatgatccaggccttggtttctgggtgataccaggatgatagtttgtgaacagagtggtatgcatctcctagcctctatcctttgacactcctcaccaaggagtgagtttgggctctcttagaaggcctccttggcatcacttctgtaaccacagcatttcaagggaagtacatgtggaaagttgtaatctctgggctgaaaaaaattatacagacattctaggtcctaatagtttcattctccctgatattctcttgattacactaaggccaaaatgctccctaaaacatgagatgtcgcctcagcatcttataatccttcctgttctgtgatattgctcatttcaccaaaaatgtaagatcacattttaattttataaaattaaagttttaacacagctccctttctagtcttccaactctccctgcacgtctgtcttgatcgcgggcgctcacactgaccggtgtattcctgtctgacgtgttggcggtagcaccctcttccttctctctgtggcggttagtgtttgtgctgcctgcgtgcctcatttatattcagctgctccttccagctcctctgcctgggaattagaaaagttatttatataacacccagggatataaaaactacaaccagattgtatctcagatttaacaacagttgcactgggaagtcttgagtacaagtttgtttgtgattttagcttaatttttagttaaatttttgtttctcatcacaactggagcatcatcgtttcagaaaagtttatagcctgtgcctttcgactacttgattccctgattcttttctgcttctctcaaatttttgcattttaactatactttgattacagtaacttctcaaattagtatctattgtaaaattaataaaatatagatctagcattgagtttaagtgataaggtcttccacagcttggtaccagttcctgccgaggaccatggactatacaggcccagggcaatgataatgatttatgtagatgatgtagtgtgttccctggatgcctcttcgagactgatgttctcatttctccagctgctgggaatattgactggtgacggctcatagctaggtccctctgtgctaattatcagatgaaggaaagtacttcaatcagagttacatttcattcttggggacgatcttctgtctactgactgatacatgcagctataaagactctcataaagagcttcatgaaagaacagttcttcaggtcacacccagctgtcacatcctccttggatgaatctaggctttggttgtagctgcatcgtagatgtcatctacttctttaaccttctatagatgctgatcacaaggatactgctcagtaacttcctgtgtgaaaagttgtttcagaatctgttccataggctacacaacttcaaactaaagtttaatggaaagagaagagagatcactacctgaccatgtagacgccatagggaaaacatcccataagcaatcctatggtagcatagaatgtgaattatttttactataacagaaagagaatcaggaaagatttcttttccacagtaagtgacctttgagcttcaattaaaaaagaaagagagcagatatttctaagcaaagaaaagtataaggtggcctgggtatgtgcattgttttttaaaggtgtagcaatgagcttagaatggtggagaggaggtgaaactggcaggggagatcagtggtgaggaggaggagccaagtcacaaagcacactgctgattgggagggtccccaagctggagtgtgctcttctgctagctactcacctgtcagagatggcacacatcgaagacggggtctgagcagacttagagacatctcttttgcactaattctattggagcctgtttccttcaaaactgtgatttcacattctcttgatcctactttagaaaagcttaatatgtacatgaagagtccagctttctgtttaaaaataaccatgtataaaaaggtgcaaagcttccattgttgtacttaaatttttatgattagaaaatttctgaaagtctaaagtataaaggcaaacatgtgagtcccactttgaaagctctgtccagggacttcccactcgtttccagtatgtatctgctagtcagaaattgcccttttctcgaattctttctactaataaatgacagtaagctgaagaattggggtaaatcattttacccttgagaaatctgaagtctagagtaaagaaagcatacaaaagaaattattcttctgtgcctctccagccaggacactgtacagtttttaagaagctactactcagctattaaaaagagtgaatttatgaaattcttaggcaaatggatggacctggagggcatcatcctgagtgaggtaacccaattacaaaagaactcacacaatatgtactcactgataagtggatattagcccagaaacttagaatacccaagatataagataaaatttgctaaacacatgaaactcaagaagaacaaagaccaaagtgtggacactttgccccttcttagaattggaaacaattacccatggaaggagttacagagacaaagtttggagctgagacgaaaggatggaccatctagagactgccatatctagggatccatcccataatcagcttccaaacactgacaccactgcatacagtagcaagattttgcagaaaggacccagatatagctgtctcttgcgagactatgccggggcctaacaaacacagaagtggatgctcacagtcagctcttggatggatcacagggcccccaatggagtagctagagaaagtaaccaaggagctaaagggatctgcaaccctataggtggaacaacaatatgaactaaccagtacccccccccccccggagctcgtgtctctagctgcatatgtagcatatggtcctagtcggccatcagtggaaagagaggcccattggacttgcaaactttatatgcctcagtacaggggaacaccagggccaagaagtgggagtgggtgggtgggctgagtggatggggagtgtgtgggggacttttgggatagcattgtaaatgtaaatgaaataaatacctaattaaaaaaaaaaaacagaaactacggggggctggagaaatagaaaaaaaaaaaaaagaagcgcatgcttcttgctctgtctatatgcaagtttgtcaggcccctctctaaattaccaggagtcaagaaagtagaaatgccaacctcaggtgccctcatgagctcagtgacccagttaaccagtaggtcctgagtgtgagctcacctgccctagaggaagtacaagcgcgctccgccttgatggtgtaaaatggggacaaacatacaatagagggagttgtctgggaaaggttagcgtgcccttcgtggccatttgtctgagccagctactttcttggaaacttttttttttctgattttgggacatttttcatgaggctaattttagacatacttcaatttattttctttgtagaactaaccagattacccatcccctgaatagtctactcacagaccataatgctctccctcagaaactgactaagcctggtatgttgctcctggtttggagcaaatgagctgaacctcagagccaagcctcagtgcaaacaaatacgttttcgggtcaagcatattctggtttattcaactccattacagactgggttttaaaaagaagggggaaaaaagttaaagccccacaaagaagcaaaacagaagccccaggaggacaatttccagtcacgctgactcaggtcaccagagtagaagagaagaggggtgtcctcctccaggcttttgccctggacgactctggtattgtaatttcaccacttcaaggcgggggctgggggggggggggaggacggaacctaagagtttccgggagtttagactctgaccaaaggcagctttagaacctcaggcagccatagctcatcggagagaatgatggtggatttgacagttcatcttgggatgtaaagttggaggaggtggaccagtgctgagccaccatggtagttagacaagatttctttattcattctttctgtggggcattcatccccagcttgtttttaatcccaagaagtatactgggacaaagaaatatatcctttaaatataatcccttccaactggaaaacattagctgcttttccggagcactccggttcaaatcccagcacctacatggcaactcacaactgtcttaactccagtggatgtggctccctcacacagacatacaggttaaataacaatgcacataaaaataatagataatgttttgaaaagcctttaaaaaaagtcccttcctttaatgaaactacaatactttatagtaattagatagatagatagatagatagatagatagatagatagatagatagatagataagtgctgtagaaaaatcaataaaatgaaatggggtagaaagaaatagtgtcgtcaggtgggtaatggaagagctttgtaatctgtacattggaaggctagactggcccttgccgtatgtagttcatggactcatgcgtcaagatgtagaagcttggcatttcctgcataggaacgagagtaggcagtaggatgctatcacactacagggccatgaaggcctggcgtaagctaagtacatggtcacacccgtggttcaggatcacattgagcatccttgtgggttaaagggggttacttcagttttcaggcccttgttaactctctacaggcatctctcccttcaaaggctttaaagatctcagggcaggaaggcagctgctccttaattttcatgctctatccacttcggtgtctagctcttgacacatacaccctaatttgattcccgattctagtgagtcacttcagatgccttatttagagaataacatattacatgtgaaaaaagattattggttgagagcacagtctgtggggacagatgaatagttgccctggctgacttgctgaatattagctcttaaggttcacatttattcctaaggcccagcatattttcaaatccaagtcaacctttgttcacttccacaaccagaccgccattttatgttcgacatttctatcaggagttcacttagcctgaattttgagcttttaaatgggagttttggttagggctgtacagagggcatggacttgtctcagtcattacacagataaaatgttagggtctatcagtgaccttactagttctttaatgtagaggcaagttctacttgaaatcataaagcagtcttccaaacatagaacttgtgtggtgtacttcagtaaatacatctagcctaccatgtgtttttataaataaagttctactgaattacaggccccttgctcgtgtgttctcagaggcagccttttgtcagtaccacagatccctactatcggagcctttattgaaaagcttgtcatcactctttgtgtagtagaatagaatgctgtaggagacaagacagcacgaatcctaagacatgggtttgctgcctggggcctgggtgatcctctttgacccactgtgtacatcactttgatgtcgccgatgctgctgcaaaccgccctccctaccgtgctgtggtccacgctaaagccacgctgtcctgctaaccagttttctttctttcctcagaataccctggagcagtgcagtgtgtgttcgaagcccatcatggagcggatcctccgtgccaccgggaaggcctaccacccccactgcttcacctgcgtgatgtgccaccgtagcctggacggcatcccatttactgtggatgcttgcggtctcattcactgcattgaggacttccacaagtaagcaacccctctgccctctgacctgccggtcctcttgacgtgggctcttgctgcccaccactggctgtgcttctttctgagctatgtactctggggtttagggagatgttccaagagtgatctctggcgcatggatggatgtaggaagtccctgttgtcctcccatactctctctattcagagcttctctacagttgatcaagacatccctgtgaagctgtagatatggaggagttgattcagggagatgagaggtgtggccattggcacgttgcacaactcccagctcttcaatttagttattacaccaaaacttgtcctaactgtgacaacctctccaggtttgtcactgtacagttaggagctgctggtacacagatacagagaccaattccatcccacagttccagtgtgagaggcagtcgaatgctatagtcaacatatccatgtcctccctcacccttctccccaaccaaggccttatgtgcctccatgtgtttcctgatgacttcagttgtgccacattttgagaaggatcctaaaagcatatgacgtgtcttcatgtctctgatttcacagcccctctcttccatcacaactgcagggtttaggaaaatggcagttttgcatttttcttcatgtgcttgttagctggctaaccagctcatcctaccagtgtgcatgtttattatggtcaatgtgggaagcttcaggtacggcccgtgagaggtagtacaggctcccttgctgggcagatgctctgtgagtggtttgtaaggctcccaaggttgaagcacattgcttaccactttgggctccgctctgaggctcaagacgggctgtgggtttctttccccactgttgattgtcaacgtccagaaggtactttccacaagcagtgttgggacctgagactcatattttaaaaatgaatttcctgaccactctcctaagtagcagtgaaagcaaaaacctcaccaaaagacgcgaggttgaatgaactaaaaaaaaaaaaaaaaagcccagaagcagaaatttcaacttgaattggacaagaaaaggctcatttttaaagggcagtcacagcataaattgtacttcacattattgctatttttagcttgtaattacacatgaaaaaaaaaacctgcatctatttaagggaagtgaaaagaagccagctcggagtgtttttctgtcactgttctctcctctctgagactccgctgatccaagaaagacagatagctgtaagcagagcacacatgtttgtgttgctggaagagcctgagatgttacacccctcaattaaaaggggaaatcagttctgacaaatgtaaatttatatcgctgccatttttctttctttctagtggtggggagcataattagagacttgtaaccagtgacataagcgtgtgggtctgaacacacactcctgcacagcagaccggagtgactgaagggggaaagaaggctacacatctcaagccccactcctcccctttcagtgcacatgaaaaacaagggttttttgtttttgtttttgttttttaaataatgtctgcacaattggaagttatggaggcaggtggatactgcccttctatggaagagaaaaaaaaaaaaacattccagaatgcttgttgcttagctttgaaagtactagaacacagagtgggtagtctttaatcatagggtgctagccttccatcatgaggtgatagcctcccatcatgaggtggcagctttccgctatggggtgctagccccatcaaggaaaccatggggtgctagccatccagcatagggtgctagcctaccaccatagggtgctagccttccatcatgaggtgctagctgtctaccatgggagagttacttcatggtcagggagaccaacacaggggcagagcctgcttctctactttggaaagcttcattttggttgtcctgagtgggtttctcctgtgagctttcaggatacacatttcagcttggttctgctggcatttccctctacatgccagtagtagctgtgttgagtgctgaaggagaagcaggacagagagagctgggtaaaggtccatgtcagtgctgggcctgtgggaggaggcagggtgtgtgggtataaccaggatacagggcagaaggagcagcacccagaggagagctgctctatcctcctcagaattgatcatttggctcagggatccgggcaggcctcatgcaagcaggagtagaagtatactatgtaagaaacaagggggttcttgatagaggagataaaggttgcctatggaaaagcctctcaaatgtcatctcagagcttcacacttgaaggacagaattgtgaggtttgcctaatgagccatttggttaaggttggctcatgtctatagccagggaattgaactctttcacagacctgatcaccagtagctactaagaactctgtagttaatgtgattaacttaggtcctgtacacagtatgtggaggtggccagtgggtacacacacacacacacacacacacacacacacaccatacacacatacatacatacacagtctcctcattttacctatataactgtattcaaagctgaacttactatctatttttaaaagatttgtttgatcttaccccttcttattcccagggatcatgccacttctatatttgagtaattttgtaagcctatatagtgttgttggacttgtaataacctatacatatgaatagtttcacagtaaccaatttactttttctttttttttttttttttttttttttgcaacaagatagactacatataaaaagtttaggacaaatacagaagcgtggagaattcccaatgcagcctgtgctggaatactgtggaatctatgtttctagtgcaagagcactggtgatgcccgggaaagtcagcttaaactgttggtgtgtgatgcatacacagtgagctgtggtttcttggcaaagatgtcacctgtggtcttagtgagacttccttcccctatgacaaatacctgagtagaaaaggtctgtttgggcacatgattttcagaatgtttagtttgtaatgagctggtcctgagtttctggacccgtggtgaggcagtatatgactgaagaaaggcacgagagaaaagggctattcacctcatggctgccagggataagaagtgccctcagtgtgtgacttgctcgccctaacaagcctaccttctacctccccccaccccccataataccatcgcagtgtgactccaatcctgaacttaatcttttgaagtctaagctgccacaatccagtcacctcctaaatgttcatcagctagcaaccaaggcctaagtctgtgagcctgaagggaacatggcaaattcaaaccatagcactgatccatttagtcattaagttagcattcatttgttaattgccaaaaatctgttggctatgaaatgactagcttcatagctcccttaagatggctatcaacagaaaataataatgtgtgtagagtgcttaacagaacttagtacataaaaggcacttagtaaacaataaccatcaaaactgctttcatcccgtttttattaatatttattagtgtctacttggcaacttaagcactggaaaacaccccctcggatcatgagctctgtagtgacagctcctgcctctctgctttgctaaggatgagtgattggtcaaaaaggacatagcttcagactgcccagagaaggaccatgagagtagacataaagtccaataatatctttctcataaaaaacagtatagcaggtggttcatgtcattgggtattgttcaaaattctcctgtatgagccaatcatagtagtcggcaaagacatagaaataattactaactaaaaaggtaagaagagaaagggggacgaaaaggaataagaagggggggggggtaagaaagtcaatcctagaggaatacatgaacctggaaaaccagtgaggctgtggctacttctgcccttccagcagcctggtagctggggagaggaagtttttaaagctaatatcagaagcctgactattttactactgataacccagattcaaaaataatcaggtaattcaaagcagttttttctccactaaatatcaacttcttgcataaaatatcaattacaacagccttgattactactgcagttgtaccatgatcctcttaatttttctttcacagcaatcaatcgatctgctgcttaattcatatttatttagattgcagccatacagatgccttttggtgcctccaggaaaattaaaacgtacacagagagtataatgtatgtaaaaactctttgacaaccgtgaagttctctgcagagtattagattactatcattatttccttttaagtcttactacaagtagataaattttatcatcattaatcctaaaactattaccatgaaaactttagtaactttcttaatatctcaacatcccctttctctctctcactggtttttcggtgttgaaacaggagctcacccagtagcccaagctaggttggaatttaggatgatcctcctgcctcagcctcttcagtaataggatttcagacatgctggttctgtgtatcttttaaggattgtcttcagttcttatgtgtgtctatgccaaatcatatctcaattcacaccttcacaaatgatatatatgcaaatgtgtgtttgaggtttcctgtggtcaagaattcaagacacattttaacgaaagaggctgtagagattaataatgttaggttatttgtctatggcagaatgaaggaatactaatagaagcaagtcagagggtagccagggcctaccaagacctttctcatccatgtttaggcaggaccttgtttcctgtgttcagctagctcatgcccatggaatagtcctgtgcacaggattgctgcatcctacatgctgcctgctaatgcgttccctggtgttctctgtacaaggcagatccatcctcttccctgacagagagcactacacaccatctggggaggcctctgctgcctcagtctctttcggtcaaggtcacacaggaaatacagcacaggtgtcagcctttgagtctttctgtttccttctgtacccttctcctgtacttgacatctcaccagaattctttctattttcaggaaatttgccccgcgctgttctgtgtgcaaggaacctatcatgccagccccaggccaggaggagactgtccgcattgtggctctggaccgtgatttccatgtgcactgctatcgctgtgaggtctgtggcatccccaagtcagagcaatcataaaacctggagattatggtgcctaacaaagaccttaacactcacagtttctagctctgacacaggctgttaataatacacttacgtcactcaatttaccccactcttcatagccacggccctctccctgtatatattaaatgcttctatttcttattcctccagataagactttgagacctaaacagaaaattatgtcacagaatattgtaaactattaagctagtggaaaggctatgatgatgatggtggtggtggtggtggtggtggtggtggtggtggtggtaccaggtacatctaagagctaattaaccagtcactccagccaaactgaagtgacccctacattcagagagagaccccatcctaaaacataacaaggagaggatgacagggaagacatcagacattgtcaaaatctgacccttgtgtatgtgtaacgcacatgcacacacacacatacatacacatccacacacacacacacagagggagggaggaagggagggagagggtgaaggagaaagagaagatgtaaaactgtgtcttctatgaatcatgttctttagaatatttttttggtttgattccattactcacttcctgaagaaatctcaaagtatcatatatcactggttctttttggcaaagccacacttcctgtggatcataatggtgtctgctgtggcactttgggtcagccttgtttataccctgagtttattgtcagctctaggcctggcttcattcatctctttgccactctcagagagcagagggtaactctgcagcagccatggcctgtgacagcttctgtcaacgtgagcaaggcacaccgtgctaaatgtgactctgattattttccaagcagactcccatttcttctaaaggcaagggctggcttccagtgctacctaacaccttacagaacaggcagtcacagttagcaacagcagcaccatatttcacatgaatgtgactctttgcattttgctcattcatgtccattatgtgccttgaccatcccaaaagctcagtaggggagaaaatgcctgaattatttccagagtagtattcattcttgtgtgcagccttcacagaccgtgccaaacctcacaatggcacccagggagctcatctcctggtctcccataaattcctcttcaccatgctatcccttttggaaaatgttaccaattatcagtcttcccagctcttgaaattttatgtccttgctactattgcagtaaatatgcaaaagccactggtagcctttctacatgacagaaatcactttccttttatttaaatagctataaacttctattcttgttcctgtccattcttctgaagaaatcctaaaactgagtacagagggtaggctgggggaggggatgcttttttttttcttcactgttgtttaggagagaaagctaccccgggagctgagatctgtaggcattttcttctttgtactatgttttgtatttggtgattagaagagtcattttacactatttgtattgttttgttttgagacagggtcttcctatctagtctttcctggctagaattttctatgtagactagactggccttgaactcatagaggtccacttgcctctgcttcctgagttctaggattaaaggtatgtgccactactcctggctaccattgcatttatgttgttaatctctaatttagtttcattcacaatctgctactacttgtactagtgttggggtacaatgtccccattatgaaagcctcttaagaggctcggggaaagtgggtttatccctgtagttcagttcacttacatcactgtcttcatttccttaggactgtggtggtcttctgtccgaaggagacaaccaaggctgctaccccttggatggacacattctctgtaagacctgcaactcggctcgcatcagggtcttgacggccaaggcaagcactgacctgtagagtcaatagccagctcagctgccgagtgcatgccagcaagaagagcgcaacacaagaaaaagataagagaagaagtagaaaaatagaggcatagctcaaccactaggatagtctctgttcttcatgtgctattaacctttctgtagaagcgcatagagaatacgatttgtctacgttcttaccaaatacacatttcacatttaatcatgcaaggccttggtgagcctttgttccaaggacttccacatttttgcacagattatactccgtcccattcacttctgcattcctgagacttttaatcctcatgtttgtctcacttctcatgtggttgaatagatttttagtgtggtatttgctgtcacatgatttttcctgggtgaatgtgccagcctgcaggtgccttaagtcttgtcctgtctgtcacttttcctctggctgtggctacaaaaggcagtcattctgttaccaggtattgaaaaggtgaagtttcccattgcactacacccctgacgtctcttgctaaaataatggtagggggatatttttctatgttaagctataaagagtttatttgaaaaagttaacaggagcccactttagtctgcaactatccaaattcagcagtcaaggctcattggaaaacattgattagccaatatctaaaatgtggggaaataaaaccaagtttcaccactgtgctaaagaggcagaattctaggtgtatctggaaggcccgttgtatttccacaatcccaccctgagagttagctcaccacactctctggatataagactgtcaggcttgcttttggtacatttataaatctatccaactcttcatccttaaagcactgtgaaacttcacctaatatataagcatggttactgcaattaatatttatcttcagaaagataagtattaaaatgaatcaaattcttatctttctttctttcactttatagtgacccaaacctaaatctcttttgcctgaaaattgcaaatcgggacacataaaatgaaattataggaccatgtttcatcttctttaaaaaagagaaaaaaaagctgggaaagattgtgaaaccagagtttattattcttacaatcctctgtaactcaagtacatactgcaggagacattttcctatcatcaacgtgacattcacaccacactttcaaagacaatcgctgaaaaccaaattgtctttctgaggtaaaaatatgcggaatgcctgcctggaatctttatgcgaactcttattagccagtgaaacacttgcttgccaactggagccagttcgcttcgttaagaggagacacctcgctttgcagttgcagttggccattattgtaaagtcagtatctcagaatgagatttctcaaagctttctttaaatcttctacagatatatacctttaaattatggaataccttaaatattacagaaaggtataaataataatataaaggtccctctatagctaacaccgttctagaagtatagtcactttaaattttttaaactccacaaatatctttttatctcttttatatagtactgggagttgaactagggcctcatgtgctcggcatgtgccctggcaccccagcatccccagctcttccgtgtctttttcttttttttttaatctttatgacatgatgattttctagtctgacagttttaattttaacatttagagcaaaaaaaaaaaaaaacctgtttaattacttgtgcatgtttaaaattgcaacccatgcctcaggaattccataaagtttattttacttgaatagaagtcatcttaaaagtgattaaaagaagcccttaggccattgtcacacagcccctctgggtcagtctgtggcttattgactttctccacaggcagtttgcctgttagaatccccaaagctggcattttggggcctttcccttgccccctgctctcacctggcttctcttctcttgagattcatggaggcagcctgtggatctcagaattcagtgggcgctctctagctctgaatccctgtgctgcaaatcaaaggctcacctgtgctggtgacctcgaggaacgctaacagacagtcgaggtgaatacaagcctgaactgactaaaatgctcaccgtgaaatatttcaggaaatgtctttaagccaaaagtagagtgcagtataagtaaggggcaggagtaatgtctagaaatgtagacagcagaggaagagtttatgtaatatttatactatagagcaataacatcctccatgtttgttacatgtaactacttgtaaccagatgtttacatgcaagatttataggaaaatgctgcccattcttccctgaggtgttaagggcagagctcccttgctcgtagcctacccagtgctttcctgttgagtcacctcagaggatctttaccaaagatttttttaaagtaaatttctttttaatatagacttatacttttataataatgaatgtgcacatactcatatacagaaatatttaggattagatctttttctttcacaaggtctcatgcaataaagtatccaccacattattctccaattactttaatatataatttacattgctttctcgttttcttctactaagcatttgacttaagcaatactaaatactctgctctttgctcttttatctacataaagatttgcctactgtagagatataaagatctgttaccttaatgattatatgcattgccttttgatatattgccttacttatcatttaaatacataaatagaaagatataatgtctgtaacagaaaacttataaagttatacctgaattgtttaaatatcaagagcacaaacatttggttattctgtataaaatgaaacatataagaaaggaaaaaacccaccatcatgagctctgcagagaacatttaaaataattctctttctatttctggagtggtagggatggatctctgaaacttgtgtaaaatagacaagtgctctaccacagctaaacctcccatccagagtaagatttcatagctgtttgggttcccatctaagcctggctcaatatggagtctgattggcaaacaacattgcctttagaactcaaaaatacaccctcccaatcctagctcatggcctcagtactagtgaaatcctgccacctctgcagctcaaagatgtggatgttttcctgtcaatagcacactgtccctgtaggaacaacttgtggtcagaattgctacgtgggttatatgctgattaaggacatgaacttaaaaacactaaaaatgctgcaacaattttatgttggacttgaacagtgtggaacatattaaccataaagagctctcttgcatttgggccgttggaaggggagagtgctctgtgaggctgcagcagagctttaataggcaggattctgaaaacacaactaccaagcatcttcagagttactacaaatcctattaatgtgaaccagtcaggaataacagtgttatttctatttgatgtggtttaggcttctcttgtcagatctgtgtcggttgccccctgatccttccattctcaagttttgaagggtgtcagggaaattatggcagctgctagggagatctgagaaacgctgatgtaacctcccagcctctcaccatccctcttggcttggaaaggctttttttccccatatacatttctagaaatattgccattctaccttagcatttcacatttgtagattaaacaagtgattgtccatctgttgcctacagctacagtacatgtgtgttatgaatgaaatatgacagcatgttccatacccccgcttcagccatctgtagaaaaccagcaaccgaaaaagatacctctgcaaaatgtgcctcaagtccttgtcctgggatggctcttctggtgtgctttcacaagagacaatcaaaagcaatccactattgtgccttattttttaaaaaaaaatctgtttacacttctatgactattgctcagtaatggaaatgctacacacacacacacacacacacacacacacacacacacacacacaccccaatctcaaaagatcggtgagaaaaagacagagagacagagaggagaggacgagaacacacttccatcttactgtaccagtttggatggacctcatagctctaacatatgcgagcatgctcacggttgaggcgatgtgtcggctgttactagtccttaggctttggtctccccctgagtttagggggatactaaaggcagagacttgcacctgccggaccccttctgcactcacatttttacattgtattatttgtttgacttagggataaacaattttgatttctgagcaagttatcatcgtggcacgaccttgactatttcaggccacgtgacttaattggctggtcattggaatgaagctgcttgtgatgctggaggttggctagtatggctttatttccgacctttaaaatgaatctggacaaagctactgtgatctaatgcaagtgtttcacccctcgctcccttgctttctcctcttctctcctttcctgcctccctttaacctctctctctactgtgccaactaatgctgccctgtttggccttctagtaagtttagttaggatacaacagcactatgaactcattaagggagaatggctaccaggacatatacctaccagccagaaaaaaaaaacaaaactgctttatgtggacatactctttagcttgtgcttattcctagagggaggggtgctccttcaggtgtactttaatgaatctgtatcagggtcttagctaatggggtattgctttaaaattatctgtatattcctcacctatatgtaaagtgatcattctaaggctagactaggatgctgtgggtttttttttttttttggtttgtttttttaaattagatattttcttcatttacacttcaaatgctatcccctttcctagtttcctctccaaaaatcccctataccctcccctctccccctgctctccaacccacccactcctgcttcctggccctggcattcccctatactggggcatagaatctttgaaagaccaaggtcctctcctcccattgatggccgactaggccatcctctgctacatatgcagctcgagaaacaagctctgggggtactggttagttcatattattgttcctaggatgctgtttttaaactcaaagtcactttcaccacaaaatacttaatttttttttttcgagacagggtttctctgtgtagccttggctgtcctggaactcactctatagaccaggctggcctcgaactcagaaatccacctgcctcttcctcccaaatactgggattaaaggcgtgtgccataactacccagcttaatattttttaataagagaacatcattttgtcccactgcaatgagcttgataattttctttgtggcaacaagaattgactcagtacttgtaaggggtagtttcagcactaggattttctttttgtagagtatacattattttgtgggcatattttcccttagtacagaatagaaagatacgaatttacttttctgttttaattttttcttccttatgcaaagttttttagacaatattttagttagccgccatgcataatgactaattgtagagatctttgtaaaggacatatttttatccatcttactgggaaaaaaatgctcaaatctttgttctttgcttctgattggtatttgttttatagcagggtctaggcaggatgataagtagctctgtctcatagcatttattaaaaattaccatactacaagtactcaaattattttacaatacttaggatcaatggctgagctaaattttccaagctacccatccacttagggacaagataaaacttaattcatctgactgatagtcatctcctgtgccccaataggatattgttaaatagctgccagtgtactccatgaacttgtctttgaacataacttctaatttcagctttcagtcctaaaagcagaatgctgtattaggaatgcagatgtcaccatgtcaccttgtgctcaagccaagtgctaggaggtcttgttgaacatatactcaggtgctgtacctgggtgtacagacctatggtccttgtaaagagctgccttctctattgctttcatgaccgatggccgtagcatttattaatgaatatgatggccagtgtggaatccactcaaggcaacccaggctacctgatgaactacataaaatctcctaaattccagactcgtcacctttgtgggtttgataccaccaagtacttcagcttgtcatttattgacagtgcatgttatcttctgattccagtgacattacctactagtttcctgactatttccggattctctttgcatctactctgtgacccagctactactgtctgtcaaggcagatcaaagcactttgcttcagattgaaagggaaaggtatatgaatccttctagggccactggtggcctccatggaaggggattccctcctaatgatagagctaggaaaagacaggtcagccaagctgagaatacagccctctttatcttctgggctgatttttgtaatcatatctcactgctggttttgatgccaatagaatcagagtcctcaggaagggaggaagtgagctaaagcattttccatctacaagagccctctctgcctcataaagtcctttccctttcgcaccgtcttctcaaggataacacttgtctgtatttccatgatggatagagaaacaagttcttgacacttagcaagttctgcaccaatattagtcgttggttttaaactcatccatttattactaatatttgtgtctaaagcaacttctgtgatcagtttatactccccttaagacagccaaggctgagagaaaccctatcttgaaaaaacaaaaaacaaaaaagtggagtttatgatttaaattttgtcccctcagtatcttagttccttaactgattttgttttaacggccattgttggatctaagaggctcaggctgactgcattaagatccaatagtcagttcagacttcttcctagaaatgagtgaggcatgtgaaagacctcttcacagaggcctctgtgggagttcagggagatcatggaagtgaggacacctgagcttgcttactgctgactgcattgggacgtcatagttaaggcccacaaggacaacctaggctcatttctgcaaggatgccctggccagggtatggattcagaagtcttcatagcagggaaaactttcatatattcatgcttcttgagaggggaaaggcaccaagaaaaccgactgttgatctcttctcatcacgattacagcggaggaggggtggctgggcagacacaagaaacccatacagtataggtaggaaatagcaccctgtggtctttgttggtgcaaatgcatttttattggaccacactacattctcctctcttgtagcaaatgtgctggacttttgaaccctcaaaaacgaacaagtgggctctctctgcgtctttcttcttctaggaacatagttaaggctcccagccatctgctttacttggtgttccagttccgtcacgactccttgctgcatggtgaagtttgcttaaatagggcctgtgtcaagaaactcatcagcttgggaggaagtcctgttgtttcagctaccttggtcattaaaaccagtcttcggctctgttttttcctcgattctcaaaactaacccacgaaacataataaaatcctggcctccccttttttcttcttccactgtatttgttttgttttttaacgctgtattacttttaaaaacaacttccatttttagctgaagagtacaagtgcttcaaatttaagcacccactaaaaaaagtcaagaagatttccaacagtcagatattagaatttgtgtaagttttgttggtgtatttctatccagaaaacaaaatgttctgacagttatcatatagcctcatgccctaccttagtaactgtcttgtgaacaatttgtttcatttatcagatccactgataatgacctttaaaaaatttgggaaacatcactgtcgattctccagcttttacaaagaaaaggtcaaaaacaaaattcagtggtactgttactaaactcactacttctgatcagctcttcagtacaaaaggatactgttcttaaggaaagggattgggtgatgctatggtttatgtaaaagtatataaattctctcactgttgcccagggttacagtttagctagcaaccattagcctttggaagaacagggttttttgtcccttctgtatcagctttgaatttgagagccctgtcgccagaggctgctatccgcccttgggtaggcagcacctatgggtggatttctaagctgtgaaataataaaattcctgagagagtttccaagctgctttcacacatagaagagccctgggaggatggttattaatagccctgtcctagaagcaaggctgaggttcagaatccttaagtgtcttgccaaaagcaatctagctggtaagtgtgagatgtgggtatttacctaccccttgtcacacaaggccctgttagaaaaatatccatggaaacccacaaccatctagttatcagtggcaggtggtatatgtgtatcatattgctgcagattattaagagattgcacatgtctgtgtcatcttgtgagaagccatgggtctctgtgatcacctctatggtgataccccctgagcaaaggccactgaaaacagacatctgtgcagaagcacattgcagcaaaatttcccagagagttgctttacattcactggaaacatctctggacctgtcaggttcaggatatcaattgagactatattatttcaaatatagtagtgtgcagaggttacctgagttttaggaaatctctccctccaatggaccgcaatgtatatcccaaagagacagaagctgctataggttaaaaaaacaaaacaaaaaccatgattctctctgtcagcccaagagtgtgctgaggcaaccaggagtttctaatcaaacaaacccaagtccagaggccttgaaatgtctaaacaagtgctattgaatgaacagacctcctgaaatgtacccttcattgtatctatgggattaatctaccctcatcacaaggagcatgacactgtattcttagcaccaacaaaaaccctgcttggagcaccctgggtacattctagaagtcagccgacattgcaggtcaacaaatcaacactcttcttagagctgacttcctcgtgaatatgccttccaggtgcagtcttggctttcctttttctatcttctggttgtttgctacaagttgaaaatccgttgactaattaagaaaatattctctgtccacattaaatctgtcctcaatctagaaaccctttcaaatgccctagtttgtaagttaggcatttgtcttccctagagcctctcctccatcagaccaagattaccgctcataaaaaagaaatcttattttaaaagactttagctttttagaccaggaaattaataattcctaaacctgacccattttcatagcttccagaaaggaaaagaaaaagctacttaaattttgtgtggatctgtttatctcttaaaatatgtccaggcaatttgacgcaggggtagaacgggaggtgtttatctctcttgcttgattccttctgtttctatggggaaagcggtaaagacgaaggacccagtgttctttggggctgggttgccattttttatcccatctgctttgcttcatcgtgatgaggagtaattcctagttgctctcataaatcctcatcctccatcacaatggagtaaatatattaaatctgaatatctttgctcaccaaattacttagctccatttctcagtggggaaatataaagcaggcagagctggccttcaattatacacttaactccttcaagccctttttgctttatttcttaggggagactgtgtgaaagagaaacaacctagtccctcctcatcttttggagccatgatgctcacttaggaattacaggaaaagaatggcttggcttggccaggtcatgtgatctgcctaacgtgtttcattccttcaaacacagactgagaaaaaagggagtttcatcatttaaataccatcaatgggaacggtctcattttgcctaagatgggagctaatctagttgggtagtattgcattgtagtaaccttttgagttgtgcttggttactaaaagagtggcagatacatcagcctatgggattacactaccaaaagccatagtgccacagacctcaatcgctcactggcaaactgaattaccctggaccttccttctacttcaagtgatatgtgttccaaactgatatgtgtcccagatgaaatagagactgatctaatcaaaaaaaaaaaaaaaaaaaaaggtttggcagggaagcagtagcaaaatcatttctcagtgactgtcctttacccatgtgtgcacttgggacacctggggacactagcagactacctaagacatctttcctcatgaatgaagggtagaagagttcccctctaagcgttggagtcaagtctttactcccttccagaaaatatgtcaaggagaaaatagaattatagatggcacatgactgtctggctcttgtcttaagaatgctgtgtggaattatgtgccttacgcaaaacctgaaacttagaagccaagttttgtgcagcggaagggagcactgagctctgtggtggctccgcgaagtgacttagcctgggttttgcattgccttgtctggatctatgcctttatcgttacttaacagatttggggcttttctttctttaccgctaagcatgggcatgtgtgcaattatgaggtgaactttctaagtagtaagcccttgccacaaagtagacgttacacaaaggcacagagcccagggatagtaatcttgcctgagctgctcgcacaggcttcttattccatggctttgtcgcaggcttttctctttctgtgccatcacctttgagaaacatgattgcaccttctccaactctgcctttttaacagcttcagttgagttggcaagactttcccagctctgaatatagccatttcccgactccggcctctgcgagactgatttcaaatctgtgatcttctgttcagcgtacacatcagcaaagtgagaagttgggtgctaaatataggctctattaactttacttttagatgtgctgccttcaaagagtgcctattctgagcaacgtaaacgttattcctacatatgtatgtacacacggtacccggactcacactgttcgggcttcacaaacaccatcagcaggggtaggtgctgagataaggaagcatcgccaaattgaagagggtggctcatttccaatctccccttcagtggctaccatgaaatgggctaaaacaagagtctcctgcacttcctgctgacacagccactttgcatttatatcccaggaatagtggcaaattgctgaggaacccgtatttcatggaaataatacaatcatgaacatttcatcaggagagggaaaggcaattaatatgtgtcatgtgtgttttaaaaactaagtattgctaagttttgagtgtcagcaggtttcttttatcttacaggctaacatagagaaaactaacgtcttggctatagggagtgtaagctcagggggccaggcatccctgccagctccttgaagcatttttactccagctcctaagaataccagtccatgctatttgagggcttttgttcctggagctctctctgtcagcgacaggaactctaggtatttttgaggaggcagcagcatagcctgggagggtgagtggttacccagcagtcgtgctcggaggtgagccaggtagatgtgctgaggtacatggagataccgtatgatcgtacaagggttgaacggaggacatgattccaaaaaagattgttctcaatgtgtcgtctgactcaaccagctggca

SEQ ID NO: 24 - DNA, 3945 bp, Mus musculus
taactgcagatttccacaatgtctcacccatcttggctgccacccaaaagcactggtgagcctcttggccacgtgcctgcacggatggagaccacccattcttttgggaaccccagtatctcagtgtcaacacaacagccacccaagaagtatgctccagttgttgctccgaaacccaagtataacccatacaagcagcctggaggagagggtgatcttctcccaccgccaccaccacctctagaggatcctggtaccatcccacctggtcccggacacttccctcctcctccaccactggatgaaggggctttcaaagtgcagcagggaaatcctggaggcaagaccctggaggaaaggcgctctagtctagatgcagagatcgactccttgaccagcatcttggctgatttggagtgcagctcaccctacaagccacgtcccccacagggctctgctagttcaatagcctctcctccagtttctactcctgtcacaggacataagagaatggtcattccacagcagccacccctgacagcaaccaagaagtccgcaacaaaaccacagcctgcaccccaggctgcacccatcccagtgactccaattggaacactcaaaccccagcctcagccagttccagcctcctatactacggcatccacatcttcaaggcccacctttaatgtgcaagtgaagtcagctcagcccagcccacattacatggctggtccatcctctggacaaatatatggtccagggcctcgtggctataacaaccagccagttcctgtatcgggacagtgtcctcctcctccaacctgtgttggtaccgactatgcatatattccaccatctggacatccgcctgagtctggatatgggtatacctccaaccaaggacgctattatgaaccttactatgcagcaggtcctagctatgggggccgaagtgaaggtgatactgcttatgggcaacaggttcaacctaatacctggaagcgggaagctgcgtatgcccctcctgcaagcgggaatcagaaccatcctggcatgtatccagtcagtggccccaagaagacctatatcacagaccctgtttcagcgccctgtgcaccaccactgcagccaaagggtggataccctgggcctatggggcctccttccatccccccatcattccgcccagaagatgagctcgaacacttgaccaagaagatgctgtatgacatggagaacccacccgctgacgattactttggccgttgtgcccgctgtggggaaaatgttgttggagaaggaacaggatgtactgccatggatcaggtcttccacgtggattgcttcacctgcattgtctgtgatgtcaagctccgagggcagcctttctatgccgtggagaagaaggcatactgcgagccctgctacattaataccctggagcagtgcagtgtgtgttcgaagcccatcatggagcggatcctccgtgccaccgggaaggcctaccacccccactgcttcacctgcgtgatgtgccaccgtagcctggacggcatcccatttactgtggatgcttgcggtctcattcactgcattgaggacttccacaagaaatttgccccgcgctgttctgtgtgcaaggaacctatcatgccagccccaggccaggaggagactgtccgcattgtggctctggaccgtgatttccatgtgcactgctatcgctgtgaggactgtggtggtcttctgtccgaaggagacaaccaaggctgctaccccttggatggacacattctctgtaagacctgcaactcggctcgcatcagggtcttgacggccaaggcaagcactgacctgtagagtcaatagccagctcagctgccgagtgcatgccagcaagaagagcgcaacacaagaaaaagataagagaagaagtagaaaaatagaggcatagctcaaccactaggatagtctctgttcttcatgtgctattaacctttctgtagaagcgcatagagaatacgatttgtctacgttcttaccaaatacacatttcacatttaatcatgcaaggccttggtgagcctttgttccaaggacttccacatttttgcacagattatactccgtcccattcacttctgcattcctgagacttttaatcctcatgtttgtctcacttctcatgtggttgaatagatttttagtgtggtatttgctgtcacatgatttttcctgggtgaatgtgccagcctgcaggtgccttaagtcttgtcctgtctgtcacttttcctctggctgtggctacaaaaggcagtcattctgttaccaggtattgaaaaggtgaagtttcccattgcactacacccctgacgtctcttgctaaaataatggtagggggatatttttctatgttaagctataaagagtttatttgaaaaagttaacaggagcccactttagtctgcaactatccaaattcagcagtcaaggctcattggaaaacattgattagccaatatctaaaatgtggggaaataaaaccaagtttcaccactgtgctaaagaggcagaattctaggtgtatctggaaggcccgttgtatttccacaatcccaccctgagagttagctcaccacactctctggatataagactgtcaggcttgcttttggtacatttataaatctatccaactcttcatccttaaagcactgtgaaacttcacctaatatataagcatggttactgcaattaatatttatcttcagaaagataagtattaaaatgaatcaaattcttatctttctttctttcactttatagtgacccaaacctaaatctcttttgcctgaaaattgcaaatcgggacacataaaatgaaattataggaccatgtttcatcttctttaaaaaagagaaaaaaaagctgggaaagattgtgaaaccagagtttattattcttacaatcctctgtaactcaagtacatactgcaggagacattttcctatcatcaacgtgacattcacaccacactttcaaagacaatcgctgaaaaccaaattgtctttctgaggtaaaaatatgcggaatgcctgcctggaatctttatgcgaactcttattagccagtgaaacacttgcttgccaactggagccagttcgcttcgttaagaggagacacctcgctttgcagttgcagttggccattattgtaaagtcagtatctcagaatgagatttctcaaagctttctttaaatcttctacagatatatacctttaaattatggaataccttaaatattacagaaaggtataaataataatataaaggtccctctatagctaacaccgttctagaagtatagtcactttaaattttttaaactccacaaatatctttttatctcttttatatagtactgggagttgaactagggcctcatgtgctcggcatgtgccctggcaccccagcatccccagctcttccgtgtctttttcttttttttttaatctttatgacatgatgattttctagtctgacagttttaattttaacatttagagcaaaaaaaaaaaaaaacctgtttaattacttgtgcatgtttaaaattgcaacccatgcctcaggaattccataaagtttattttacttgaatagaagtcatcttaaaagtgattaaaagaagcccttaggccattgtcacacagcccctctgggtcagtctgtggcttattgactttctccacaggcagtttgcctgttagaatccccaaagctggcattttggggcctttcccttgccccctgctctcacctggcttctcttctcttgagattcatggaggcagcctgtggatctcagaattcagtgggcgctctctagctctgaatccctgtgctgcaaatcaaaggctcacctgtgctggtgacctcgaggaac

SEQ ID NO: 25 - protein, 612 aa, Mus musculus
LQISTMSHPSWLPPKSTGEPLGHVPARMTHSFGNPSISVSTQQPPKKYAPVVAPKPKYNPYKQPGGEGDLLPPPPPPLEDPGTIPPGPGHFPPPPPLDEGAFKVQQGNPGGKTLEERRSSLDAEIDSLTSILADLECSSPYKPRPPQGSASSIDPVSTPVTGHKRMVIPQQPPLTATKKSATKPQPAPQAAPIPVTPIGTLKPQPQPVPASYTTASTSSRPTFNVQVKSAQPSPHYMAGPSSGQIYGPGPRGYNNQPVPVSGQCPPPPTCVGTDYAYIPPSGHPPESGYGYTSNQGRYYEPYYAAGPSYGGRSEGDTAYGQQVQPNTWKREAAYAPPASGNQNHPGMYPVSGPKKTYITDPVSAPCAPPLQPKGGYPGPMGPPSIPPSFRPEDELEHLTKKMLYDMENPPADDYFGRCARCGENVVGEGTGCTAMDQVFHVDCFTCIVCDVKLRGQPFYAVEKKAYCEPCYINTLEQCSVCSKPIMERILRATGKAYHPHCFTCVMCHRSLDGIPFTVDACGLIHCIEDFHKKFAPRCSVCKEPIMPAPGQEETVRIVDRDFHVHCYRCEDCGGLLSEGDNQGCYPLDGHILCKTCNSARIRVLTAKASTDL

SEQ ID NO: 26 - DNA, 687411 bp, Homo sapiens
  misc_feature (1)...(687411): n = A,T,C or G
tattgcagggtttattttatatatatttgctggcaaaaagaaggaaagagaaacaatttatatgttttttatttataataaaaatatttattataattatataataattaaattatagtaaaaatatttatttataatataaatataaaatgtatattatattataattatatataattatattgtaattaaattatatataattttatatattatatattatatatattaaattataatacagcatattgtaatacaatatattttatattaatatagtatagtaaaatatataatatataatataatttcattataataaaatataataaaaatatttaaaaatgtattttatatcttacatatatattcaaatatatacatatatttatataaatatatacttaatatttatatattaatatatatttttataaatatatatatattatataaatataaatatatatttatataaatatatataaatatatatatttttaaatatatatatatttttaaatatatataaatatatatatttaaatatatataaatatatatttaaatatatatatatttttaaatatatataaatatatatttaaatatatatatatttaaatatatataaatatatatttaaatatatatatatttaaatatatataaatatatatttaaatatatatacatatcaaatatgtatatatattttttctcttttttgtagagagaagatctcgctatgttgcccaggctggtctcaaactcctaggctcaagcaatccttctgccttggcctcccaaagtgctgggattacaggcatgagcccctggccttatagcagggtttaaattacacccactttgggggaagagagagtggtgtgtgcaggctttggtgccaaaggcttgcacatggttactggctcagccacttactataaaatttgtaaaataggcaccatggacacatctgatattaagcatttaaaaagaggagctgtgtgaaaagttttgttgactacaaagagctacagacatcttcctttttatcttgatgtggatgtttatgcactgggaattggtggggccatctttagagaaggggtgggccagtgaagacactactgaccataccccaatcagaaaacactcccaaggggctcacttccccactgtgcagtaaagaggttttgcactgagatttggaggtacagcacaaggcggggaaagcatgagccaagttttgagtcctgtggaattgagggtgcactcctgcctggggccaggggttcttgtagcaatataaagggagacgtggctaaaaacatagattgggctcatcctggaggccttgagtctggcctgagggtgagtggatgctatcgtttgtgttgtttagagcactggtgaggagtcaactgggaaaatctcaatgaaatgcatctttaggatgtgccgggaatcttggcagtaactcaggagggcaacagggaatcttgcaattggagtagcggggggtgattctcaagttttggacacattctaagtaactttttgcagtgcttcaactttttacttgagtttataataacaatggcaatattttttatagttgtagagctatatgaaatatttttacacctgttggcttcattgttcatacaatatcttagtgagggggaaggtaggattgttttcgttcctgttttacagacaaggaaattgaggctcagagagcagatgggatttctctggccgcttggctggttgatgtggaagtcaggagtgaggatgccaagtttcacacttcttcctgtgccaatgacctggaggagtgtttttctcaaactcacatttctttatcctccacagtcttgggtgtcactcttggaagtgtaagatggtcatgagtttcaaagatttctgagataagctgttaagattttcaaagatgagctatagagaatttgggacataaaatgtgtttcttccagtaactcttgcttgctatcatgttgttggttcaaattgaacatgttgataagtgccagggaggaaagaaaccagtacctgctacttattgggcaccttttttgccctgaactcagtactgcctgcttttccatttgagtatctagaaacatttatggatggagtgattgtaatattgtacaattctgtcaactagtttattagctaattctcataaaagccttaggaggtagataaacaatattattttccattttacagatgagaaaactgaggtttagagagatgaaataacttgcttataacttgcttgagagaacacaggtcctaaatagattataatctttttttttttttttttttttttggcagagtcttgctctgtcatccaggctggagtgcaatggtgcaatcttggctcactgcaacctccgccccaccaggttcaagcgattctcctgcttcagcctcccaagtagctgggattacaggtgcacaccaccacacccagctaatttttgtatttttagtagagacggggtttcaccgtgttggccaggctggtcttgaactcctgacctcaagtgatctgcctgcctcggcctcccaaagtgctgggattacaggcctgagccactgcacccagctgtaagtagagtataatgtaagttttctaatttgagacttctttcttccttgctgcaccccatctacgccatgtgttgcccatcccactggtgaaaatgcagagctgcttgttaaggaggtacatgtcagaccttggaatttactggaatcagacctggaaggtactatgaagagctcagaaggctggtggttttcaagctgttctcttctgagcctgagagactccaggagtcatcttgagggatatagcacggagggaggtgaaaagtggtgggaagtggaggaaggaaggggaccgctagagccaacctgagtcgctctgctttttcctattttgtaagctaagcattgtcaaagcatccatttaaaggaaaagttctgctgctacatataaaagttaaaaaaccactgtgtctacccttccttttgctaacactgagaggcagagtggttcagcacaaggggacacaaagtggcttagcacgagtcacgagatgtgacgggtctgagacctctcagcctagagctcccttacccctgggccactttgttagacacacctcctttaattcaaatccccgtctcagtgggacatggctttttcattttttcaaggaaaggtttaatctgtccagatccctgtgaagatcttggctcttggcgcacctgctggaggttcgaggtcctgcaaccacagagtagctgcaggaccttcaggatgtcccgagccacaaggtctttgacctgcattttgcaacctggttgtgtctcccctttggactctgggaaccttgctgagattggtacaatatctgtgctaaaaaggtttgaaattatagctagtattgtgttaccttcctggtccaaccttcacagacattgtctgactaagtatatataactcttgagtgttcactgtgtacaccggctcacaagaaaggcaaggttcctgatcccaaggatctaatggagagacagaaacaaatataaacttttgtcaactatttcagagacagttatttttgttatacaagattgttatgcatgctagttatgtggagaggatttcatctcttagaaatgagacggggagaatctgggcgatgagaaagaagaccagaactggggagtacagtctagaattgcaaggggttgagtttgctatgtgaagcagttagttttggactgttgcacttactatttctgagatttgagcatctgacttttcctttaagcttttgttttctcatttgtaatatgggagtgagagtgcctagttcacagggtcattgctggggttaaatgagataatgtatgtaacctgcttagtataatacctagcacagagtaaacactcattaaattttcattgttatcgttgttatgatttggcagcgaggagtcaaaagagcctattttcttaaactcatcaatggtataatcagagctttgcatctcgaagtaaaggaacactctgcttttattatttatttatttttcactctgcttttagacatagaattcaattgcctcaggctacaacaaactggcttcaatctacctttctgagttaacttctgtttatttctatccatctgcccacttctctcactagtgacctacacattttcttttttttttttttcttttcttttttttttttttcttgagggggactcttgccctgttgtccaggcttgagtgcagtggcataatcttagctgactgcaacctcttcctgccgggttcgagccattctcctgcctcagccccctgaatagctgggattacaggcacacaccaccacgcctgtttagtttttgtatttttagtagagatggggtttcaccaggttggccatgctggtcttgaactcctgacctcaggtgatccgcctgcctcggcctcccaaagtgctgggattacaggtgtgagccaccgtgctccacccacattttctaagcttgattttaacttgctggtctttgtcatatcttctcagtcattgctggggttcaaatctttcttttctttttcttcttttttttttttttttttaaagatgggaatctcactatgtttcccaggctggtcttgaactcctgggctcaagtaatactgccttggcctcctgagtagctgggaccatagacatatgccactgtgtctggcttaaatatttccttctgtcggaatgccctttgttccttcatctgtgcccccctgctccatcctcttttaattcctagcccaaaagtctaacccacccattgggagggattctgcagaactcatagagtttacaacatcttgtccttcaattgcagtcagtctctgtcttgaactggatttgtgagctccttgaagttgtttgtatctcacagctctttgctgtaacatccctggggattcaagcacgcacacatagtagatgctcacacatctatgcaataaattactttagtgtctttctcaaatgatcagcacaggaagcaaatgataaaatgcaaaccagaaaacagacctcactgggctctgtgcttgtcagccttgggaatggatttctggcgaagatccggcccctctacaaatgacagagatgacttggctcttttcaggaattgaagagaatcctgacaagtggcatgttgggaaaggcctgaaggaagccagaccagcttgctctcagagctccttgggtcccctgcggcccccaggtgatcttcagcaagacctggtatgtaaatgagcctcatctgctggctcagcctgctgcccactgctagggatgctagaattccagggtaagcttctgtgagccgggctgggaggtttagtgggttggagattactagctttttggtatctgcagcttgaaataccttgtgcccttgattaattcatgcttgggagcatcctcagtgctctctggaaaatagctccttactgtatgtttatttccccacgggcttatttcagagagactggagcctgtgtttctaacagcttctccaaggaaaacatcgcaggccacgtttccggaactgagaatctcagggggtctttgaaacgtccatctctattacctccttttggcccagcatttgcttttagctgaaaagggagattttgtcttgagccttcctgtagacatatgtgacttggagtttgaaaatctgacagctgctgctgagctttgaactgcaagagtgagcagcatatagacataaccccgtagaacatcaaatcattttcctttaattcccagagacttaatgtttctttgtcttgcgaatgacctcactgctttttgtatttgtaatggaatgcacagtcatttgtaagtaatcacacaataatcccttacacttttataatgccttacccttttccatagggctttcactctcattatctcatatgatccttataactgctctgagatataagcagagcgcctattttaatctccaattttcaggtgtagaaactgaggttcagaataaagttagccagagttaaaacagttagtatgtagcagaattggaaagggagtctacagaattggaactggagtctcctaaaccagtgtttcttttgctccttattgctggtgtgaccttgggaatatacttaacctctctgaacctcagtcttcctatcactaaattgggtataatactacctcctgggatagttgttggaagggattcaatgagactgggaaatcatttaataaaaggtagaacacactaataatgggaggcatcattgtacttactacatgggccttgaaggcgaacagtgccatcagaactgtgaaagaaaataacattttttctctctttttagaaagacacaggttcagaatggtgttgtcagggatcacaagctcccagccccgtgattagcaaattgaccctgctgccctgtctgctggctgctttcttattctgagaattgtgttgacaagaccctcttttcctacagagctctctcttaatgttgcttggaatagccttgtgtcctggagacagttttaggtctggcaggatctgagaacaggagtggggatcttggaatgggatctgcatccctgagcttcatccacaaagggtgggaatgtggcttgggctgtggggtggaggtagatgaacagctggacttgcaggtctatcttctgttgtttctcaataaagtagacaagtccatctgatgggtgtttagtagggtatgacttgtgagtccacaaggccagcagtatatatgctgaatggactgcttagcagtaacacactggaaaaatccaaaaagaatggatttcaagttggcaaaaaatgcattagaagtcagcagtgtgatgtggtcaggagaacaaccagagtgactgtgggatgaggtcttggatagctttgtttctatatacagtcagccctctgtatccatggtttctgcatccatggattcaaccaaccaaggctcgaaaatattaaaaaaaaaaaaaatccaaccataaaaaaatacaaataaaaaaaccaatataatataacaactgttcacatagcatttgcattctcaggtattataagtaatctagagatgctttaaagtatacaggagatactacctcattttatataaaagacttgagcatctctggatttcggtatctcaggggtcctggaaccaattccccatggatactgagggaacgagtgtacatactcacctacaaaaattccaaaccagtgagacagacataggttgaaatatggtcctgagaggcagaacgtgaagcaagggatggaaggccggggaggaaccagatttcagttccgtgtaaggaagaactttctgatggaaagatggaatttgcagtggcaggagataatgatctttgcttcactggagacctcaggaataccaatggggcaggcactgggcttaatggcctttatggccacttctaattttgagatcacagagctaggaggatgagaggcacacatatattgaaggaactgaagggtctctctctatgtggatgtggaaactgatctccaaatgtttgcaagatggagggtacgtttaaaatatttcattctggttttcatattgatctctgtggctctccccttggtctttggtttttaaagcttaagaccattcccagaagctcttttccatggaataatctcctttctttgctggaatgctcctgttgggatgcaggaagggactctgagctcctgacagaatgaagaccacccctttttgctctccagacctaattttgacgtcccacgcccacccgctgaggagggttgcaatggcgagatctctgtcctgaattctggttctggcatgcagtggaaggccctctgattctgtttccttacctattttaatagtaacttatatttgtgttccttcattaaatgtacaataaataataaatgtttgcttacggcatgcttgttaagtataaaacaaataatcaaaatgaatgtgtaatgaccctttggatagaccaagtagaagctgcttttaggacacatgattggaccatttctagatatctgcctaatttgtaaatgaaaaatatgtaagctacacaaggagcactgactcgtctaaaatcttaacgactgactgatttgggcttggggtttggggcttgggtccttcatgccctgatcagagctgtttatagcttgaagacttcctgggggtgagaacaagcaacctcttggtgcagtccaaagccaggaaatgggtgacgattttgaaaaaggactcatctgacctccagaaagcctttacaaccaacagtagaacgagatcactaagaaacagaaccaccgggaagccaagatgtggtacttggattcccatctcggagcacctcctatatcccgacacaccatttcccctagtgtctgatctctctttctcctcctttaattcagtctggagtcattttagatcagattcattcctgattggcttcactgctccaacttagtcatcacagaaccttagggttggaatccatgttacaagttaaactgagcaattcacccccacttttcctgacaacagtgttctcttgagagtctggttttattctgagtcttccagcccggtgtctgtgcccatgaaggactcatgccaaattacattctcaggaggactcccagaccaagagactctgggcttgggcgtgagagacttggggctgttctttttctttttttttttttgagaagaagtttcactcttattgcccaggctgacatggagtttcactcttattgcccaggctggagtgcaatggcacagtcatggctcactgcaacctccgcctcccgggttcaagtgatactcctgcctcagcctcccaagtagctgggattacaggcacacaccaccatgcctggctaatttttgtatttttagtagagaccagttttcaccatgttggccaggctggtcttgaactcctgacctcaggtgatcctcccgccttggtctcccaaagtgctgggattacaggtgtgagccactgtgcccggccgagaggagttgttttgagactcacctgccatcataggaaccatagcttaaattcttgtgaccttttcaggtgcatctcccaaaatatctcccctccaccaaattaatgatttatttcataaatttagttgcattctggatggtctcattcttaagatgagcttaaagcctttcagaccagtcacttccttgtttggggtggaggaggttttttcctggaataggacagtgtatggaagggttgagaatccacttctttagcggttaataatttactccgagtaaggaattctttgttaaagtggggcatgttcttcaagtgccagagaagagagaagggtgatttttctgacatcctccagcctgcttctccatatttggaaatgtttacccaccaggctgatctattggaagagagggaggtgactcagggtttaggagaagcaggatttgaattcttgtttccagaaacaaagtcgtccccccaccctgcccccacccttcccccttcattcctctgtcccttgttctggaagctgaggcgagaatgtctcagttctgttcccttcaggcttcgagaccaccgccttgctgtgtcccgtagtggactgagggcctgcaagagggagtgagggctagtggagggccagctgcctgtgggggctggacatcgtgtgagtacatcattactgccatttctgctcacagacctggggcttacagcctgtgggctggctcacttgcatggtgatgggacacgttgctgggagtgctggtcacttttatttgggggtgtggacagctgctttcccaggggagtacttcttacagtgggatttcaagacaagatcggcctgaagaaaaattatatttgtatattttttaaaaagtaggtatttcctctcatctgaggcctaacttgagttgggtagaaagacaatttgggagtgctgttgtctgatgattaaggctaaagcaacaagctggaagggatgtcgggatgtctgtggacatgtagggaggggtagttttagcttgaaaacagttatggtgggatttaagagtatgcaaaatgttgatgtgtagcatttgcacagcatccacggtctggaataccttgtgtgcaggtcactgtgtagatttgatgagttgtcagagttggaagagtcctgcagagttttcagcacatctgtctaatttcacagtgtgagataatgggcagcagagacccaggccctgaagacagatggctcattatgtgggattagaacccagatcttctctctcagttcgttctccttcccctagacttaagctgccccctctattgcgagatgaggaaattgggagatgttagaactgtccacacttactaatctagttggtgggaaattgaggactagaacctacttctagttcagacctcttcccgttaggatatatgggctcagatgcctagatttgttgtttttgtatgaggctcttttcttttctttttgttctttgatttttacttacctttcccttcttttgttcatgtgaatgtcgtatgaatgcaaccttctgctctcctttgctccctatatctttctctttcacgaaaggggatgatcacttgtccaaaaggcagaatgaatagtgtggaacttcctttctatccatggaagtgaaaattatgcaattttccctgagagaaattcagcaaggcttcccatctgagcctctaccactattcttgaagctgtaagaattctggaatattatgcccattcaaaggtgagtcctgattctgattagattttaaacacacacacacacacacacacacacacacacacacacacacacacactttttaagcctaccaaagcaggatagagacccagaagacaccgacctattacgtcacctcagatgtttcacagccatcaggagtaactctttgtagtcagctcagtttcagatcaacttttttttttttctttctttcttttttagacagagtcttgctctatcgcccaggctggctggagtgcaatggcgcgatctcggctcactgcaacctccgcctcctgggttcaagcgattctcctgcctcagcctcctgagtaactgggattacaggcatgcaccactaggcctggctaatttttgtatttttagtagagacagggtttcaccacgttggccaggctggtctcaaactcctgacctcaggtgatctgcctgccttggcctcccaaagtgctgggattacaggcatgagctgctgcacctggcctcggatcaacttgagggccttattttccagtgcagggaagatggtagaaatatgttttggggaagcattttattaccagtggcattaggtggcagatgtaatagagcagaggaagtgctctgagacctatgtttgttctggccagttttaaagagaggggaagcgactctctaatctgctttgaagcaagtgggaggagggaagttgcacaggactcccaggaacctgtacacaatctgtctccttctgtgaccagctgaggctgggtggtgactgtaagccctgttcatgagacaggaggagagagccttgaagaaggaaagcctggggtgtttttctgtggtgctgagggacagggacagtaagaggttggagtaaataataccagtatgaatactaatactctgaataaggacagctgacaagcattggttgcttaatgggtgccaagcacagggctaaacactttacctaaattattgtggcactatagctgcctttgagtaggaactattttttaaaatattatttttaattttggtgtaatacatataaaatttgccatcttgatggtttttaagagtacagttcaagcctgggcatggtggctcacgcctgtaatcccagcactttgagaggccgaggtgggcagatcacttgagcccaggaattcaagtccagcttggccaacgtgatgaatccccacctctactaaaaatacaaacattagctgggcctggttgcatgcacctgtggtcccagctactcagaaggtggggatgggaggattgcttgaatccagggagtggaggttgcagtgagccaagattgccccactgcactttaacctggatgacagatcgagaccctgtctcagaaaaagaaaaaaaaaaaagagtacagttcagcagtgttaaatacattcatattgctgtgtaatcagtctccaggcctctttcatcttgcaatctgaaactttgtacctataagcaacagctacccattttcctctcctccagcccctggcatcctccattctactttctttctctatgaatgtgactactctaggttctgtatctaagtggaatcataccgtatttgtctttttgtgactggcttatttcactaagcgtagtgtccttaaggttcatccatgttgtagcatgggtcagaatttctcctttttaagggtgaattatattctgtggtaatgaatataccacattttgtctatccatttaggtactattttttaacctccatgttatagaagaacagcaaccagagacttcaaagggttaattaagtaagtggcccaaagtcacatagtcagtagtggagactaattttacctaagaatggcatgtgatcaggagtaagcagatattggattctaattggcaagagtgtgacaaatcagggtgcttctcaactggatggtgacacctccttacaccttgctatggcatttcaataaagcaagtgttccaaagggctgtacgcagctatgcttcctttcttttgtattgggctctaggaagcccatagctaaatttaaagctcacctctagcaaatggtatgagacatccagctcttattttttgtatccctttctcctttctttgctttattttctcctctccttacccactttctcacttaaatcatgaactattagcatcttttgtcaggtacctcagatcatttctggaacaaggcagaatatatagatatgtggcatgatatctaatattttagtaattattaagtctgtggaatagtaggccaaaactggccatgatttttctgacttgactctgctcgtcttcttcttcttccttttttttttttttttttgatggagtctcactctcttgcctagactggagtgcagggcgtgatcttggctcactgcaacctctgcttcatgggttcaagccattctcctgcctcagcctcccgagtagctaggactacaggcacttgccactacaccccactaatttttgtatttttagtagagacggggtttcaccatgttgaccaggctggttttcaactcctgacctcaggtgatctgcctgcttcagcctcccaaagtgatgggattacaggcatgagccaccacaccccacctaactctgctcataatgcaatgtttcatctgggcaatgccctgcccctttctgagtctcacttttctcacctgaaagaggaggttactgttgatgacagtgaacatttaggctgtgctgagttttacactaagcatcctgtctctaactctcccaacactcccacaaggcaggtgctattatccccattttacttttgagaaaattaaggcctaaagaagtgagaaagcttgtccaaaccgctatagctcttgggcaaaggcattagtgaccaatgtgtatttgactccaaagcccaggatgttagccacagtgcagggctactatccttttatacaatctgtcaggcttcttccatccgtggcatgtattcatctaattttattaaatctttattgagtttccacttaggtgccttgcactgttctgggcattatcccagtactcgatttagagcaaagagtaagacacacacaacaacgatctcttggtgcttacacgctgctgcaggtgtgtgaaggaggcagataaaggaacacttaaacaagagggactgataagtaacccaagggaggagtcacaaagggcattctgactgtgagtgagtggggaaggactctgggaggttatgtttaagctgagatctgagtgacaaggaggccaccttgtagaagttgggggaagagcactgcaggcagtggagacggtcaatgcaaaggtcaaggctgtgaagtgggaaggagtttgtgtttgaggaacagaaggagactgatgtgctggcaggatgtgggctgcaggggaagaagcaggagaaaagaatagggtctagcaggtggtggtaagtgagagacctgagcttcttagacctgagtccagatgtgatgggttatgtgttacaggcatctttccagctgctgtggagggaacctgatagtaaaagggagtcaagggtagaagcaagaaggttaggctagacttttaccgtaattcaggtgtgatgtggtggtaactttgactagggcatagaagttgggcaggagaggtaagtttggggcatgtttgggagtgatcgtctataggatctcaagtgtgatttccttcagagaaatgctgagctaaatgggcaggaatctgggatactcagagggaaatgaaaataggtgccctagggggttgcccagataagcagctggcgttccaagaccaaagagtatctgtttctcacccctctcccatttagtttctaaccttgagctttgggccagtgcacagaggatggtggcttcctgcctttggcttcccagctgagagctgttggaacgccccaaaataagccctgcagaacgtgcagcttcctttgctctccctgggtatttttgtaaaacattctttcccaccaagaatgaggaacgttcagagtgatgctgactttatgggctgtatttaacatgttgttttttcatggtgttgtctgttcatgcagagatttctgtctcctgtaaactccctggtaaggaatcttcaatctccatgtgagatgggtctggaaggctcagtgggagcccagaagagctggggtttgaaagcctctccttgtcttgaggactggactgcggtccaagggcacctaccagccctcttttttcatttacatttgaattcacagttgctgccctttggcagttccctgtaattccttttaacaggctgggctttcctgcagatacttcatttttcaggtcttggagaagttaggtagtggctgaatcaggtagagaatccaaaattctgaccaagccccatcctctagccaccaggccaaagcaacttagcttgtgacctcatcctcctgtgtatcccctggcaatcttatactataatcagcctaagcccagagatgctcagaaatcatacactaagtcatctaaaactcatttctgaggctttctcatgcgcccctcttgcagtctgtagttaccaggttttcaaataattagcataatctcttaaaaacagtgttttgttattgctcattcaagtttcttctaaaatttcttttatattacctattcattgagttgacaaacatttattgagttcttactgtatgccaggcattgtgctaggtgctggggattgattcaaagataatttggaggcgtatggaaggggagtggataattacagcacagtgagataagtgctataatagggggatatataaagagccagaaatagcactatgaataacatctttgaacaaattgccttcttttttccttttggattattcccttatgtatattgcccaaagtgggattactgggtcatttaaaagatgaaaacaatttggcacaaaaagatgtaatgacttgcctggggaatacagctcaattttcaacagagaaagaaaaaattgttgacaaatccagatttagatcactttaccaggaagatggggcagtttttatactaccctttcaacatggtggcttttaggggcggggtgggggggatttattctaaacatgttagcctgcgtgtaggaatcacacgtcctcatatttaatctcacaacttgattgttctcacaagaacctagctgtatacatattaccgtttccattttacaaatgaagaaactgcacccttgataaaaggaagtaagttgctcaaaattccatagttaataagtgtagaatccaagggtcaagcacagttccttttattctttgactctatcctgttccccatgctgtgtttaccaattgagggtacctgtgctctagccggggcccggaatttaatatttaatgagtcacggaggctcttaagatgatggtcaggctctatgaaataggtgtagattttcttacctctgaagtcatagccagggaacaatgtctttctgtatattgacctgaaaggacccaagggcgcattattcctgaccctggctcaggtgctgaaaggctatttgcatagccctactgttagagcacagaatcccaagtaaagctgaaaccatgccacagttttgctgtgaaacatttattacttttctagtacttaacagtattaagtaaaaactcctgcccctggtatccaggacctgtcataaatggacaccaacatcggtccactgtgggtccatgtgggtccttgatgctcctgcttacatatctttaaatcaaacacatttcctaccaacccccagatatatcttgcactttctcaccttcatgccttagcacatgcctttcctttagcctgagataacctctccaatcttcattcatagaactcccaatcctcctgtaaacttctgcacagacgccatcttgggaagggaataatccttgatcaccacctgctctcccatccattagaagtgatctctgtgttctctgttctgctaactcaaccacagttagctgtgaggcaatagagtacaaatgtatgctgcatatgagcatgggatatggatttgaatcccggctgtgatacttcctcactgtcagttaacttgcttgagcctgagttttcccatctgccagatgggtgtgatacaataggtgctccccctgaaacccaccatgttgacaggagtagtataaaaatggtctgattctcccggtgaggtcacgtaaatctggaatcgtcaacaattttcctttcctttgttgtcatgacttttttttatgacatcacctcatgtcaccgtgtggtatgaaaatttgcattgttacctgtgcttcttctgtggcacttgtcctcccttacttgatgtcttatctctccttctagactgggagctcttcaagggcagggagggcattgcatctttgaaggccttgacatatggatactgctacaaagtttcctttaagggaaaggaggattccatacaacctaagtggtgacatcagcacaggctcattactaatctcatgtcacgaggtttcaggcctggctgagaactctgtgagctctgtgatgttgagcttcaggcacatagagtacaagctgggtaggcctctggctcctgcttaagagacagcagaaaggctggatggagcctgtctccagaccagcttcttctgattcaaggagttgggtgggactggcagttcactgaaggcagagtggtagtcctgcttggaacgtgaaactttgtttctttcctgggccttccagtgggtctgttatgttggtgagagtttcagacctagaggaaagggtcactgaaggtatgggttaagagcaactctgaaagccacctgccccccgacttctctgtgagtggggccacagggagaagatcccttcataggtagctcccctacccttgctatgcttggaaactgaccatggaaagggattcatttcttaaagggatagggctaccatttaactttctattgtgtcacttcccgaaacgcaacacctatggcttaagatccaagtgctttagaacatgagatacaaggtcttccaggctctggctgccacatccctttccaggcgtgtgtcccaccacattcctctgcatcctctgtcactggcctcaccagattagtcactttctctgagaacaccctgaactcatccttctcaaggcctttgcacattgtgttccctgagcctatttttctcctcctcatccgtggaaatcctcttgggtgttcaggcatcgtttagaagtcacatcatctgcagagaacttttagaccctcaaaaggacgttgcatgtactcgtgcttttctacacttttcattctgtcttttgtgttccagtgtgtcccccattgaggctcttcgacacccctaggcatgtccaactcagcacctacacctgctaggtccacacactgtgttatccaagacagaaggtgttagcaaacctctctttggtgcgcccctgaatgcagaacatgtgacattctgttaactaacagttgtgccagagtggtttccatagcccatactggggttcccatgatttgtttgatcatgagcccggccattcgaattgtttttgaattggtctgatatcagctagttaattgttaacccttttcaggtttgtttcccacataccagtagatgtctgcttagtgccagggttctgagctttttatttcacttaagaatataatagcaaggtagaattcaggaaagatttacttgctgttaatgtgaacttttaaaaaaatagtttgaaatgtaggctttgtttttatcccaaagctccatgaaatatgaaaatagcaggagttttaaaggtatatttccacctctagaggaagaactgtccatattatagttgtaattataaattaataaagcctgtgtcatgaaacttgattttgaacgcctgtgttcaaatcctggctttaccacttactagcctagagatattggatgagtgtctaacttctccgttcctcagtttcttcagtgttcaattgggaaatttttcttatggttgatggaaagtttaaataaggtcttggatatgaaactgggattttattagtgtgtgtgtttcaaaatgtggatttggaggccatttaaaaatagcatttccaaaaagtttgcttttaaagcaaagtacttagatatataaatttttatgaattttttttcaaatgataaaataaatgagtttacagtcaggagacatacagtatctaacaaacttagggaatatgcttggcttacaagacgtggttttagtccacataaattagaatcacagaactataggctttgagaaattataaaagccttggaaggggtgaacgtgaattagtgcatattgtgtgcaggctttgtgccatacgtgctagatatgggatcccaggaaatggttgcatacaccttgttgggtagatgatattaaccctgttttgcagacagagaaacctgagctttgagaaaatcctttacacaagtccaatatcaaagtctggaacttcaaactgcactcctgatggcttctagaaatcctttccatttacagatatgacaagacttgctttcacattgttgattttttttttatcctctctttctctgtctctgggggcagcactaattcagggccagatagaactgtgaaaatctgcagtgttgatgtcacataacttgtttaatgaatctagattagtgtcttgacttttcctgccaagaatctgctcataaagtgtcttgttttgagctcctttaactgtactcattcatcagcctttacttattttcttctcttttggagagatacttgccattgcccataatgtttgaggtcaggagtatatttgaagagggctttatattttcttaaaaaaaatacaggtggaaaatcaagtttatcagctatttcataccatcttcttctgccatttatgggcaacatgtggaagaggtggcagggagctgggagtttggaataatgtgtctcatcttgaatttgtcgctgaccagggaaaatactcaaggccaactccatcattcccttttgggaattcggtgcttcagctgtaaagagtgagggcactactaggtgattcctaagatttaaaattctgcatgttttgtggtgtcaaaaccatcaatttctggtgagctgcgtgatcctgcagctgtttctctgatacttttcaatctttagatttaatctattcaacaatgtataattttttaaagggaagcttttatagatacttctgaactataaccgggtgggggggataaatggatgttaaaaaatagaaaacaaccaattaaatagtatatagcatgtaattctccttggaaacttaccacgaaattgagaagcactttaacaactggtaatttaaattgcgtttgaactctgctaatggtttgtttgcatgggaacttcaatcatttcacagtggttctttagcaaagctgcttgttctctttatggaaaataagaaaaaattattaaaagagaagttggctatggaaaatggagaccactttcatttgtgcctggagggaagctggagagtgtgagtgagactccctcagggccaagggtggagagctcttcctttcagtgaagtttaaaaatctgggaagtcagatgccctttgctgctgttgtagaaactgttgtgatttgtatctctctctgcaaggagaagctttggttttatgcagcttgcgggtgagggtagggacaacctttttcgtttgttttatgaaattgcattgttcacaggtctaatgttggcttcctaacaacccatttctcagtaagtttgaaattatgcctctctctcctttcagtggaaatggctttcagaattccaatgtccttgaagaccactaggtctcaggaaactccttgcttttctgggctgatagtgattatactccattttgcctacttaatttctgtctgctgttgaggttactgggagagcgttgaaataggtgttcgaggcctggatttgtaagtcctggtttggctctaggtgtgactcatgtgaccaagcacaagtccctctgcccagtgtgttttgttgtcctttgtcaaagcaagcagtcacttgatccagtggatcaagtggctcctgaagaggtcacctccttacccaggccaccgggttctcttgtcagttggaaaagttgaggtgggtcatttaaaaaatccctcccaactttgaacttggaattgttttgtacacaaaacaattgtatgattggctaggtaatgtttacagtgacaacaatgaaatgggcatggtagtttctcgtatgtggatttctcctgcatacatgaaagacaagttttataacagcccttgccttgggatacttgtctgttggcatacatactgtgtaatcattagcaaaacaataatagttgctaatgaaataaaacctgtaataagggctgtattaggctattctagcattgccataaagaaatagctgaggctcggtaatctataagaaagaaggtgtaattgggtcatggttctgcagtctgtataagcatggcactggcatctgcttggcttctgggaagacctcagggagcttttactcatggctgaaggcaaaggaggagcaggtgtctcagatggcaaaagcaggagcaagagagggagtaggcagaggagttgccacacacttttaaatgaccagatatcatgagaacacactcgtgatcgtgaggacagcaccaagaggatggtgctaaaccattcatgagaaatccgcccccatcatccaatcacctctgcaggccccacctccaacagcaggtattacaactcaacatgaaattcagaggggacacatatccaaatgatatcaaggacggcttactgggaaatgtcaagattgtttatccctctgctgctcactgattctcacttttcaggcaaggaaactaaagttcaaagaacattaggtcctatagttagaaatttgtctccaaactcatattccttttctttttttatttggtatagtttaggtttatctgttaatttttttcttccctacaatttgagtatctaactgacttgcctctttcacctccattattaagatgaagctgttttcccaggagaactaggagagctgagatatgaacactgaggcatcagcattctctttccccatcattctgagtcaaattagtgaaataagagtgccaggatctgactaggagtttaggaggtatagaagtaaaccacggcccagtcagagactttataagcctgggaatttctgaagctggttaagaccctagagatacataagcaacacccttctgtttttcataggtgggaactttgaggctcagagacagagcagaagacagaacctggtcttctgattccctgtgttctgcttttttcattgttccactggacgctcatcagagggaagatctttttcctcaattggtgagtcccgcacacaaaaagaacacatttgccttttaaaatcaatgtatatgttttaatgagttttaaacatcagtgttttccacttaaagtatgggcatcagtaactaggatgcattaagaataagagaagaactgaaatgcccttccttctttcttgagttgcttttatggcaatagacaatatataaccatgctaataaaatgtgtggcaaagcaaaggcagagctcagctcttggaaggtggtagcattgaacttggaggaaaatttggagtaacgatgatttcaggttgccagcaattgtattgcctccttctttctcatttggcatggaagaaagtgttcatgaaatggaaagaccaaaatgaaaatgtcactgaacagtgtttgggcatttacaaggaaagaaagcagtattattgagtgtctcttgtttgcccttgtgcaaagtgctgcttcttttgtgatctcatttcattttatgtatttatttttttgagatggagtcttgctctgttgcccattctggggtgcagtggtgccatcttggctcactgcaacctccacctcccaggttcaagcgattctcctgcctcagcctcccgagcagctgggactacaggcacataccaccatgcctggctaatttttgtattttcagtagagatggggtttcaccatgatggccaggctggtcttgaactcctgacctcaggtaatccacccgcctcagcctcccaaattgctgggattataggtgtgagccactgcgcccagcctcattttatttctataacaaccctttggggcagagcaggctaaatttgcttaggcaaagggtgtgagcctttgttttaaagggcctgccagagctccaccaggatgtgaggtgcaaatcctgttatgtgctcagaaaggagaattgtgaccaggtaaggtaaactttcccttgtgttttggtgtacctctgtacttaatgggtagagtagaacattatgttctaaaaaatcggggtggtaaaaagaatcaacagtgtggaataccctgggctctaaggaaagctgaggaaattagtaagggaattctgggtgcgacttccacttaggatcctgattcgatggtccccattggctgaggccaattcatatatgcccccagcattggctttgtactgagtaattaatacaccttgacatatttgtggtgtagttttccaaaacagagatgatgccattgtgattgaaaaaaaactaacttcatttaaaagtgtgactgagtttatagatgtgttttgtctctctgtcttttcttaatcagtgtatcttaaaagtacaactgactgtgtgcctattgatctatattacataaaaggctggaaaccactggtttgatgcttaaaccttagtgtctgttaaaatttcaaacatgatctggaatatattccccctagcatacgtttaagtatcaaatgaaaaatctttgtcacctcctctatgtcttgagttttttcagtgtttataattaaactgtgataagtatgaagctttgcacttggacttaaaaaaatcaagtgtgtaatgatagaaagggagagatttccttaacaagagcagactggaagagacttttatttatttattttatttttattttttatttatttattattatttatactttaagttttagggtacctgtgcacaatgtgcaggttagttacatatgtatacatgtgccatgctggtgtgctgcacccactaactcgtcatctagcattaggtatatctcctaatgctatccctcccccctccccccaccccacaacagtccccaaagtgtgatgttccccttcctgtgtccatgtgttctcattgttcagttcccacctatgagcagactggaagagtcttagaagtttttgttgttcataagctaaatatgagccaacagtggcttttgttgggagtggcttccgaaatgctgatgcagccttcacctgcgtttaatagagtatggcatctagaacaaagtgagtgggtgattctgcaaacctagaacacctggaaactggcaagtgcagaggtcatgtgagcctcaggcacagtttgaacaggactctagctctgtttttctgcagcacttcttgctctgcccttttttgtgcctgggcttcatccttggaatgttttacctcatgggccatgagacggctgcctgctgaaacccaaactatagatatccctgttcccatttaggggaaagagcctggtttgctatattctcataggcttggctgactgtatatttctgaaccagtcattgaagccaagagaatgggattatggtaatatgaaccactattctcctgaaactgaatttggacatagtcccatccaaacctcatggtacttacacagtggagaagaggtggccccgcaaaggaatatctgggtgctgttaggagagggagagaggactggaagctccgtgggcaaccacaggccttctgcagacctctttagcccccctgtcagagaccctctagagagccgggctttagttcctgcctcaccttctgaaaaggcatcagccagctgcactgtctacacgaggatgctgagaggaccaggaatgatggccaaccaagaagtgttacgggaatgagaccatggattctgctgcaagattctgggacacacgtgctcatggccatcaagaacatagaacctgggcaggacagggacagcattgcttgttcatgtgtgtgtctccagagtctgctggggtctctggcatgggataggtgctgcatgaattttcatggatagaataaatctgaaggaagtgagggtccctttcccaaagggtgttctatcgggcattggctgactctctgttagggagtataggaattgtagcacagatgaagccagactacgtgatttaatgagaatgaaacaaatgactggacaagctgggcatcgtggctcacatctgtaatccctgtgctttgggaggccatggcaggaagatcgattgaggccaggattttgagaccagcctgggcaatgtggcaagaccctgtctctacaactaaacaaacaaaatcccaaatgactggacagaaagaggcttttgacttaagaagtttgtgagggcataaaaaggcagtgagtatggtgggatgccctaacagaagtcctgacaagtatgagatgtgcaaccctagaaaaacaacatcccttcacccttatttttttgatctgagaattaggaacaataatcattgccctgcctacctctcatgtttgcttagagcaagtgcattgttaaatgccaacctgttttgtaaactataaagtgtggttcctgtatgatacattattacagttgtcttcttccttaaagactcatcttgaatataaagaaaaagacaatgtaagttcagtgcacagcatcgggaacattagacatgctcagcgtatgcccttcctgccaacattgtacctcttcctcctccgggttggatgggcactaactcgtcctcagtcctgcagctagatctgcaactttgcttaatgatgcaggttaaaattgaaatagaattatgtattattatttttcacattcatttttgcctgagacaggaggtggagggtggtaaattaagaaacccgggaagctcagtgcttgagagaacccatagaagctacagtctagcccatttggcttcttactttgttagattagataatcatacctgctgctccaggcgtgactagcccagtgggagtcaggaaggaaattatttccctctgttgataccggtttacaattgccgactgtcgccaagggctttcagttttaatatttcctctttggtcctcagaagtatcaggtattagtctctgccggaagcaaagcattggtcacttccgtcagaggtgaatgtcttggctgtctataattcctcagtcaggtgctttctgggcatgtgtgagcatttgctcagctagcttttattgcttgtatgttatttgcttcaaaaattacaagaggatttgtcgggtctgagcagtgacctatccagtcccctgaaactctatggttcttcgtgtaacccagggatgtcttgtaggaggtatgtttgctgtccacgaaagtaaaaagtagtgatatctctttctctcttttgcttccttcctcctaattccacattctcctatttcttggcttctggcacagtggagatacctctactctacattaggcatggccttaggggatccgaattctcaggtcttcctcaatgagttgctgtgtggtagacagcatctgaagtttgaatgggtagagagacctttgtagattgtggccaaatatttacacctggttcatagagtatgtgtttgctgccctgatctcagtgttggtctgggtgttagtgaacctcatgatctttaggaaactatgtgaattaggcttagtccctgaccctgagaagcttatagttagggaaaaagacaaacatataaaggagaaatacacattagaaacatattcttttttttttttgagatggagtctcattccgttgccaggccagagtgcggtggtgcgatcttggctcactgcaacctccgcctccaggattcaagagattctcttgcctcagctgcccgagtagctgggactacaggtgcgtgccgccacgcccagctaatttttgtatttttagtagagacggggtttcaccacattggccagaatggtcttgatctcctgacctcatgatccatccaccttggccctccaaagtgctgggattacaagaaacatattatttatggtacacatttattaatcaccagatatgtttcaggccttacgctgagtgcttgggaaattgagataaattatagtctcagatctcatggggcgtggatgaagagttgggagaaagaaaaaaataggccaggcgtagtggcttatacctgtaatcccagcactttgggaggctgaggcaggcagatcacctgaggtcgggagttcaagaccagactgaccaaaatggagaagcctcatctctactagaaatacaaaattagccgggcatgcctctaatcccagctactcgggaggctgaggcaggagaattgcttgaacccaggaggcggaggttgcggtgagccgagatcgcaccattgcactccagcctgggcaacaacagcaaaactctgtctcaaaaaaaaaaaaaaagaaaaaaagcattgattaatattatctcacagtttctgaaatttgggagcagcgtggatgggtgccacaagatctctcaccacatcgcagtccaggtgttgctggacctgcagtctcaccggaaggctgaactccggggaagatctacttgctaccaagcacatcgcatgatggttggcaggatttgtttccccacagattattggactgaggacttcagtttcttgccgtgtagggctctctatagggcagctcacatggcagctgccttccctcaaaatgagtgagcaagagagagtccctgagaggcaaatcacagtctttttataagttaatcctggaggtgacacactgttccctctgcctcattctctttacgagaagcgagtcactaggtccaggccacactgaaggggaggggtgaatatgagcacaaggttattaataccaggaggtggagttacacggaaccatcttaggggctgcttaccacagattccccaggtttacatggatgtgctaaggtggaagtggacgttgcctgaagcagttgaataaacccagcacacctctgtggatcaattttacttgaagacatttttgggggaaaactccatttaaaactcttaagagaagcactggtacataatagcacaggatgtaaagttggcatggcttttaagaagaaaaacacaagttttcaattcatgccgtgttcccttacctctgtatttttgccctcctcagcggtagagcttttttggtagaaatgtcgaaaggttcttgcttgagccccttgctgtatgcgtgagacaccgagacttggaaagggcacatactcttccagggccacagagccagcggtagtcaagggaggaaccatctgcagctcctctctgtgccccgccttccaccgctccacacagtctctgctgcataatgagtctgtgcaacttttaggatgttttctcttcttttctcaaactctctcctgtcccagaaacagattaggaaaaataggtcaaaaattggaatcttgagctttgattttgtccctttagttaaatttcaggggtctgcgtctcctggtgggccatgttgtgtcctgaaaagttgcataaatcaatattacacggctcagacagtgtatctctgcagttatgaataacatttgttttaggaacagagagctgatatacaacgttactttgagactgacaagaccagacataaaacctcagccaataccctctgtctggcagggagtttcttttccagagcatccttctcttcccccgaccaaagcagtccttttcaaaatcaagctccgcagtttattttatagaagatgacaggttcccttagagtccacattcacataactagaaaaattaatggaaattggagccttaaaattatggtcaagcttattagtgactttacagccaaaatgaggaacgcacagctttggtcactgagaatgtggctggccagaacgtgaattctactacctgctccatagtccctttcaactctcagcaattttttttaatactcatcttattcttttttttttgagatggagtctcactgttgcccaggatggagtgcaatggtacagctcactgcagcctctgcctccaaggttcaagcgattctcctgccttagcctcccaagtggctgggattacagatgcatgccatcacacccggctatttttttttttttttttttttttgtatttttagtagaggaggtttcaccatgttggttaggctggtcttgaactcttgacctcaagtgatccaccctccttggcctccaaaagtgctgggattacaggtgtgagctgccatgcctggctaactctgcttgttattaaagtgtttcttaccaattatttcatttttattaaaagtacatagtaggaaatagagttttagttggacaaggacaacatggtaaagaggaatttggagtaggaagactgtcacattagtcactgaatcctacctagttcacttagttttttttagcctgttttcacttctgcaagccatggagtgaagagtgcctacttcagagtctttggtgctctcaaagcagcgtaatgtctataaagtacctattgagtgtggtacttcttatgtagttggcacacattaaatgttaagtttctgatcaccttaagagtccataactctttgctggagatcacccttagttcttttctttgttaggccattatctcatgtcctgtttacactgtccccttggattggcctagacctgcagcgtttgtgtattggtcaccccagatttcatgtttcctgaataattaatagcctcaacatttctaattttgcataatgactcccaaggcctaactacaaacatcataatgtgctcatgttttctgatacctggaaatatagtggctctaggaacaaaacctttatccactgtgtttcatggggaaggcttattgggcatcactactggaaagtaagtgttgattttaatggcaagactagtccaggggtgaattctactcaggtgccattagcaacctcttcatctgtaaatggaagtgtctctgggacctgctcagctctgacctgctttgggtcctttttggacttcttcaggatgagatcacctcaccgtggttcaatgccaactggtttgagttatatcagttattaaaaatgatctaatgttttccttttaaatctgaggccctggctcattctatgattaagccagtgatttatttataatatagtgtgagatggctgcagccactctatgatgtaatctaagaatgacatgaaaacaaaataggtttttacataatgaaagtattcctgtaatacagtttatagcaaggctttttccccccattgagaatggagatatattctttacttttccttctactcctgtttaaatcttcttttaccatttattacacttaaggcctttaagtcaatttttaaaaatcagcatttacaactccacaaagtctctggttactcttttaatcttgtcattttcttcgctcccaatccccactgccaccctccatggcctctgtgtgtagccgctgctcaccccctgctcagcactccagagtcctcaccattcctctgcttatgctgtttcttctgctggaatgctcaccccaatcctaacttttcttctgctaaaggcatacttcactggttcccacaaatagcatccttctgtagcctgctcaaatgcacatcttcctttaagcctcctgtgttgctccttccccttgttagaaacccgttatctgtactcttatggaacttagtgtaatagcaaacccccacccctgctccaagggctattcacagactgtcagagttagggaggagaaatgacttagaggaatggggtaaggggttttgatagttcccggtctgctcctaatagtgagacccgggcagtcagtcatggctcatctttgtggttcagtttttctcagctgaggaatgagtggtttggattttatttcacatggccaaatgatgtgttggtagtggttccttgaggtgctgtgctgagaaggactctgaggctgcatcctgactcagctaatgatcacttaggaatatcgccatgggagtggagagtgaaagcatacgagaggtatctgagctgcttttggactaggtgatttaaatgtctctttttgttctaccttctggatgctttgatttactgacttgtgaagtgtcttgcccaagatcacgtagcccattaagttttagaagctgattctctgacacagagatggttaaaagctacacatttgactctcacattcatacacgtaggctggctgtgggagatgaaaagctagaataagaagttctagaagatccatgacttattgaaaacacaagactactcaaactctgtatgtctttgagggtgagtgaggtcacttttcacctctttgtcttctttgcttcctaggagttannnnnnnnnnnnnnnnnnnnnnnnnnnnnnnnnnnnnnnnnnnnnnnnnnnnnnnnnnnnnnnnnnnnnnnnnnnnnnnnnnccccactattcaaatttatgtcaaagttggcagttcaaggtcaaggtcagaaaggcaggtgatcctgccagggtcttaattggatcagccttaccccatgaatccattagatctcctgttccccttcttccaactccagacaaaatgcttagctctctgcaaaaagcccaattgcatgagcagtaggtcagctcagcaaccaggtgattgaacactgggacaagaataaaggaaggaaaggaagagggcattttaggatggctgaaggtgctggaaacttgaaccctagaggaatgaagaaggaactggaagtgcttagtgtaaagaagaaataaaggggcaggaggaggagagagcagagcaggtggtgctgtcctgggtctctgctgtggaacgggtgcaaactcactttttgggacctctggaagagttctggcagcagtgggttggaagcaagagatagatagtgtgagaatgttgatgttttctcaatgtttatggaaaatgcttaatgttttaatattaagagcaaaccacagatggaatgtgtgtttcaggaggtcgaagttcacaatcactgcagatgtctaggtggggttgatgcagttaggtattttctattttaggtattttgtggtggggataaaatgttatacatgatgacttttaaggtcctccctgtcttaagagtctagagtttttttagacatgtttttgtgtacatttaaataatttccattttaaaatgaaggctctttggagtaaagtgattgttcctttctccataatcttggcacatgtaagtgctgacttaccttgggcaatctcttctccacttagcattattgaaggaaaggagactaactgaggatgtcttagaattttttgtactgaatgtatttttgaagatgatttgtacgtttcttttcagggtagttccagggaagtctcttctttaggcctcctccaaccaccatcccctattgtcaatgattggctgtttttgtactaccagaatgctttgtgtatacatccaataaagcattcatgccacttcagtctgctgtataagcctgttttcacaatctttcttctcctctagattgtagaagctccttgagggcatgaattatgtctttttccataggaagtcccatgtcatctagtataatagtttgcaaatagtaataatgatgactcattaactcgagcgtttactgaacacctactatttgctagacactattccaggtgatgggactagaacaaatgttaaaaaaaagacagaaaaattaatgagtaaatatgtaatatttacattgtgatctattaggttggtgcaaaagtaattgtgatttctgccattacttttaatggcaaaagccgcaattacatttacaccaacctaaatatattaagaagaaaaataattgaggttaaaggcatgaagagtagggaggacacaaatgtaaattcactggcctgagaaggtcttgatggtaagagtatatgtgaatggagacctgaatgaaacgaggtagcaagccagagatgtgtgggtgggatggactggaggaagagtgtgtagaactgactgaaagcaaatgcaaataacctgacctgaagcatgctggggacatgccggaaaagtgaagaggacagtgtggctagagtgaagtgtgtaaaagtggtcatgcatgccaaataaaaatagttgcaacaaccagtaagacatacatgagagatattgtgggttcagttgcagaccaccaccgcaataaaacaaatattgcagtgaagcgagtcacacaaaattcttggttcccagtgcatatgaaatttatgtttacactatactgtagtctcttaagtgtgaaatagcattatgtctaaaaatacagtatacctaccttaattaaaacttttattgctaaaatatgctagcaattatctgaactttcagtgagtcctgcttttgctgatggagggtcttgccatgatgctaatgactactgactgatcagagtggtggttggtgaaagttggggtggctgtggcaatttctgaaagtgagacaacaataaagtttgccacattgattgactctgcagagaaagagtgatatcaagctgtatcacttctctgtagcatgtgataatgcataatatcattttaccttcaagaaaacttctttcaaaattggagtcaggcctctcaaactttggatctgctttatccattaagtttatgaaatatttgatatacttttttttttgttgtcattcaacgatgctcacagcatcttcaccaggggtaatttccatctcaggaaaccattttctctgttcatccataagaagcccctccttatccattcaagtttaaacaaaggattacagcaacacagttgcatcttcattccacttctaattctagttctcttgctattttcaccacatcctcagttatttcctccactggtcttgaaccactcaaagtcacccatgaggattggaataaatttcttccaatctcctgttaatgctgatattttgaccttctcttatgaatcacaaatgttcttaatggcatctagaatggtgaatcctttttagaaagttttcaatttactttgtccgcattcatctgaggaatcattatctatggcagctagagccatatgaaatgtatttttttaaataatcagacttgaaagttgaaattactccttgatccatgggctgcagaatggatgttgtgttagcagacaagaaaacaacattaatctctttgtatatctccatcagagatcttgtgtgaccaggtatgagaagaaatattttgaaaggaatcttttttttttccctcttttctgagcagtaggtaacagtgggcttaaaatattctgtaaaccatgctggaaacagagtgctttcatccaggctttgtcattccatttatagagcacaggcagagtagattcagcataattcttaaggaccctaagattttcagaatggtaaatgagcatttgcttcaacttaaagtcaccagccacattagcctctaacaagagagttaccctgtcctttgaagctttgaagccaggtattgatttcttttctctacttctgaaagtcctggatggcatcttctttcaatataagcctgtttcatctacaatgaaaatctgttgtttagtatttaccttcgtcagtgatcttagcttgatcttctggataacttgctgcagcttctccatcagcacttactgcttttccttgcacttttatgttatggagacctagtttttccttaaacctcaggaaccaatctctgctagcttcagatttttcttctgtagtttcctcacttctttttgccttcatagaattgaacagagttagggccttgctctggattaggctttgacttaaagggaattttgtggctggtttgatcttctatccagatcactccaactttcttcatctcagcaataaggttgtttcactttcttatcattcatgtgttcactggaatagcacttttaatttcctttatgaacttttttttttttggtatgcacatcttggctgtttggcacaagaggcctagcttttggcctctcttggcttttgacatgccttcctcactaaacttaaccatttctagcttttgattaaagtgagagatgtgctactcttcctttcacttgaacacttcgaaaccattgtagggttattaattggcctaatttcagtattagtgtgggagatgggagggtccaaggagagacgtgggaatggctggtcagtggagcagtcagaacacacctatttattgatcaagtttgccatctcatatggccatgatttgtgataccccaaaataattatgatagtcacatcgaatatcactgatcacagatcaccataatacatataataataatgaaaaagtttgaaacattgtgatagttaccaaaaggtgacacagagccatgaaatgagcacatgctgttggaaaaattgtacctaaagacttgcttgatacacagctgcctccacaaatcttctatttgtaaaaaacacagtatttgccaactacaataaagtgaagtgcaataaaacaagatatgcctttattagttaagtacacattgaagatgctcaggaaaaaataaattgcttttgtgattcaaagaatccacataaatctaacaaaagaatgacaaaacatatttctgtttttcagctctaagagatgggggcactggatcaggagcaggatggtagtggtgtgcagctttgaacaagtccagttgccgtggggtttccctccatggcagagggctctccactccgtttctctgcccctgcggcaggcacacctgcagggatgcctgggccctgggtgcagatgggcaatcgtaagcctaatcacccattcaggcacacacttacttgttttccacatgcaaatatggcctttttgcggatgaatttaatacagttgttgcttcctcattttatttaaaacaaaacaaatggccaaccatgtcagttgagggtagcaaatagaaacatgagtattatggtctttgctgtttgtgtcgattacacggctgaaaggaatcccaggcaaatcagtcttttctgtgctcaattttatttttactttatatcaccttttcttactatcgctattggttttaacaaaatttttaaagagggctatcacattcctttctcttaatcattttatcaatatttcaggctccttagttctattttgtggtttctacctttgacatttttagtttctgaacttggggcccattgttcaaagaaaggcattatggagtctccaaaagccattggcaggtggtgtctgtgacttccttagcctggaaataaacaaataaacaagcacaaattagaagtctttgccctattactgcactattagtattgattgcgcaacatcatgcaaaaagtcactttaatttatctggcaggtcctatgtaaacaccaatacagtcaagagggcttggatgggtatttgctttcatttctaatgaaatttcaggcctctagggtaggatatcaaaattggtagatcatttgcaatttattttatcccaaacacctcactttacagtcagagaaactgaggcccagagaagtaaaatgagttgctcaaggtctcagagagcaagaaatagagatgggacttgagcacctagatctctggtattgctgtcctgtagttcatggagctggcagatggatacatctgtgacctgggatgatggagagactgctggacccttcagaggatctcatctcaaggtggggtttatgtgtaaatgatatctgtgtgtttcattttcctttcataaactaatttaaaaatccttttggtatcaaattttaagccaaaaagtagtgagggggaacatgggtaggaatagcttacagcttgcctaacaaggttgttgactgcataagagtcaggagttttgggtaagagtgtgtgtgtgtgtgtgtgtgtgtgtgtgtgtgtgagagagagacagagagagaaagaggtaaagaggaacaaatgaagagggagaggtcagattgtttgacagtagcaacttcataggcacagaatttctgagttggaaggaagtcttatacgtactgaatttgactgctttattttgtagggaaggaaactgatgtgcctagagtagttgagagctttattcaaactcattccactgttattgagtagttaggatattagaccagcaacatatttgggtagaaactttcatataaaaaagcgtaatcataactatccaatcatgtcaactagtaaggctgctcaggtgggataacacatcaaccttctttgggattcttccctcagacatggttttggtgggaggagcatggcaagggaggggcgagctccaaatgcagggctgctctgtcctcggcgacctgagcagacacacgagcagagatcagagacactcttagtgaatgaacctccctattggctatattaaagtaatgctctgaaaaagttccgtgtggagagcaaggccagttagggaacattttgtggatcttttatatgtccttaactatatgattcttttatttttaaatgaaaaatgttaagatgttacggggtatgtatgcatagtctaaagtgatgattttagaggtagcaagacagtgagaatgtccctacatgtgaaatgggcacagttttatcagggaagtgtcaatagagggttaatgttccacgtagtggctgcaagaatgataagtggtcatggggatagcctgacactctaggagcagaaggtggtgggtatggatagaactactgatatagcatgaatccaacctgctgttatctgcgcaggcctctctgcagctgtttgccctgaagtacatgctgtacgtttctccagctgatcctgcatgactgggtataaacgcctgtccgctgtgtgctggacagccccagacaccctcggcagcctgctgtgtttgtgtgagacatgctgtgttagggatttaagcatctccctactcgttcctcatctttttctcttctcttccttctaatctcctttcatctttccctttgggggagaaaaagtcatcagagttgtttgaaggttcatttatgttgatttgtttttattttgaagctaatttgtttcctgcttgtatctgtaactgatgtacttcatgtgagaccgtgttataatatacttgagttctccttggccctctgatttcttttctttttttcttttactgaaaaataaaagatttccttctctcttcagacctacagctttctcatctacatggacaacctatttttaaagaatcttcagagagtcgttgactttgttataactactactatatacgtaatttcagatgatagaattgaaaatttaacttgtttttctagaaagagtttattttccctataacttcaaagagtaatggtggggagtaggacattctgaaaataagaagaaacatgtcaaatgaatttctgacttccagctaggcatatggaataaaggtctttattccagtgacctctgctcattggaaaactttgggctggtagatttcatgattctgacgctgtatgtcctcttgagttacagtgagtgatgaggccaaatcgcagggtggatgatgtgctttttttgggctaataggtgttaaggaggcatgctgtcctttggcgttaagacagatcatttcctcagttgggtaatgtttaaggaatccactaaatccttaaatatatggcacacataaggaatgcagagcttttagacactcagccttaacatgggttattttttagcatggctaatggctaaacttgatttctactgggtttgttcaacctatttctaacttataggtaaaagcctgctttttatcctctccatcctcatcacctttttagttgtgtctctgcttgattcttcttgcattcaggtctatattgtattataaaaagaaagagagagacagagagagagagagagaaggaaaagaagaaggaaaaaaaaaccacacacattgaatgggaaggcaggagagtagagctctgaccccagctctgtcatagccacctgtgtgactatttgcaagcattttcatccattcaacaaatacacaccaggtaccggagatacaaaactgtgaaagacacggttcttaccctcaccacttacagtcaggagtagagagttaggtacacaaatagaatgtgaaatcacttctcctttctgggtcttcattttacaaatgcaagagccagaactgggccaggtgatcatcaaggtcccttctgaggctaacatgccatcattcatgcaaaattcattaaacatctgataatcacttacctaagtgaaaattagcaaacatttcccctttctccttagtttgtaggggatgatattgaagacgaatgaggcgatgtctacaaaatgctttaataagcaagttggagaaagagattatgtaagtttgaggcattatgattaatgaaaaatgaaaacaagggctgatgttttcagagagagaacagatggttcctttgttcagaatttgagtataaaaaagagaggaagaaaagatacttgctatattgtttaggccctgaatgtgagtaactttaaaatgccaaaacaatctggttaggaaagtcccatagattcaaaatagctcttacagtgatcaaactataattaatataacaaaaaaaagacagaaaaatactaataagaaatgccacagtgacagctgacacaacctgacaaaaactcctatttttacaacaactctagaaacttgattttttctgttctcaggagttataccacactgtaaaacaaactagtgagaaccgatttaaaactgtttctaccgttccccctacccctcaggttattttagtttcccatgactcataaaggaaatcttcaggattcacaagaaattggcaattcttttccatctttgctgttgagtattgataggaaaacagcatagtttggggcaatttaagtagagaacaaacctccgggggcttggggtggtgtctcagaaggccggatctgggaagggcctttgaaaagcttgcacggaaagctgcgaaataaatcgtttctttttctctttctttacgttctaaaatctcgtgatctgtttctacaatacacaggctaattgatgttatccttttggcatgattcttgctgtcctggggtctatcacttgcaggctatgagaatgaggccatagaccaccacactggcagcactgagcaaaaggtgctagacccttctgagttcaggtgctgtgtaactggtgctgtgattggacagggtgactaacctcagtctctctgggtgtaatttcttcactgtggaaagaggaggctaactagaaagttcactctgacactaatctgagttcaggtccacatctttttttttaattaattattttatttttaaaatttttatttttttgagacagagtctcgctctgtcgcgcaggctggagagtagaggcacaatctctgctcaccacaacctccacttcccgggttcaagcgattctcctgcctcagcctcctgagtagcttacaggtgcccgtcaccacgcccggctaatttttgtatttttagtagaggtggggtttcaccgtgttgtgcaggctggtctcgaactcctggccttaagatatctgcctgcctcggcctgccaaagttctgggattatagaagtgagccactgcgcccagcgcacatacaattgtaggaaggctgagaatggcttttaatttgggagcgtttaaaagcaaacatgcttcctcaagacaacagtaacaaaaaattgacatcgttgaggtgggaacttctttaatgctacctgagcctcttgctgaaatggttctatgcagttttgcatagctaggagtggtaagctcattcacagacatggaagaggcagagtgggcttagggagaggcaccagtctagtggtccaacttgggttctgggttccagtcctgcttctgctactaaccccatgagaccttggaatgcccatctctaaggtttctttcagagctgaatcactgtttggtctgtgattcatcaaagcaattagaagactatgcctctccttcaagaccaagactttggtcagaatactccctagggactttctcactgtgtgtggcactcttctctattagacgctttattcattctccattgtattagagtcaaaagtatgattgtttgttgtagaggtgccttttccgtgtcatctctgataatctacccctctctctctgagtaacctaggcttttaaaacacatctcctttggcttaatcacactgcctggtgtctactcagcattatgtgtttgttgtctgccctgaactgtgaactcagccatgtcctgctcatttctgaagcctcagcatgtacatcggtatctggttcatggtagattttcaatgaatctgagtgaatgaatgatggatgaatgattttgtatctccttactaggcatatgttccttgagggcatggaccgtgtctaatgggtggctacctagtgtctcattcttggtccgttgttagtggtgatttttgtcctcttctttgcactcatcattctaggcttgtattagggtaaattgttagcataattctgccttgtttcccaccctgcccccgccttttttttcttttgaaacagagtcttgctctgtcacccaggctggagtgcagtggcacaatcttggctcactgcaacctctgcctcccgggttcaagcaattctcctgcctcagcctcccaagtagctgggattacaggcacccgccactacgcctgactaatttttgtatttttcatagagacagggtttcatcatgttggtcatgctggtctcgaacttctgacctcgtgatctgcctgcctcggcctcccaaagtgctgggattacaggcttgtttgcttttaaacagtttgtgggcagggatggtattttcttatgattctattcctcacagatcctggcccagagccattagcagagaaaattctcagtagatgtttgctgacctaaacttcattccaccacctttgccttccttttgccttttcacctcctcttagaaggtaccttatatgataatgtcacctatgcaataaagaccacaaagtaaatttaataaaatagaaggcatgcttccctcttttctaaccccacacttttttttttttaagatcaaaataacgttgcatttgtgtgtgccctgcttttatttatttatttcttttgtagacacgaggtctcactatgttgcccaggctctctccaactactgagctcggtgatcctcccacctcggccttccaaagtgctaagattataggtgtgagacaccacacccagcccagccctgctttcacaaaaaacaaaataatgatgaatatattgtactaccctcactgttttcatttgtctgtgaatgcttcttattttatcaggaaaaggaaaaatttctgtttcttgactgtaattgttgaaatgtattttcaaagttttttactttatttttggactgataccataaaatcgtgtgaaatgatgtgaggattttctaatggagaaatgacttagaatatcccttggatgtcctatctgctttttaattgttttatcatcccagacatgtttctctattcctgtctattcttttatctgtaaaatgaggttattgaactagatgctgtctacaactttttttttttctttcattaacattaaatctctggtacctgagaacattgggatcaggctgatatgtctaggtgtctatttctttggtctacccttcaagtaggaatgaaaacccatagaatttctgtaattatcagcctcaataactttctaaagcctttaggaagcagataccctgcaatttatctcactaatttgtttgtgattaacactctctgccccttctcatatcccaagctcagtgttttgatatttaattacagggaattctttcctcttcatagatgatatagcaattgtatttcatttctcttatctgaaatctctgctgactttccatgtcttatgaatttaaatagtctaaatagggcatgagatcttaaatattccttccagtttctacattttctattcagcaacaacattttccctggaaaagggtgaaagcctgtgagtcccccacagggcaggagcactgaatacacccacattttcctaccatctgacatagatgagacacaaagtagggactcagatgattatttaactgaatcaactggattccttaattctcacaatattatccttcctactttgtaaatagggaaatggaggcttagtcacacaaaatatcttgttcgaagttactaatcaattaagtaacttaataatttattgacatctgaggcatttctctctttctacagcctcagaccagaaatgatgggatttcagccttcttttcttagagattggtgagccaagacctggagagagaactctggttgtcttaagtcacccagatgaactattaatagaaaaagaattctactcagtcagtacttaaaagcttgacatgtttgtgtggagacctgtgtgtgactgagttcagatcactctaatttcctgggcctcacttgacccatctgtgaaatggggcaatgagctcttttcggcatgaaggcaaggaactgtccagaagacctctggagaattcttcttaccctgagatcaagggttctgtgagtagtacaactcacacccaaagtcttagttgcagggcactttagtgggaaaaaaaaaaaaacgctgaggctatttttagagccttcatctggttatagactagttggtaggagagcaatacctttgaaaagttaagaaatagttttatacactgtgttaaggatgttgtcaaaactaatactcgtgtatgcaaagactttaacatttattaataattttttctatagattggtgaaattggtttgtaatttttgtcatttcacttttgtggaaattgagcaaaggtgagagataaaatgatgtgatcaggctgggtgcgttggctcatgcctgtaatcccagcattttgggaggccaaggtgggcgcctgaggtctggagttcaagaccagcctggtcaacatggtgaaaccctgtttctactaaaaatacaaaaattagctgggcatggtggcacatgcctgtaatcctagctacttgggaggctgaagcaggagaatcgcttgaacttgggaggtggaggttgcagtgagacgagattgcgccattgcactccaggctgggcgacagagtgagactccatctcagaaaaaaaaaaaaaaaaagatgtgatcaatatcaatctaaggacactgtaaagcagcagaggattgacgattttcctaagacttagtggatgtagaagagtttaaaatattctagcctagtggtttgcaaacttggccacatattaaaatcttcagaggaactttatgctacaatgctcatctcagtcacagtgtctgtgggtgagacccaagctcagttacattttaaagctcccgagagtttagaactattgatctagtcttgatttcgtatcaatttctctgatggtatcttgcttgacatcttacttactgggctgcatttttgtgctgtgtctccctgacacccaagtgaaaactgctggatgaaccgaaaattcacccaaacaacgtgaatgtaatggaaactcttgaaaaggcttacaagccttgaagtaaatgttgggcgaagggagcgaaagggttagcgtttttttgcattgggacctgccttctttttatgcttctaggaacgtttaaaaatgagagcaaggaatatatttcattgctttaattgttcaaggtcttttaaaagcgtgtgcaataaaatgccttttaagataactgacctttgtattttaatgctttttggaagggaacaatacctagtgttcagctgcagtataactttatatatatatatatatatatatatatatacagtcagcagagcttgttttggaatcagagggctgagggttttgctgccttcccagatattttacctgtttctgtttcaacatcaagttccattcagttgatgtttcttgacctcataatgtctaacctttatatctttgttttttccctttccaaacttatccaagaaggagacttcaaggcctgattcattaatttttccttctgctgggaactcaggtgtgtggtggaaggcagcacatgtgacctaatctatattttgacaaagaagaaagctccctgccctcccttgcaccagttcgtttggtaatttttaatcccaaaagccactgctaatacgtttttaaaaattgatgctagctattacgttgttagataaagctcatcttccaactctaaacttgctctttctaaaagtgaaataacactcaggttgcaaacatagtgaactggaatttcagaggcttgaactgacctacaaaacttgtaactgtagctctagttatacatccactgtggtcttggacatgtgaggtgtttgtctaccctcaggagttttagaagaagaaattttatggaattgctttccatattaagaaattaaaatagccaggtgctattttaattttacagattcacaactgtaatcccagcacttgggaggccgagcagggaggatagcttgagtccaggagtttgagtggagtggtcaacacagccgagaccccacatctacaaaaaatttaaacattagctggcatggtgactcatgcctatagtctcagctactcaggaggctgaggtgggaggatcgattgggcctgggacatcaaggctgccgtgagctgagattctgccactgggtgactgggcctgggacgtcaaggctgccgtgagctgagattgtgccactgggcgacagagcaagagtgtctcgaaggaaggaaggaaggaaaggaaggagggagagaaagaaagaaaaaaggaaagaaaatatacaaaaatctttgtgtagctctgaaataaatatatatatatgtatgcagtgtatatattatatgaaataaaattgcttgtgcttaatttattttaaaatcatgtttgaaaatagagctaattctcagttactacattttcccctctcctctttctgatggtttttttcttaactttttattgtaaatgattttaaacttatttaaaaagttgcaaaataagcatagtccaatatagccatatacttttactcagattcgtctattgttaacattttatcccattggatttatcatcctcccccttcctccctcccttcctctctttctctgtctacacacacacacacacacacacacacacacacacacacacagtctcccccaccccatatatatatatatattttttttttttccagaagtatttcagagtaggtcacttatatcattgcctctacccctaagtacagtgtgtatttcttaataataaaaaaaataaagatagtctcatcatattcacagtatggtaatcagcttctgtacatttgacactgattcaatacttcagtctactgtctgtacttctcctttgtcaggtggctcagttctgtccttgaagaaaactgctttttcccattcagtgtacagtccagcctaaggtcaggtagtgcatttagttgtcaagtctctttagtctcctttgatttggaacatttccacagcctttctttatcttttatggcattgacacttttgttctccccctttacaattatagtattcctcattttgtattagtcactggtttcttcatgttttgattcaattatgcattccctgaaggaatattacaaagataatgtgtccctctcagggatcacatctggagtcttatgtgtccatctatccgtcattggggatgttaattttgagcaactgatcaaggcattgtccagtttctccacagtataggtattctttcctttgcaattattaagctatccatggggagacactttattcttgctccttatcaaaatattaccctacattttttcctaaaccagcatttactatgattggtgcaaaattaggattccatgttactactctcttcacattcatcattcagcatcctgcgttctactgtatgcgggagccccttccttctcctccctccctcccgctctctctctctcttttcctctttcttttctttctttctctctttctttctttctttctttctttctttctttctttctttctttctttctttctttctttctgtctgctttctctttctttctttctctttctttctttctttttctttctttcttttctttttctctttctctctttcttttctttttctttcactctctctctctttctttcttctgtttcccctcccttccttcctcccttcccttcccttcccttcccttaccttgccttcccttcccttccctccccgtgcctgcggtccgggccccccctttttgtgggggccgcgggtcgggggcccgggcgggggggggggggggggggggggggggggggcgggggcgcggcgtgggcgtgcggggggggcggggggcgggggcgcgggtcgggggtgctggccggggggtgcgggcggggggcgggggtgggtggggcgtcgcgggggccggggggggcggcgcgggcgcgcggcggcggcgggggcgcgggcggtcttcgggggccgggggccccgcgggggggggcggtgccgcggtgggccgggggcggggcggcggggtggtggggggcgcgtgccgcggcgcgccggcggggggccgcggcgcgcgcgcgcccggcgggcggcgcgccgcggccggtggtgggtggcgctggcgggggcggcggcgtggggtccgcgcgcggcggctcggccgggccgtcggcggggcaaaaaaaagaaaaaaaaaaaaannnnnnnnnnnnnnnnnnnncgccccgagtagagaagatgcaaattatagtgcgagaacgtaggagtgagtagtgagaaaggaagcggactaaagaaattgtttcgtttcagctaattctcttatatttctttctttgtatcctcactcgttttctcgagttatttcgttggtgtataaatagaattgtcttgcgtttgagctatttttcatatgacgtagccatgtaagctaacatattctcatatcttacttgagacatcgctccatagtttcattatatatctcatcagtcttcttaaattgttatgtaaaataaggaagtaaaggaaaaaaagaggagccttcccgtgccctccccccctgccctcccccccgccctccccccttccctccccttttctttctctctctttctctctctctgtctttttctttctttctctctctctttctctctctctctttctctctattttcctctttctttctttcttttggttatggtcttcaagatttctgtttcaatctttcataattcattcttgctatataattattttggccctcaaattatcccagatttggtcagtgggagctgcatcaagttggctcctgtgtccttgagacatgtccccatcatctttgttgttagcaattgattaattgctggaataaaaagatgttctagtttggtcttgtatattctctgtcccagccatgaagtcaagcatgtcttcattatgtcctcactctttttatgtggagaaagatgttagagaccaatatctgagtgctaggtgtgctcattgctactctggtgccttaacttatagcctctttcaatgactggagctaggaaattttatatataaaaatatatatgtaaacaaaacctacgtgtatatgtttatctgtaaatatatgggtgcatatacaaatatgtatacacaaatactactactattaatttgctaataccacttactacacaaaacaaatctgtgaaaaagagttgaggatttgcttatggtgctcctccttcaacttaaccctgcccaagactgagggtatattgtcaaacgctcttcagggattacctggattagttctttcttcatgtgtctttcccctatatcccaatggtcattatgttcatttaaaatacagttgggttcaaatgcttcagtttgctttgagttttagtttccctccttcccatcctagtttgtttaattttattttttgaatatgtaaaacattaacatgcttccagaagccaaaactaaaccaaaagaagtgccagtctctcagatatttgctccaccttgttattccccacacctcttggaggttttcttggttatctctctggtatttctttttaatcctgatatatatatatatatatatatatatatatatatatatatatatacacacacacacacacatatatcagattatagcgtcagattatctgtgctttccctcctctcagtaaaacctgtaatgccccttcttccccaaacatatatatatatatatatatatatatatatatatatgtttttatatttcctcttctttcttacacaaaagatagcatgttgtatatcttcttttgcactctgatttcgtaaattttttttctttttttttgcactccctctcttcttttcttcttctctccctccctccctttcccccttcttccgtttttttttcctctctctctctcctgctcaaccaatttcctatgcttggacagttggatagttttctgcaatgaataacattatgcatatgtatttccatatcattggatatatttttgggatatattcttagaaatgggtatgctgggttaagagtaaatattttatgaggtactttagttaccaaatttttctctgatggaatgtcccactagcattcccaactacagatgtctgtgaagcttatgaattgttgccaatttgatggatgagaagtggtatctcagtatagttttgatttgcacgtgtcctattaggagtaaagttaagcatcttaatgtatttaatgtccatatgtattcattttgtgagttttttgtgagttacctgttcatgtcttttgcccattttaaaattttattttattttttttgggacagagtctctctctgttgcccaggctggagtgcagtggcacgatctcaactcactgcgatctccgcctcccaggttcaagtgattcccctgcctcaacctcccaagtagctgggattgcaggtgcatgtcaccataccaagctaattttttgtatttttcacggagatggggttttgccatgttggccaggctggtctcaaactcctaacctcaagtgatctgcccaccttggcctcccaaagtgctgtgattacaggcgtgagccactgtgctcagtcctttttttttttttttttaaattgggtttttggtctttttttctcaattagaaaggtcttcggaaattagatatattggcctttcatctatgaagtatattacacatatctctcccaatttgtttatcttttgactttgattacagtgttttattttcttttcagtcatataaaatttttatacttacagagacaaatttaagaatcatttcttttattgcttctggactttgttcgtagttagagagcatttcttaacacccgtgttatctgcatgttatcttccagtacctgtatagtttcatttttcacatttagatctttaattcatctgcagtttgtgtgtaacataatgaatggatctaattttacttttttccaaatggttatctggtgtctcaacaccatttagtatgaaaatatcttctcatacttcccgtgtgatttgagattggtggttactttttaacctacaccatgactaggtgtgaaggagaatgatggtaaacagtggaacagggtagttagaggaaaatgaggtcccaggtagataatgactgaaacccaataagaacatacatatttttgacttcaacacagagctctttaccttttacaagtcatcctctctggtccatttttgtcaaaaattaacgtatttaatagagaaggtgtttaaaacaaaaggagggtttagagattatctgtgctttccctcccctcagtaaaacctgtaatgccccttcttccccaaataaattatgagaatggggctgcataaattttctgtgagcatgtgtgactatgtttcctctggttcctcgccgcatggtaattactctgtgctctctcctgcaaactgcccatgtttcactgcttgtaggtcaaagctgtattgagtaagaagtgaatttgggaagttttgcaagtaaagtgctacctgagtcagtgactgtgtcttaattcacctttttgcttccaggttcttgctcagggccatctgtgcacatggttttcactcaataagtgcctcatgaattttaatgactacacattaaactaaaacaaggtctgcccacctattcttaagaaattaaactctacaaatgatgtattccaaaactgcaaaagagagtgaaagccaaaacagatgaagctgtccttatatgggcaggaaaaactcagtaagattttatcagttcagtaggtgttgcatatggtgatttggaactgtctgccagttccaagatggccttactttattgtatggtcagtacagtttgtatctagtcctcatcaggttaggcctggaactccccaacccctgttaaaaacagcaaatcagggtttctgtggtggaatggggaggaaactggcttgcattaattgatgtataaggtagcccatgataaactcaatgccacttttatacacatctgggagcaagagcttttggttaattggcttgcctatgtttttgctctgccttggatgctacagaaatggaattgtttgttagagtcgttgcatggtgaaggaaaaatcagagccaaggttttgaaggacctaagggagaacattctgtgttctgcaggcatcttcctccttgggacacaaacagctccctgcctaccacacacagtggataggattccttcaatgcctctcctcgggtgaaagatgtggcatgtggaactgaacgatcaaaatcactggggcaactgtatgggcgccctcctgcagtgtaacatcctaacaggacttttgacaggaatggatacctaaatatttacactcctggaggcctcgtctgtctcaaccatacttaccagtcaccacagtgtctcctttctctgtgtagtactggataaatacagataaattctacaccctgacttactcctacctcatgcaaggaagttataaaatgtttgagtagcttacttaagtattactcctgccatggcttcttgacatgccttgatggagctgtggaaagcatcttggttgcttcaacacaaggctgtgagttgtttcatagggcagggtactaactatagtttgctgaccttatccactgtgtggattcatcttgggaaaggagcagagaaggtactgagaataccacatctgctgaagactctgctggatgctttctccagacatctcatacagtcttttcaacacccactcaagatataggagctgttccatttcacagacgaggaaacggaggctcagagactttgcattagtctaccaggtcataaagctagtgttcacagaactgagactcaaaaccaggtctgtatacccatgaaattggtgcttttcctctatgcctgacacatgacacatcatatcaaggcatcaccttttcttgaatcttattcatagattctgggcaagcagcctcagcttggtcctatgaaacctttcctgacctcctccacacaccccctacacacactctgtgaacattgtaatggttagttgtatacacagttgtttccagtgctggactgtgagttcttctggatgtcttcctatagtgtttaattcatagctggcttttgatacgtatgtaatgaaaattctggttttctgcaccatactgtgtttccatgctgacactaaaaatctagacatgctttcttagaattaggcaacccatttacctttaaggatgcactgactttggtttttgccttaatatttggccaaaacctgctctttgagttcgacctctgctttgcctttaggagggtaaagtagccaaatacctacctcattaacattgtaggcaactctgaaattttgcaggataatcattgcattgatgcgaacatcacactggttaccgtcataccgtatcagcataaaaatgttggcaatgaatacgtatatttttcaaatttgttgttaataaccagatatgtacttttaaatatagtgagcattttacttataacttggaatggaaaaccttcttaaactactttgtacgctgagactccaccaactaattgaaatataaaggaatatattatattaagagtaagatgctacaatatttaatgatgactgtgaaagctaataatgtatgggttaaataattaagaactttcaaatagttaaacaagtagggaaattagttggtaattaatataaaaattagattaattaaaccttagttaatgaatattagctaattgaggttattaaatcttagttattacagtttgttagctagataactttgggttgaccaacacatcttttttcagctaacaagcatttataaaaatataaattgtaatctaagtattgttatagaactagattatacaataattataattgttactgggttgtttgtggaatgcatttatgacaccaaacagaatgaccattaagaaccatttttaacttttagttatttaattacacttaaggtcatcagtctttcaagaaaaagcctatttaagattttttttcacattttctgaagataaattaaaagtagagtgtctacactgtctctcaacatttcctgatcaggaaaacctcccaaattacgtatagcaacatcaatgataaatgatttttaacacagagaaatttcatgtgtattcttatatcacaaaaattcagacgatgataatgagagatttcagtctcagctttggcttactattgattttaacattcagtcatttggcacttggcccaagtgggtaatgggtgcatatctatcagtggctcttcatacatttgtgcagggaggtacacatgcatacgtgtgggtgtttcaaagtctaactggaataggcctctcacatttatctcctattaatttgcagattgtttccatggtcaccatccagaaatttcccagtaatccttgaggaagttagggagtgtgataccattagggagagggaatatgtggcatagagacgtgatgggcattagttgtctgaggttatgaggtcgtggtgaagcctgatcatgtgaccccatctccatactctatgtccagtgctccagatcccatagacctgaatcttagttctggtgctagaactgtccctgatgcacatatagtaagactttaatttccattttccctgtcttatgaaaagaagtgttgataagctcattaattagctttctgctcatagcttttttctgactgctaatgacttcttgaggatgggcaggctttgatgagctgtgtggtcctgggaaagccttggtgtcctcttttacctgcacagtgagggtgacggtcgtgttacctcctgaggccacctttcagctttgccattctgtcatttgacaaagactgaatagagaaaagacaagatttaacgacagttaaagtccaagccagtttgtatttgctgaaagacacaactgagggaaaggaactgacatgtagtttaaacagactggttttttgttgacatgggaagtgtgaataatacttcttcctggtttatgagatatgaaattggttgtctaccttatctgtttctcacttttgttctcagttcatagtttggtcatggaatgcaattttgaagacaacttcaagttgtttttttgctcagtaatcatagtagtatttactgttgttcactgggcacccagtctgtgtacacacatcattcctaatcttagaagaaaaacaacgtgcaagacatgtgttttctttcccactttgcaaataaggaactggggctcaaagagattaaaagacttacttaagttcaattagaaagtggcagagccaggattcaaatgttggtttgcctaactgcaaagcctatatccaccttccacccagtgctgctacagcattaaagcctgtaaattgaattccacacactcctactttcacctgtactattacagtgataagtaaaaccagcgctgagccctactaacaaggtgtccttgatttgtgtgctgatgctcatgacacttctgtgtggcatctgctgacaggcccacggggcccagatgttcccactacaaagagctcatcctggactccccaaccagggaaagagacctgaaaaggaactggtttgtgattagggattattgtgatacttgaagtgaatggtcagtcagttcttcccatttatttgagttcttacttcccttccctttgaacatttcagtcaaacttctaacagtgactttcaacactggctgcgcattaaaatcacttggggaggttttgttttgttttgttttgagacagcgtctccctctgtcatccaggctggaatgcagtggcatgattatggttcactgtagctgcaaccttctaggctcaatcaaccctcctacttcagccttgtgagtagctgggaatacagggacacgccactacgcctggctaattcgtatattttgtagagacagggtttcactatgttgcctaggctggtctcgaactcctgggcacaagtgattctcccaccttggcctcccaaagtgctggaatcatggagctttttgtttgtaagcatgtcagccctcaccttccagagatcttgatttgaatgggctaggttggggttctcgctattagcgcaaaaaaaagtaagtactgcagggattctaagattcgtctagagaagacgatcaccgcattagggggcagaaagtccacttttcattattttgttggtacagtatactttttttctgactctatgaaccctcaatcttatgatgttaccattccattgaagggtgggatttattcactgagaacatttatatttttttgagatgtcttaggctgtggagagggtgttacagggatggacacagatgctgaatttagtggccccagagaagaggaattaaccactttggattggattattgggagcaaccaaaagtcagtgctgtggcttttgctgtcttcccttgtaatctcttcccctcaccagattttcaacacagaaggggtgtattttctagttatggggtattcacaatcacatctaataattttactccagaacatactatggcttgtttatactagcttgaatatttgtagtctctttgatttttgtttgctaatttaatttactattgcatataaaagaatggcttccatggagataatcaccgtggctcccagagtgcatccagagacatttgccttgcttctgtggaaatacacccaaattccccagcatgacattgagtgttcaccccacacctgacaccagtctctcttgctctaattaaggccactctttaccattcttgggcaccagccagatgaactataccctggtgtgggatctgcccgatcctgctgagacattaactctgtcctgaagctgtttgtccttccagcagctagaaataatctttcctttcctagaacttccacactgcattgagcaggaacacttgtagaacttctcacattgtacctcaaggtattcttatttatgcatgtatataatttctccccttctactactgtaagcttctgcagggtggggcagcctcttcttaattttgatatctactgctgtgccaagaatattgtaggcatttcctaaattatttttcccccagtgtatgtgttactttgttcaattcagcagttgtccaaagctaatctcttgagctattggtagctttggtgaacatttggagaggactactgtgatggcgtaaaatccggtgacctagttacagaatatcccctgcaggctcactggtaaggaaggctcatgtttaaactcagtgaaaggagagcctggcttatttatggtggtggttgtttacatgtctttaaatgaccttcttttttttttaatataaaggcaatatattctcatagaaaattcagaaactgtaaacagggttaaagaagaaaataaaaatcaacactatcactttcacctatttattattcttattttatttatttatttatttatttttaaggcagagtctctttctgtcacccaggcagtggcacgatctcggctgactgcaacccctgcctcccaggttcaagcgattctcctgccttagcctcccaagtagctaggattacaggcatgcaccaccaccaagtccggctaatttttgtatttttggtagagacagggtttcaccatgttggccagactggtcttgaactcttgacctcaagtgatccgcctgccttggcctcacaaagtgctgggattagaggcgtgagccactgtgcctggccacttccacctattattaatgaaacctgtcctatttaacaaaaacgataatgtggggtgtcttgtgcttggagcttggagaaaggaatttgcctctgtttttttaatgacttatggcaaggccagtatgaccagtaagtgggctgtttattattattattattattaatcaccattgtcactgatagaaattgtcactattgtcactgatagaaaccaagatagaaattgtcactattgctatagccccaagaaggacctcatggctgcataacgattgagcaccttatatttacacaatgcttggttgttgttttttaaggcaactgtgactcaacaacagctgtttgagaacagctccatcccagatgaaatcagaggaaccgaagtttaaaaagaaagtgtttctgggctgggcgcggtggttcacgcctgtaatcccagcactttgggaggctgaggcgggcagatggtttgaggtcaggagtttgagagcagcctgaccaacttggtgaaaccctgtctctactaaaaatacaaaaaaattagcagggcgtggtggtgcatgcctgtagtcccagctactcaggaggctgagtcaggagaatcccgtagtcccagctactcaggaggctgtcaggagaatcccttgaacccgggaggcggaggttgcagtgagctgagatagtgtcactgcactccagcctgggccacagagcgagactccatgttaaaaaaagaaatgtttctgagcactaaagacaatttgaacaaggcagaaaagtacaaataggaaaacaataatcttactagattgtttgtttttgagacagcatctccctttgtcatccaggctggaatgcagcagcacgattatggctcactgtagctgcgaacttctgggctcaatcaaccctcccacctcagccttctaagtagctgggactattctgtagtgataatccttgttaaagttttggaaaataccttttttagagtctctctttctctctacacagacacacacacacacatacacacatgcaacttttatgtgaatgacggcatttacaatttacgtaaattactgcaggtgctatcatttatttttttcactcagcaatatgccttgaaaaaattttaagtcaatcaacatacagatatttgtcatcttttaaatagctatagattttctctcagacttaaagtctaatttttaaagaagtgactgttatatttaaatcatatatagcttcatgatgaaaaaaggaaaaacaattcttgggaccggacatggtggctcatgcctgtaattccagcagtttgggagaccaaggtaggagaattgcttgaggtcaaaggtttgagaccagcctgggcaacacagtgagaccctgtctctccaaaaaaaaaaaaatatatattagctagatgtggtggcacatatctgtagtcctacccactcaggaggctgaggaggtgggaggatcgcttgaacccaggagtttaaggctgcagtgagctagaacggtgccattgcacttcagcttgggtcacagagtgcaactctgtctataaaacaaagacaaaagcaccacagttcgttagatataactgaatattatcttcatttcctactgtagtggttcttagaaaggttgtttcttaagttagaaactgttgcctaagtatttaggatgtggcaggcactgtgctacatgctggggttgacgaatgcatgggattcggctctctcccaggctggtgggaagaggacacatctagaagccagggtatataccccgaaggggtttgaggcagtgcagagttgatgatgatggtctccagcctgcctttcctttacaaaaatgaggagactgcatctcacattgccaacgagctgcttgactctaccgatattccctaccaagcacgattatgggtagtcttaaaattcttaataataaaatagatattgaaaatagtgtttttttttttaacagtgaaagtaatatgtactcatgtataggttttcaatatacaggaaactataaaatgaaaaggattgtacctgtaatcccaccccttacagctaactactgtgacattttatttgtagaagtccattttgctatcagacctcaagttttaaaatcttaactcaccctctgtaacctagttctcagctctattttatgtaacgtttttaaaggattcaagatttaaaataaacttatctcaccccaaatgcacttgtatatttttgacaccccctcatctctctctctctcttgtctctctctcttctctgtctctcactctatctcagttctctttctcctcttctttctctctctcctctctcctctctctctctttctctctctgtctcacacacacacacggggaaaaaaaatcactcgagttaagaatcagtctctcattttacagataggaaaactgaaatctagaacttgtctgaaatcatgttaaaaaaaaaaaagtggtaatctgtgctcgaacccaggtctcctgaattttcgttcagtgctttttccattctacagtgatgcctccttactaggtcatagaaacagtggcagagggagaaaaggaaaaatacgtcagctccaaagagtgcagtttttttttttctgtgtcctttagctgagctatttttgtgactattcagtacatgtacaatgctgcctcttggagtgttccggctagactaagaggccattcactgctgactgcagccatgccatccctccatggaatcctcggcccggaaatcagatgggaacaaactattccaatatacaaatcaaatttcagagtctgagtgtacacagaaaaattactggatatcctgttggactatgtacataacaatgacacagtgatttatgagggtatgatggggcagagggtagcgggtgatgttggagttgattcatcacttaagcgctaatccattcaccagctccagtcagacttcaacacaaatgccaaattattcatcttccctaaatccaaccctattattttctctctcaaaaccttcagttgcttccttttgcatatggaagagagcgtggactcctccatctggcatttaaggctttctatgatctgtcctcccagacattgataggctgtggagatacagtaaggtagttgttatgagccacaccttgcagccaggctgctccagcaccaagcaacactttccccgggaggttgctgcacctccctgctcctcactttcctcatttgtggaataggaatagggtcattgtgagaattaaataagttaatatttgtaaagggtttaacagtgactagctcataatccgtcacgtagaaagttttttcttagctcatttaataagtacctttctaacccatcactgatagcatttttcttttgcaccagacttctttctagtcattgctgggagcgtcctctcattttcctgcctccctgtagctgtcactctcactcctaaactgttggcgttctcattttggcttgcccaaatcttacgcattcttttaagtccatgttcaagtgaatcctcactgattttgttcttcattcatccccttaacagacttttatggagggtctactgtgtgcaaggtgtattatgtaggaagccttccacagttcccagagctaggtgagctctgtcatgtaggcctgtcttgtacatatcaccttcgacattgctgagcagtttgtgttggacatgtttgatctcctcccctagaatataaacagctggagagtaggatgcttattagtaggtgcttattaagctttctttaaaatgagtaagtgcacatgctaccttttatagatctgttaccttctaatgaaggcaagaacaataggaacaaacattagttttgtgtgtgtgtgtgagagagagagagacagagagggagagagaaagagagagagagattttgaatgggaataattatgaggccacatctgagggcaaataaccacttccaagttgaagaaaggcaaggagaagacaggaatgagaggagagctgtagcagtcaaaggaaacgggatgagaatatgttattctctgaatcataaagcatttgctctgagaaatgtttttccttaagtggtataaaatgtaaaatgaattgggtcttagtttttcttttcctctttaggaggttggagctgatttttaaaatgaggtaggggagggaggtggggtttggagaaagaaagtgaaaattgttttctgaaactctgtttgtcaaataactctctggagagaaagttcagagggtgagggcctgccaaagctgaccagcagcacacaggccaaatcgttctttcgtcattgtcctggtcacttccccacccctgttcgccacccccaaacaccttttttcttctctctctctctctctgtgtgtgtctctctctctttcttttctttccttttttttctttttataacatatgaatattataagtaagtagctggagaaaataaaaaagcaaaacaaaacacaaagtaagcagatgatttcaacctgcaattatttgtcaggtcataaaaatgatgtgtcttagatttatttacctgatctcctcatctgttttccactggaagccttctgctcgcgtcacccttcttcatttagttccccaaacttccacccactttctgactcaaagcaggagagaagcattgaacaaaaccactggatttggagaagagagaaaagcagcttttaagaactgactttagaggtttagcacgaattaaattcctggtcttttctttctgcagatttttcagctattgttgttgtttgttttgttttgttttgttttatgtttcttgagtttatcgctaaagatgcttttccgtggatggcacaaaagttcagctatggccatgtgcttactgaaggcctgtatatggaggcatcacagtggctggccttgaagaaattaagatagtgaaagaggacccctgtctgcgaagaaagagctcatgtttgtgtgtgtgctcatgctttgggtgctacaaggagactggtgtctggggaagggaggaagggtgatggttacaggtataggtaaataagttttccaacagttaacaatacttggagacaagctacagagtgatcaatgctagagttaggaacgctgtgagaaggcaaggtgttctgtttgtgccattggggagggctttgctgtggggattgggggaaggatattgttttaggctttgctagatggctaggactttaacaaataagaaagaaagagctgagtctttaagacagagggaatagcagagacatgaaaatatctagagagattgggagtgggaggctgagtctggaggtgagatatctgtatccaatcagagaagtttcctatgccttcctgtaatgttggaggcttcttttttttttggtaatcagtaaggagctgtcatgggctttgtaaaagggctgtgataggattactctggtgtgtgtgtgtgtgtgtgtgtgtgtgtgtgtgtgtgtatgtgttctgcttttactttatacatttcagagtctttttaggaactcttaggcaaccttaactctggggagtgtgnnnnnnnnnnnnnnnnnnnnttttaaagctctatagtactctggtgtgtgtgtgtgtgtgagcgtgtgtgtgtgtgtatgtgttttgcttttactttatacatttcagagtctttttaggaactcttaggcaaccttaactctggggagtgtgcattgcctgtctttatatgtctttacttctctgttgctgcctggttctgctccttctcatgcttctgtaacaaagtgcggcaatgcaggcttctagaaggtgatgtgagatctctgagcagaccatgtgtgtgttcttcccatccttttttcccctccctttctcttcctcctcctctttctatatcaccaccctcaccagcagcagcagcagcactcccctccctaaaataaataaaccagtcactccaaaggttccaagcacattagtcacatatcccagaagtttaatacagaattattttgacagcgagaacaagaagtgttttctagttgaacgcacagaacttgcttattccaactgggctttctgccgcacagacagatgatacgttttttagatggattggccgcacagcgcaggagactgtcgcttcccttggatacacagcaaactgctcactaccaaaagtggctggggagaagatgtgaaaggagagagagagagcgcgagagagacagaagagaagaggagaggggaggggaggggaggagaggagagacggggaagacagagagagagagagagagagaaaggaaatcaagttcttattatgtacataactttctcattaatggcttccataagtcactgagagatttctttgtgtttatttatttatttggctgctttggagccatgagtccttttttaaacccgggtttatgtctgttctaaaaaatgaggacagatcgagttattgccatgcgggtggctctccaagcattccagttgcatagctcttccagaaatatttcttgacgcacttatttagcactttctattgccgttactgagcagattacagaatcctcccggccctttcaccaaacccgtctagagctggtatggatctacttgtgcctatctggcagatagaaagatagaggaatgggaaggtgaagtccattgttactcatgaaggattttgaccagtaacctcagaagagtcagaagaagagaaaaagcatgtgctctcctctttcctgctttgcttttctgcttccaagtccctcctccaagcaggaagatctttcctgagcagcagcgtacctgggtgtgagaacccagagggagtgtggtggagagacgtgaaggggtcagttcctggaacattctgttccctctagctcccatgatcattgacttcttgcctctcaagtccttctagggatctccaggcttttgagaggctcagctgacctcgctcactgctgtgcatgctctctggagctttcttgtcctcttttggttgtttcttactagcccctcattcccaggactttttctgaggaatctctgttagttcaggtaataactggctgtgaaacctacaatagtaagttctttggatgtcggtgttttcagatgtttcttcttcatggaaactctttataaatccctcacaaaatgggatgtcaaatctcaatatgtaaaataatcaaagtgcagttaaatggtggtgctgttgttaaaaggtggaagatctcataggcttctagccagggccgagttatctccccagaagagctctgtgcctctgtggacccacttagtaagccattgtactggagttgctttaaggctccctacagccctgatgacctgtgctcagcattctttcagctttctgcctctttgtatatctttcaagcttgagaaagatcctctatagatcaggaagatgtgtccagtaagagatttgacctttgctggtttcttgacatgggctttgatgaaacccttttagcatgctcactttagatgattcttctcaagggggatgtcagccccaggaccccccagacctccatccctaaacccgggcttgcgtgtctggcaacccagggccagcacttcgttcttacactcagctgagtggtagtcctgccaccattgctgtggctctgggactatagcctctgccttaggaacacttatgagaggaatcgatggaattccaactatttttaaggattttttttttttttttttttttgctgagtttgcattgcaaaaggaaggtagagcacgggccatctctccctcctccacttatatttattctgcacctacctgcacgtgacactctgctattcttcagagaaggttctgacctttgtgaccacgctttacattttcacattgcaaggcaatttctaaagagcttttcccagctaagatctcatttgagcctcacaacaactctggggcaaaggagactgtaaaacaaacaaaaacaaaaacaaaaaaaacaaaaacacaaaaccaaaacaaaaaacaacccccaaaaaccttagacaaatctaattccacagtttaattaagcaaagaacaattcgtgaattgggcaggccccaaaccagataatctggcactgccatttggttgaagaacatttgtggacagaacaaagaaggtgacggacagaaaacacaagtgaggtacagaaacagctggactggttacagcttggtgttttccttatttgaataggtttgaacagttggctgtctttgattggctgaaactctgtgaatggtacaagagtaggttgcatcctgtttacacatcctgttaggacggaggaggcagctttaggctaaacgtaatttaacaagattcaatgagattatacctgtacgcccaagttcacagttaggtagagaaggattgtggggatttgaagcttaggcttactgacttacgccattgtgccatatcattcattctcctcgtggcaggaataatgaatgaatattctattaacaggtactacctattaaccgcttacatatatttcaaatgttactaggtagatactttttacaggcctatttcatcttctcaacaaccctataaggtagaaattattatgtccagtttgttgatgaatggctagaaatatagagaagataaataacttgctcaaggttatacttcacagaattgatggacctcgaattctaattaagattgctgcctccaggggtctatcagtataggatgtgatctttacccatcctgagtcctaggagatataaaacatgctgttgaaataacaaagctggtttgtgggtgatcatatactatagtaaatacgacatactgttaagggttaataggtggctgttttctgtgtttgttcctggagatcgtaatatctttatgctgttccttctacttcctttttcaattttatgagctccatgttgaaattatgagtccttaaccctattgaactgtgtgccattgggcaagttgtttctatttctggggtattgatttccccgtctcaaaataaatatcttttcctgctccgatcattctttccttttaagtattacctggctggtgaatgtttatattgaattctctttgtacaattcctttcaacaatattgcttggaattataaaaacttaataattgttttaaattgaaatgacaattgcaggttatccttgctttcaaaaagattttgtttctgaaatgtagcttgttaaaagtttggaaataaagcatcacatgaagaaataaagttatatcaagaaagatgcctaacacatgttctgattggctagctggttgtgcctttttttttatgtgtgtgtgtgtgtgtgtgtgtgtgtgtgtgtgtcactctgtctcccaggctggagtgcagtggtgcgatctcggctcactgcaacctccgcctcctgggttcaagcgattttcctgcctcaggcttcccagtagctggtactacaggcgcgtgccaccacgccctaatttttgtatttttagtagagacgaggtttcaccatgttggccaggctggtcttgaattcctgacctcaagtgatccacccaccttggcctcccaaagtgctgggattacaggtgggagccactacacctggccgtgccttgttttttagtatcagttttttcttttcttttcttttcttatcgtttcttttcttttcttttctttagggtatgattctatttatttgaagttccagaaaaagcaaaactaatctgtggtaatagaaaatcagagtatagtggttgttcgcaggaaagaggtggtatgagattgcctgagaataggcaaaagagaacttttcagagtgacaaaagtattctgcatctttgataggagcacggattacttagatgctttcctttttctcaactggcctaagtttctttttctttctaatgcttgtataagaacaaccttcgttcccaaacacacagacgtgtgtgtgtggacacacacacacacacaaacaattcttcagaaagaaagcctcttacgtgtgttaaacttgccacttttttctcaaaatgtgctttgtatttctttgggtgagcaaaagaagaatcttcctcttctcaagttcagagtttgaatcaattcttcctgtcttttgcatttcagtaaatgtttcctagatggattcatcggttttccagtaaagacaaacagctcagaagccagattacattcatacccaaggcctgagttctgtgacccaggcatcagagctcagtgccatatatggcgaaaagaggaacaggagcaggagtggagggagaatgccagacatgcaatgcattcctcagaaatgtgcattcataactggcaaaacaggacccttgctggtttccatcttatgcagaacatgaactgtgaagttttgagaaagaagctaatgttccaagcatctgccacagggaacagtttattttcccttttctttttggtcacatgtcggtttaatttggagtcagtgtttaagtcaatgctggcatggggtgaagactaagaaattgttcttgcagtcagcagacatgggttctcagcccaactccactgccacccagctgcaaaactctccttggcttgtttttaatcaatggcaaagtagcagggttgaatttgatgatcttcgagatttctactatttctgttttctttggttctaattttgcccgagattttccagttcctgtggaattccccagtgaaagcattttctaattcttccaaatactttttgtggcttgaacttaaaaagacaaaaacaaaaatcccagtcttgaatttttctttgtgatttcctgaagtatgttttggatgcattatgaatcttcaattgacagattatttcttgctcggggtagagaagaatgcatttcctgcatcttcatggtcttctttcacttgcccctcttattgttggagaagaaatgtaggtatgttcaacacatagttgcagggacagctgtgcactaagcaaatgcagacttttaatgaccttgatagttgtctgcttctctcatgcattgaagccttttctgtggaagaagtgggagcagcagaaggcagattccacagcttcctcacacctcaagagacggaattagggatgtgagactgaggtgttggtttcccagtcagtaatcggatgagacactttgctgtcacagatgttaagaaggttaacaagaaatagaattgtaaaactctggccctaaggtggactacggtcactttcactttgagataaggcatgattttaaatgctcctattggtctttatgggttctgtagtctattttcaacagactaaaattgtcttgttgcaaaagtttgcaattttctgcttctttgggagagggttcaaaccaaagttgacctcttccctttctcttctgaaaggatgacgttagtttctcagctgaaataaaggaaggaggaagtttccattgggtcttaggaaaatattccagcattgggctttaatggcagctgatgtcccaaacttgtgcacaatggctccgagaaggccatagtggtttaggaggcacccataatagtcccttttattcatgctgagaatgaagaaccaggggcaacactaaagaaacctgcacttggcttttccttgctgcttgtggtccctttcctggaagctgctataacacagccaccaagtcctgggaggaagagaaggaggggattaattcttatgatgcagggggatggctccagagagagtggaagcaaagacatctgtgttctgatgacagctgtgccacgagtttgctctgtgacttggtcaagatgctttgcaatttgaggccttcatttctccgtctggcaagtggacatgctagtggaccttgaaggcctcttctagctcttaaaagcatgaatttaatatatttccagattgtctgtttatgtttcctattgcatgtacttggtatgcccggtgacactgagctcatcaacttgtaaaaagaccgtgccattatcttctttaacggcaaacagaacaaaaacagaatcctctttgtgggtgcctgctcaccgtaatattaggaccaaattcttttgtgtaacattcacctcctttcccagtctagttccacctaacggttctagtttttgggaagcgtttgcttccatgtgtgacattcatctttactttgagctctctgtgagccttttgctactgcagaggtatgtgtctgttgaaagagaggaagctgtacacgatgacacggcagagtcattgggtcaggagtggtgttgagaagaatgaatcaggatgctggggttctgtgatagactctacaaatagtttacaagaagatttagggacagtaagcacaatacatcttttgcttcagtcaaaagcataaattttaatggttacaaatgcctggtgctattatgagaaaaccacaggaaagaccattatataaacagtaataatttgttgactatgactaatcctttggggagtatgatatgtgacataggcgtataagggctttatgtagactaacccctttaacacctattaacttgttagaccctgctaatgggtccacgagggtggcaggctaaggaatgctaccctctatttactaacgagcaaagcgatgctgaaatacagtgaagaagctgtccagtgtcacatggtgaagagatggcataacagagactcgttcagtgcttttatgcctgcgtcgtgttttctgcctttccaggcttcagcctacccagtaaagcaggataaaaacacacaataactgcccccaccacccacagccagaagatggtagaggatgggattgaattagtcatgaatcatgtgaaccatagtatttggtgaatcagtcttggtaattggtggggtgatatgtcagtcagtttactttcacaactgaattatcaactagggcaccacgatggaaaacagaattgaggatttctactttcttattattcatttgtacgtgtgtactttcacttatttaaggcaatgaagaactaataatacctaatatggtgccaggctttgtagtaggtgctgacctgtagaagtgaaccataaaccctaagccaagggctataaaatactttaaaattcatgtagaatcctctctcaatcttacccccctttcatttttcagtgtgttctctgatacttttgtacttttgccaggtgataagtccaccttgacttggctattttatatcttttttttttttttttttttttttgagacggagtttcactcttgttgcccaggctggagttcaatggcacgatctcggcttactgcaacctccacctcctgggttcaagcgattctcgtgcctcagcctccctagtagctggggttacaggtgcacgccaccacacccagttattttttgtatttttagtagagatggggtttcaccatgttggccagactggtctcaaactcttgacctcaggtgatccacctgcctcggcctcccaaagtgctggattacaagtgtgagccaccatgtctggccgtctattttatatcttatagtaaaggatggttgcctcaaaggctgtaaacgtcaatgtttagagatatatatgaaattatttgtaacttccttcaatagtaactttcaaatgccacccttacatggctttatgaaaagtaaacccttctcttaaatgtctgcttttttcttagagtaagtttcttgtgttggctttcttttctctcttctctttatcagtgaattcatttattctaaatttttttctgatgtagtttgggacttcctaacttaacaatggaaattgaaaattggagaagctcattctgtattctttcctttttattccatttttgatactggattatgtctgtataattgctcaaattgtgagtcatgtaggaacatgctctgtgtttctgcacatgatatttaaaacctatttatgctttcttaaccacaaaggggaccataaaagtcctgtcaaatagtcccagactgtaaattccttgaggtcaagagctgtgtcaaatttatttttgtacctctttctgctacagctcccagcccctagcccagtgccaggtagctctggcaaatgagagtgggattgaattggatttctcgttctgaccactctcttggtgcctttatcaacttgtccaccccattgggaggaggggcatggacctgtcaagtgtgatgaattggtagatcatggagttttccatcctccactagaactttagctgtgtttagacttcagaatgctgagtaactaataaaaaacgattccaaagcactctgcagatagaaagtgcttcatgtgtaataaataataatagcctcttaagattaggcacagccacacaaagaagtgccagtcttgcaggccgcaagaattcctgatagaccttatggttagagtggattggttgagactgacccttgtcactgttttgtaataagcagtttcacctccaagttaccacgtattttccattatgggaaaagggtagtttctgaactatctaggaattaatccttccaattatcgttaggagtctgactgaaggaacaccatgaaaattgacagtcaagctttctaggtaagcctaattcagtgcttaaatttagttctaaatcctgtccccttctccaactgttatttctttaaaggaatcagcagtcacctctattttagttctacagcatgtggtggtcttaagaggtggaaactggcaccttttcccaaaggagagactggaatggccagagcccatcctgactttgggtcatcactttcagattaaaacataactgtacagagtacatttcccttgattctctgtttccacagagaggcttttctgctttagggtttcattgatgggatgacttcttttcctttgtcctagagtgcgggtcaatctaattcaagtttggtgaataaatggagccataaactgtgttacccactttatttatttatttatttacaaatgaggtctcccctccctctgttgcccagcctggagtacagtggtgtgatcatagctcatctcagcctggaactcctgggctcaagcaattctgccgtatcagtcccctgagtagctgggacggtgggtgtgcaccactgtgcctggctctccaccttattaaagtgagttaagagaagcataaacagtgttttgctattcttcttggtaactttaaatgatgctttcttctcagcaatgatggtccagtctaactgggcatcattcatttagctattatttattgagcacctgctgtattccaggaacttttttttttctttgaaacctagtctctgttgcccagactggagtgcaatggcaccatctcggctcactgcaacctccacttcccaggttcaagcgattctcctgcctcagcctcctgagtagctgggattacaggcacgtgccaccacacctggctaatttttttgtttttagtagacatggggtttcaccatattgtccaggctgatctcgaactcctgaccccgtgatcctcctgcctcagcctcccaaagtgctgggattacaggcatgaggtaccgcgcccagcctccaggaacttttctaggtgctgctggtcagtgaagaaaacaaagcctgctgtagttaccatttgaaagactgaacagaagtgtgactttaaaaaatgatttggcaaaagtatgctttaaataaataaacacagcaaacaaaaaacacaacagctctttcattctgtcctttcctctattctttctcttgtctcccatttttgtcctgtgtgtaacctgactccacaccttttattctctcactctgcttatcaacacagccatacttgcttctcaggctcttctgtgtctctttgttgtgtctgctgtgcttcatcatgtggcgatgaagtagatgaaggttgttggtggccggaccccaacttcgtattccttcttagctagttccttgattgatctccagacatggagtggcaggtaggtgctcttgttgtaagtcacagaacctggaggaaagagtggttcgtggccctggggcctctgggggctgatgcttggatatttgtttagatatttgtttggatatttgtccccgtccaaatctcatgttgaattctaatcctcagtgctggaggtggagtctggtgggaggtgttggggcggatccctcatgacttggtgatgtctttgtgatagtgaattcttgtgaaatcttgtcatttaaaagtgtgtggcacctcccaccctccaactctgtctctctctctctctctctctctctctctctgtctgtcctcctctcctgctgttgccatgtgaagtgcctcctcccttttgtcttctgccacgttgggaagcttcctgagcctccacagaaggagatgctgctatgtttcctctatagcctgtagaactgtgagccaataattcaacaactcaaccacttcttttcttttttttttttttttttttttttttttggagagacaggtcttactctgatgcccaggctggagtatagtggcatgatcttagctgactgcaacctctgcttcctgggttcaagtgattctcctgcctcaggctcctgagtggctggacttataggcacgtaccaccatgctcagctaatttttgcatttttagtagagatggggttttgcccctttggccaggctggtctcgaactcctgacctcaagtgatccacccgcctccacctcacaacgtgctgggattacaggcatgagccacctcacctggccaacctcttttcttttaaattacccaatctcgggtatttctttatagcagggcaagaatggtttaatacaggggcccatccagcagcactgcattaccaggattctgctgaagaaatggacgtggccccaaaagccatagcctggctgccaggtgccccagagtattgtcaactcagaggaacatctctcaggaaatattccttgattctctcttctctattagttttttaaatgcttctatcccagaggaggtgctcagtaaattttagtttctttccttttccggaaagtctcatgactctttatctgagtttgacttaagagaacttacttaataataattaataataaagaataaaacctgctaataataagatttaatagaactttctgtttaattccatggttattatacctatttcttaatctctctaagagacatggactgtgttaaagtgtgtttatgaactggtggtcgagggtgcatttccctcctaagaaaactcattccttgttttgggataaggttcttggagctacatttaacactcagtcctagacttcagtggctcaaatgccgagacatgacctccatattgaccacacggttgatcatgctgaccacagatttctgctaaagcttgaggtgcctgaccatccctggctattgtcattcgccctaaactagctgtttgggaatggggccagtgatgaccctttagtagagataaggcagagcttgtggaggaaaaatcatttcttctccattcccatgatttagccctctgacttcatgcatttctttttgccctttttcttgtgctggattttaacccccagcctctctttcgatcatgataatttgcatttattacacacgtactatgttccaggcactgggtaaattgctttctattgttcatttcatttaatcctcaaagccagcctatgcagtagatactagtgatccatattggatggatgaggtatggatggattagaaaggtttatgtagcttacccaatgtggcacaacttgtaatggcagggtcagacttagaaactaaatctctccaatactagcttttgattttatttttaccctactcacccctgatattcgtcccctggccttttctgcttacctggcttggagcaagtcctcatctgccaaagactatgtaggtggttggaaggagtgctctgtcctcacctcttcctcccatggcacctgcagccagagacctgctgtgtgtgctatatactcttctgacctctctgattctgaatcgactctcaaggctgaattggctgacatgcatcttctagtggattcattgtttttcatggtttacttggtttatgacaagctagggacagcttgacatttgctttcccgtcagtggtctggggacgtgcacagagctgcttgtttcagatctcctctcggtgtttctctacacttagtgaagactatataaccatggctctattataatacaatacgttataataagatctaggggcattctcgagaacttgggagcaatctaagaaaggagagtgaggttggagagaggcgtgtcctttgcatcttctggtagatgatggtggaggctgtgtaataacatgccaaagcctagcccacttgaaagcatcacgctctccagggaactgcctcagcctggggcacttatattatccatgcttagcatttttgtattactttacatttgtgaactgctttcccatgatttattagctgttcttgtttttaatagcccctggaggtacattgatattcaggcttctgagaatgtaaatgcacagggaacgttcatctcatcagatatttttggatctgggttcaggactctgacctcctgggatgaggccatttggggtcactgcctcccatggattagtaggagatcaagtggacttaacttcagctcctaaagtctccaaggcacagccatggaatgactgcagctatttaaggaaatggcgtagaagccattatccaaagagctggattccagtcctgactctgctgctgaccagcttcactggccttgagtagttgctttgcctacctatgcctcagactcaccctctataaaacaaaggtaacctctcaagtccctttagaccccccattgtattaaatataattctgtgactttggactccttctctggaaccccttgggtagccaatgaattatatgacagggaacatgggtatagatataacccattaggggacttgaattgagaaggtgctcaccttcctttctctaggattcaaggaccaactgacaatgatatgctttcagattcattttaagaagcacacaatcctcattcactataaaagtaagatagcgagtggagctgttagaggaaagtcagactggagccaagaccatcatttctgtatcttctgggtgttgtagaaagtaattagcaggcttgattatctcactggttcaacacacattttagggatgtgatgtaatgtgaggaaacatttagttgtcagattttagggctgtatcaaatttattcttgcaggaaaagtctagttgtcctggcaacctaaaattgatttctttttgctcttgtcagctgaaactggtcccctttgaatcattcctctaatttaatatagagagctgtgtgtctccacctggtgaccgaatcatttttaatgacaggtaactccagcaaatggctcctctttcctacctgagccagaagctatagtttattactaccttcaccctgtgttgttctctttgtgtttatttatttgtctgtggagtgaggtgtgtaagtaaagtggcattcaattaattaagagtttaatcaggcctgtagagcagtgatgtaattggcagccaatcactgcctttcgttttcagtgacctcctagacatgagtgggattcgaatgggctctggaagagggagtccttttgtgtggatgtctagcatttttgtaacctgaagagggtgatgtaatggcccagatgaaaggagaaagcggagctgcatggctgctttctgcctctgtcagtcatctctatcaagggggtgggtcatctatgaagggtggaatcgacatcattaggaagaaattgatgcctatgacaattgaagaggttgtgagagagcaattcgctttccttaaatggttgcaaatttcatggaccacgaatgccgcatctcaggatacagaagagaacttctgatggggaacggctaccagtaattttgaggaaacccagaaatcagcagaaatgccagaaagtgaggagacgaggaaataggtattatcaaaaaagtccagcgcccatcccccaccccgcccccaaacgaaacaggtatccagagtctagaatctgctgatttcattgtgattccagttgtcgacggtcctatgtagacaggtgatttgtgagtctttgaaaggaagtagtgttcaccaagagccagaacagggtcttaaccagttcccgttttgtctgggttaaccaactggtggattaacacgatgacacagacatagtggggagaatgtgggctttggagttggattgtctggatttaaatccagagtccaggtcattgtatacaaatgaccttaggccagttgtttaatttttgtgactcagcttcttcttcatgtcagttctatcctggggctaatgataggacgacaaaggaattttttttttttttttttaagagggaatcttgctgtgttgcccaggctggagtgcaatggtgcaatatctgctcactgcaacctctgcctcctgggctcaagcgattctcctgcctcagcctcccaagtagctgagattacaggcgacaaaggaatttttgaagacaaaatgaaataatgcatgtgaagagcttaaaacaatttgcacatatgaattatttaataaatgtggttcttactactgtttgtaggaagacatttgaatttagtaaagcacataaaagccttttacatatgtatggataagtccgtaaacaaatacacacttattagtgatgcgggtttagaaagagtatatttcttggtggcagaagttccaaagtcaggccaggcatagtggctcacacctgtaatcccagcattttgggaggctgaggcagatggatcacttgaggtcaggagtttgagaacagcctggccaacatagcgaaaccccgtctctactaaaaatacaaaaatattagccaagcatgatggttcgtgcctgtaatcccagctacttgggaggctgaggcaggagaatcgcttgaacccaggaggcggaggtttcagtgaactgagatcaccccactgcactccagtctgggcaacagaggaagactctaccaaaaaaaaaaaaaaaaaaaaagctccaaagtcatattgcaaggatgaggacataggtagggaaggggaaaatttgtgaccatttttgcaactttccaaactcctttctcctcccccatctttctttcttccaagaagttaccgtcattagcaatttgccatgtgtctagtttttgtctcacatttatatacctgtaaatatatgtttattttttgctttaaaaacctcaacagttatttgtataaaatttaaattctttgttctttcatgaaatatcatgactacaaacattgaaatagttactccgaattgcagtcacatgttttacttgtatataatcattcttataggcagagggataactgtaaccttttcccttctccttctcaccttgccctttgggagacgtttcttccctttttttgtgtctttctaccttgtccttctcctcccctcctctcttttcccttcccttatattctgttttcttaccgttcgtctccttttctctctccttccctccctccctcccttgcaatactttcctacctttcatactttctttattatatttttagtctcttgtctttagcttaatatggggctcagtggccaggcgtttacataatattgtgggtccttgaaacatcaggtcttggacacctagtctcagctctgaattgtcaggttcctgctgatatactttctgggtccactgttgctttgtatttaatactggaggttgtgataacattgtccagcttcaggaggccatggtagcgcaggagggatgcatgtgttgtgtagttccttgtctggaatgcagggtgacaggaggttggcttgtgtacacatgttcatctccttgggctactggagagggagtctttattttggtggggtgctcctaagagcagtgagctcagagcctctgtcttgagacttgctgtgtgttttcttggcctcccaatgctcctggcataagtgacatccctgcttaggaccctacactcatgatttcaggcaacctttctgccttccttttggcccctgcctctccaccccatgttcatattcttcatcccaggtgcagtgccaccctgctggctacctctgccaggcagcatccttcatgcttagctcaaattccaccttctcagaaacatctgacttcacatttggtgtcagtctctctcctcctccatttcccatcacacagtttgtactttcagagatactttcatacaccaccttgtattcaatgggtggtatctgtttctgagttctgatcagagggcagacatctctgatcctttggaggctagctcagtagctggcatttataggcactctgtaactgttaaattgaattactgaggaggcctgaggggttggaaggtcaaatgcagttaacccagggaactagaagggcccctgggaacttggttttggagcatggcttttatgagcagctatcagcttttccccaggctccttcttaatcctgtctctctagaggcacaaggagaggtggtgtttgcttaagatgctggtggcattcctagtgaagttaggtcagaatgtgccatctcttctttagctctcaacttcttagagtgtcaaccctcctcatattggaaaagcttagcttttaaaaaggagaaagtggtttacatgatgacctctgaatttttgactttgattattaatcttcttgaagaagactttgcagttgcccctgttacaaggaaagcagacatgccaagttgctgcatttgtgaaattgaatgaaattctggctgcgttttatggctctgacctttgggaacagtccagggtcagactgctcacatgatgtgcttgataaatccgcctcccaacagcactgttgagatcttaactagaattgctacttgcgaaacacctttttctgacttgcagttcagattctgcatgtactgctgactactgcttctagtggctcattcagataagtatgctatatattaggtagaaagaggatgcgtgatactaaggaaagagaaaaagagccagcccaggacacttgggttccagtgctaagtctgcaagagacatgtttgacatggggccttagttttcagatctataaaatggagacactaatcattattaggaagggttgtcaggagttcgagactagcctgaccaacacggtgaaagcccatctctactaaaatacaaaaattagccaggcgtggtggtacatgcctgtaatcccagctactcaggaggctgaggcaggagaatcgcttgaacccaggaggtggaggttgcagtgagccgagattgcgccacggcactccagcctgggtgacagagcgagactccatctcaaaaaaaataataaaaataaattaataaaacaaaaagagctcctcctatgaaagctctggaaacatcctccaccaaactggttgcacttctctaggcacaatatggtttacatccttctaaaatcagcatctcggccggacgcagtggctcacgcctgtaatcccagcactttgagaggccaaggtgggcaaatcacctgacctcaggtgatccgcctgcctcggcctcccaaagttgttgagattataggtgtgagccactgtgtctggccaggaggagctcttacagagctggaagtatttactcagagaaagatggagttagaagggaaggttgagaatgagagacaagttagtgtttattcaaggtggaggtgcacaggcctaatgtaggacaacggcaagtgggttggagaagaggggcttacgggaaggatgggcaggagaaatgggatgggacccaggaggcccaagggggaggtggaggattcaagtcagagcttcagatgctgggtctggagacactttctgaatgcctaggcaggtagctgtggtgttttgcaggataagaaagacagaggctttctgtagctaccatcctgctaggtgaaatgaagggatggtctgggatgtgtgtgtatgtgtgtatgtgtacccacatacgtgcatgtgtgcatgagtgtgtattggtaacagaaccaaggagatcagggacttacccaaggccatacagctgggaaacagctttcatttgattacggtgctaagtttagtaatgactgcgagagacaaaaacgggcagggggagcatgtagggaaagggcctcggccccatttcctgccctctcaggcaggtagtgagtaggagttttaggtttcactgtttgatagcatcacctcctctgctttcccagaaattattcctcgaagtatgactcgaatcattcctctgttgggagatgtatcggttcagagctgactttctgctctggttgtttactgaaaaatggtagcactggcaattcagagggggcataagcaagtgaagaaaaaaaaaatgaacaaacagggcatgtgaggtcaggggccctggttgtgagtcccggccctgcttttagagacccatgtgaattgggcagatcaatcaacttcttagtgcctcagctttttcctctgtaaattagaagatagtgatttctgcttgataaatttattgtgatagtgctttgcaagttgtattgttggtcgtaggataataaagataaaggggtatacagacttggattctgtttctatatatgtgaagcgttagagagaggtggtaaattgtttctctcccgtgggttgtgcacatctctgatattatggtaatccccatatcttctccttttgcagggtggggtgtcttggatagtatggttactgaatgtagaatctactaactcctcttttttatttcctgagactgggtctcactgtgctgtccagggtggagtgcagtggtgtgatcatggctcactgcagtcttgaactcctgggctcaatcctgagtagctgggattacaggtatgtgccatcatgccagctaattagaaaagtttttctttgttgagatggggtctcactatgttgcctaggctggctttgaattcctaagctcaagtggtcagcctgactcgacctcccaaagtgctgggattacaggcatgagccactgtttctggcctcctttttaatattctgccctgtgcaaagcaccagcaccaacagcctccctcccacaacccccaacagctgtgcattaagtatcactttggtttgaggatttcctagcttgctgtttatcctgggagaatttctgagtttcttggtctttgtttctttacccaaaagttggggatagttcagctttgtctgcattgtggacactacctccagaaagcaatgggaagaccctttgtaagctgtaccgaactctttgtatttttggagcacattttgtcttttttctcccttcttctggtggctgaggtacctctttggtcttgaaaagacccacttatatggaggcggaaatgggcttatagagggaagtgactttccaagggccctggaatgaattggattctgagatctgtgcccgtccttgtcacaacgtgtcagattccattatttagtgtgggcctgatttgtccatgcctgggactttcccagaggaagtcatactttctggaaactctctgaggtcttgaaggggtgggagaagtctctgacacaagtgctgctgtggtcatggaggcttccattcctctctccttgtgttgagcagggaattgctccttggatattttaggtttgagtgactcaacatgcttatgacccagaggatgctgtggtgtgtttggcagcatgctggaattagtcagaaggcaaaactgcttgtcctgaccccagaacccacttactctaggtggatgagaaagtcctctcagatcctctatttcctaattcatggcaacttctggagaacagtattttctctgttactgctttatggggtttagtgtggaaattaaagaagagaacttcttattttttgtaaataataatgcaatattcagatactgttagtttctgaaatttaaaatgggcatctcacttctgtgttccctccccaaataaatgtattgatactaaaaaagaaagccagctaactttatgaggatggctggtaaatgagccattctgtttttgcttgctgtccaaggcctctaatattaagcctggaccatttcaagcatatatggaggatatatatttcaaatatacattaggggtatatatttcaaaatcgaggacacattaatagtaagaggagaccatgtaagacaaagcacaggtttatttttatttttgtttacctgtttattttttatatttttgagatgggatttctctcttgttgcccaggctggagtgcgatggtgctgtcttggctcactgcaacctcctcctcccagcttcaagcaattctcctgtctcagcctcccaagtagctgggattacaggcacccatcaccacacctggctaatttttgtatttttcttagagatggggtttcaccatgttggccagcctggtctcaaactcctgacctcaagtgatccccccacctcggcttcccgaagtgctgggattacaggcgtgagccactgcgcctggccaaagcacaagtttaaaaattacaagtttccaccagcctcatatctcccttggcttataatattcaagtgttcatggatactggggcttgccatcccccgccccgtgtgttaatgcagcccatggaggcttctcatagagacataaacagtgggctccagaaggtctctatttaagaaactgaggtctggcaaggtcacacatcgaggaaatggcaaaatcaagactaaaagccagctctttggattctcaattccctgctctttctgacacttcactcttccctcctgtcaggtgaagagagaagccagatggtttgacaaatggttctcgttgctgtcaaatctgccttctttctttgctcagacagacagttcttaccttccctttttcgggggactggcggaggtggggtgaggagagaggtaggaaggtggatgaaggaaaaaaagaagcattttattgcttcattctttatgtagtagtgatggccaataagttctttttttctctggcaagaagctaagtaaaggcaaggagtaatcgtcaccttgaatttagagcacatagaggcctagaaatggcaggctgtattaggagacaacattgatttcatatatattcatctctgaaaaaacatgtttaagatgccatattcataaatactaataaggctgtctgattccaattttcaggtgagattagcattttattgagtattttatctgtcagattcaatgctggatgtaccatcctcccaggcttattagcataattgctgtgcttaagcaacaataaaaaaatcagcagtaaaatagcatttagtgcaggcaatttgttatcaaaagcttttacttaaggacagctccagcctgcatttattagcaagttagggttataatttatttttattttgaaaaacaaaagtgggagaaagatttggcttttttgttttggaaataatagagaaattagaaagcattgcctctttggaaaattgtccacatcccttcttcctttgccgaaagcaggctgtgatgggaatagattccacttgtgagcgacattggctcagacaaaaagttgctctccttggcattggaacaaacgggtagtaacgtccctttatgcttgtacacacatttccaaaacactttcagatctcgtttgttgctcaaacctcacaccagtcccgtgaggtctccattcttagaaatagaaaaccaagttgaaatgacttgttccagatgaggcagttgagtggcaaagcggaggtgtaaaaactagtcttccagcctccagtcctgtctcagcattgctcccccttcacgtcgttgtccagagctcctggtggagccttggccttttccatatgtacacgtgcacacacacacacacacacacacacagatctgtgtatctacacctgtctatacacatacgtgcacacctatgcacacacatctatgcatacatacatactttttcttttcctaaaagttaattatgtactcttgcatttgtttttcatttgatgtccgggttgaaatacttctgccacatgaacttctcttgatgccaaatagcctcttaaaatcaatctctctctnnnnnnnnnnnnnnnnnnnnnnnnnnnnnnacccccaccccccccgcccctctagctagcaactgtatcaggaaagcacttgtgattaccatctgttaaggacctggaacaaaataaatgatgttataagtttttgtagggaagatagagataagattttaaaatatggagattgggaaatcatttttcttccttatttcttaggaaatgtatcagaaataaataacattaaattgatgccttttagtgggttttaggcttcaattatgggtaataattttcaaattgagaataaagttttgagtgaaaatggacaactgaagcttctaagctttgagaggagttattttagcattttagattttcttttctcagtaaattcaaacaaagatcatacaatcattgaatcatagcacgtctaaaatccaaggctctgtgctggccactgtgtgttttacagactagctcagacgtggctatgagccccaagacatgtttaaactattagagaggatactaacgatacattaataatgttcttggttttgacagaatattctagaacaggaactctagtaggatttttgcttatgttacatcattgaaatttaaattcactcaattatttattgactaaatattgagcacttatgtgatgttcactcttgtattttacatacatcatctcatgtaattttttaacaatcatatgaaatatgatctgagataatagtcagtactgttattattgttctcatcattagatgaggaaattgagactaagtaacttgtccaagtcattcagctggtaagtggtagaactgctgtggtctccctgtaaacacatgtttttttcatggtaccacttggcaaaaaacgaataagcaggtacatacgtagacagatagtgctaatgatgattagagaacctcagaactcatgcagaacctggatgtttagagagaaaatggaacttgaaatcagacaggtgttcaaaccctactatgcttcttagtgtttgtaaaatcctcaatttaaggacctcttaggatttcggtgtcttcctgtgaataaaggattataaaatctttctctcaatatcataatgagaataaattacaaaatgtatgtgagtgtctgcaaaggtacctagttcatggtgggagttcaccctatcttggaagtgctcataaacatgcagggttttttttttgagacggagtcttaccctatcgcccaggatggagtgcagtggcgcaaccttggcctcccgggttcaagtgattctccttcctcagcctcccgagtagctgggactataggcgcatgccaccatgcccgactaatttattttgtatttttaatagagacgaggtttcaccatgttggccaagctggtctcgatctcctgacttcaagtggtctgactgccttagcctcccaaagtgctgggattacagacgtgagccaccatgcccggttcaacatgcagttttgtgtactgtttagggacagatgccgaagccacattgcttgggtttggatccatcctaccacataatatcatgtgaccttggacaaacaacttcacttctagtgctgtactttcttcatctataaaatgggcttacatcatagggtccttgtgaggattaacaaagttagaatgcgtagagcatgtagaacaatgcttggcacacagcatgccgtgcttcagtggtagcacttactattccattatactacagccaccgagaaggacaggtacacagtgaatagtttaggactgttcatgttcccggcctcttcactccaagagcatcagcaagtttagtttagaacataggagttgtatttacacagctactaatgaccttggaaaagttcttggcttctctgtccttgacctttgtttatctgaacgagtaaacttcagatgacagagtgtgtggggaatggaatgcatccgcatccttgataagctgccctagtggaatgttgccatgtggctactgagggtcaattcactggtcaaaggtggcctgctggttggtattttttctgtgtcttccgggcaagttctgtctttcctcagtctgcacatgcctgggtctgtcctcagagctctctcccatttccctcttctctagaaagcattgatataatggggccacctcttccttggactgtttctgtagcatcagaaggaggtgggtgggaatttggcataccactttttgaaaggtaatacattctaacatatgtatttcacccaccttcaaagagtaagaatacactgaatgatacttaattttaaagatgtgttgctgaggtgaactctaagacgaacaattcttcagaatcttttactttcttgggcttcttgtcccaaacaacaattatctttataaagcctgtgtgtgtatgtgtgcgtgtgtgtttgtgaaacttcctggaattggtagtgttgattttgagatgtttctttggcttattcaaaatataaacagaaaggctaaagtgtttttcatgtcattaagaatgtctttataagaaaggacattggccgggcgtggtggctctcgcctgtaatcccagcactttggcaggcccaggcgggtggatcacgaggtcaggagatcgagaccatcctggctaacacggggaaaccccatctctactaaaaatagaaagaaaaaaaaattagccgggcatggtggtgggcgcctgtagtcccagctactcgggaggctgaggcaggataatggtgtgaacccaggaggcggagcttgcagtgagctgagatcatgccactgcactccagcctgggcgacagagcgagactctgtctcaaaaaaaaaaaaaaaaaaaagagaaaggacattaagatgataccttaccttgtgtggggggcttgtagctttcaaaacacttaagtacccattttcttatgtgtgctttatgacatctctatgatgtaggcaaggcagggtttatcattatttcccttttagaaatggtggatctgtggttcagagaagtgaaataagttttcttaaagcagttctggatgcaaacccagaacatttgactctagggtgctttctgctccaccaccctgatttgattgtaaggaggtaattcttaccaagtactgtcagattatatagagttgtaatatatcttaaaaatgcccattttaattttctttaaacagatcagttaaaaagttaactgtgatttgataccatcttgtttctccccaagtttaaacagcaatgagtctctaggaccttcggttaaaccagcatgtgtttttcaaaaatcaaatgtcaaagcatttcgtgaaccttgctttaatgaacaagagaagtgaaggtacaattccttttttgcatgaggtaattaggaaacaggatgtgcaaacttgctatatgaatttaaagaggagcacttctactgatgtacaaactggatgggcatattacagagggtttcatgctggtagaaattttaagtgaaataagttctcattaagcatatcaattatttttggactgtgtgaaaacttaatctgtttcatgagttggatctaaggtggtcaatacctctacactccaaaaaacagaagcatgactcaaacatctagttctgattgcagagtgcctttatctggaagactggacatgtcgtcagaatatagagcaagagggatggaatatgctcttaagtttcctgatgacttaagggtctgcactatacttgcttgggaggtgggaaggattgaattctctttggaaaatgcctttgaatctcttacacacatggtacccaataagcctagtgctgtattattagcatcatgtactagagtatggtttacctgacataggttttggaaatctatttcttttatttacactacatggtttcttaggtggcaattctcagtgaattaccagcttcctgatagtgtcttgaaaagcatgctttataaggaggcagaaagtgtttctcttttgacagatgacctccttgaccccttgactttccatttttgatggtttcttttgaggtctacgtcatctggtaattttattggtgtgatttatgcccccagtaaggatcaacttgtatagattctacattctcatggaagtctatgtactgtctctactgtgtaataattagctccaactctacaaacaaggttagaaatgaaatcaccagcattacaagtgagacataacaaatggaagattcccttctctgagtttctctcataccgttaattttatttgagctggcattgactcattctatatgtctcttctgctagattttgaactctggaggactggtctcatatcttattaattataatggtggcgcacagcacattataggtatttattactaagtggttgggtttaatatcttaagaagcagaaaatgtggtttttcttgagagagagatggttttggatgttgttcctctagtatattctaagcctgcccgcctggggctctgtaactatggctcctaacgtggggagcccacaatctagctatatcatgttagcgagagctctttgtatactgaaacaataaacttaccatcttgatgagttttacatgtagaatggcttaggttataaggtactgccacctcattccactgttgagaattgtctaatgcaaagctcactttttaaacatggataattggacagtcatgagtggatcatcgaagggataagcaaaatatatgtcaaactgagaattaatatctatcaaaacacttgctattatttggtagatgggagattattttatttttaagaagtagattggctgaatggaaaagcaaaatgtggcataaaataaaatgggatattgttcagcagtgaaaggaataaagtactgatatggactacaacatggatgaaccttgaaaacattatggcaaagtgaaagaagccagttacaaggccgggcaccatggctcatgcttgtaatctcagcactttgggagaccgaggtgggtgaatcacttgaggtcaggagttcgagaccagtctggacaacatggtgaaacccccgtctctactaaaaatacaaaaatcagttgggcgtagtagtgtgtgcctgtaatcccagctactcaggatggtgaggcaggagaatggcttgaacccgggaggtggaggttgcagtgagccgagatctgccctccagcctgggtgacagagccaaactctgtcaaaaaaaaaaaaaaaaaaaaaaaaaagccagttatgaaagaccacatattatatgattccatttatgtgaaaagcccacaataggcaaatctatagagtctgtagcgatagaaagtagtggttgccggcagggttggggtagaggataggtagtgattgctaataactgtgagtttctttttgggatgctgaaaatgctctttatatggtggtgatgattgcacaacactgtgaaatactaaaaacagaaccgtaaactttaaatgggtgaattgtatgtaaattatatctcaataaacctgttttaaaaagtggatttccctttaatctattctctgaggattgcttcagggattcaaaatagtgcatagtgccaagttttaaactcatattgatttgtttttggtaaataagtcatgcatgcttaacaatggtgaacacacttaaggaaaaagtggtaacacaactagagccaccaaaccgaagcaagtatatttccacctaacttcatgcacgtttttttctcagaagctttaaaaatttatactttctcaaatgttgattaatgagatatctgataagaaataacagggtactgacagtcctgattgtataaataggcattagggattgtgttcatggtttgcttgtcagcacaagagaaatgtgtgattatgttgaatgatagttaattttcttatccacccattttaaaaataaagatgtacagctagaaaacaggtgcccagggaatagaggagacctgcagctttgataatgagccccagaaagaaactagaaggaacaagctcccgcttaggaggtgccgttcgagtcctggccagtgtctgactgtagctgatgggtttagagaactgtggctggcttctcacaaaggattttttcatttactcttgttttgtgtttgagtatagacagcttttcccatcctccatcagggtcattgtcccaccttctctgactcacttattgtgtcaacagaattaaaagagcagccggtggacgtgtgtagaggctgaaggagagctgtgttgctagctttgtatttgaacggttcgtacacaaacagttttctttgattaagtatccggtgaaaccaattcacatgaactccaattaaactttaatgaacaagtgggtgtattaatatcagctgagtaatgcaggcagcacagattccagtaagtgactcacttctctgagcagctcattccccatgcacggttagagttactagaaagcttccagctatatttgagtggatctggtctgggccttgtaattctaacaatcctcagggctcgctattcatctagtgacaaaaccacagtcatccagacctctgttttcagagcaaagattggggatgaagagttttgttcacattgagcaattaggcccttcgttgagcagtgaccatttggacttttattttcctcatcttcccatttttgtttttttgttattttattttttagagacagggtctcactctgtagcccaggctggagtgcagtggtgtgatcacagctcactgcagcctcagcctcttgggctcaagcaatcctcccgcctcagcctcccgagtaacctggaacaacaggcatgcaccactgtgcccacctacaaaatttctgtagagatggggtcttgctatgtcgcccagcttggtgttgaactcctgagctgaagtgagcctcagcctcccaaagcgcttggattatagatatgagccccgtgcccagcctttattttgtttttaagtgagaattatttttttcttaaacccaggggcagtgtaggtgaaggttaaggcagtgaagatagaacagtcagttttgaaatgcacatagccttcctgagcctcactttcaccacatctgccagtctgcctcaagtctttaagtttccctacaccagaggcagcaaggtgtgcctggaatgatgaattcctttgagcacagaccctgttccatctagagactgatgactgtacctatttcctaggaaaggttaagcaagatcgtgaatataatgctcttcgtttcatgccggcacataataagttcccactaaatgtttaacttggtccactgggggaaggatgagaaggaggatttggagataaatgagacttggcccttgacaattcaggagcttggagtcttatagagatttgacttaaaaatgtctgtgtaactccagagtgataaagacaaaaatgcttgaaaaagataagtgaggattcgggggatggaggaatcccagaggttggccccgtctgagaaggctggaggttagggtaggaagaggtaagggtttgggaaggtagttctaggctgactgaagagtgtgagcaaaagcagaggcagggatgtatccaggtatcagatagtgcacatttagtgtggttacagtaggtgataatttaggaggctgattgaaactgaatttagcctctgccttagtcaccaagtcctttcccagctccacttgctgttctctctctcattctctcctacctatattgaaaccagttgaaaataatggagtcacacagaggcagatggcaataatgtccaggttgtggaacattagctcattgggcttgctaatgcagcacccatgaatgaaatttaccctcttcctctcagatagctcctgcactcaataactcccatttagggcacactgtgcataaagctcccaaccatgaagagcagggaggatctgcctctaacagtcaggtaactcacaaagactggaaggaagtgactgggttacacatggccagtttcttctccaaactcaataattgggtaactctctgcctcctcatctgagaacaagggagtgggagggaggcaaacaagaaaagagaagaagcagtggagaaaggagacgttctgcagtgccaggcttcttgccccacactcttcccaaatgtcaacatagttcctttaggggaaaaaagtgggaggctagaatggtaggacagggccacaatatggaagtgaaaaaccaggggcagtttcctgagcagggaatgatgtcattcgatctataattcagtctggttaatctacttatgcaacaccaattgaaggacacacttagataactcagccttgagtcaacaaatcttgtgtaacactgccaaggtccatagtgcaagaatcagcccccacttcggaaataacaaccacccctcagtgccaaattttggacattgcttgtaaatttcagactccttccctccaagatactgttttagagaatgtcgtagggtaaaaaattccaaggggtaaagacataaattccgtaatactacaatagatgggaggctctaatcaagtagataaattctatttttggaattgtgaataaagcagaaaagattcttggaaatcaggaattgaatagattgatggtacaaatgagagactatatgttgcttaaagaaaacaaaagattgcctatcaggttttaaaatgtgagtcagtagtttatatagtgattcaagctgaacagctatcttggttattaactaaaatcttttctttccccttccattttatatatgaagaaactattaatacaaaagtcattatcaaaggacactggggctaggtttcattacccagcttaatccttaatttcatattgagcatttcatattgaagtgaaacaataaggatatgtttctagagactgatgagacaactgaattggacttggttttgacattcaaagggatcaggtagaggtacttagttgagctcactacttcattttggcaaaagacatatgtcatagaaatgtagtagccatgatggattatgtatctttgaattgggagcctatgacaaattttctccaatgggaagtttcttcagagcctatcattgtttcaacaataattaaagtaatttacagagaatgtgctcatctacttttacctactgttatcttttttccaagttaataaactgaatatattgtatagattggttgatagccttcctgaaatgaacatcctttgcaaacctatctctccaaacccaaatcctgcccaaatttcccaattgtggtagcaagcccaatgagctcctgatacgatcctaataggatcctcttctctggaaatcctcgacagatcacacttctcttttcttgggaacagctttctgtttccttgtccagaatggatgccgttctgttatcctggtcactctctgggccccctccctttgtccaccatgagcacaggctactggccactgatcctcctgggggcactagcctggctaccccattgcttattttacctttgcttctcttaaataccattgttggtgattgctccacacagcaattgttctcacctaagtctgtggataagactcacttagggaggttttaccagaattcagctcatctccctaaatgtttgggtctggactagggcacacacttctcgtgaggcgcttctcatgagtaccccttctcaaactttacgggtatcaatttacttatggcctgcagtgcataaagtgaaagctttctgaaaagacatttaatccatcggtatgaggatgaaaaagacacactcagggcatgaaaagagtgagaaggtcacaaaaagggtgtggtctcagctggagaggaagctgaacaatcctataaaggaacaaaagctcagnnnnnnnnnnnnnnnnnnnnnnnnnnnnnnnnnnnnnnnnnnnnnnnnnnnnnnnnnnnnnnnnnnnnnnnnnnnnnnnnnnnnnnnnnnnnnnnnnnnnnnnnnnnnnnnnnnnnnnnnnnnnnnnnnnnnnnnnnnnnnnatcttattctataggcttcagcctttttatgaagacctagcttctactcttgccccaggccctaagcaggcccagacttttcccatatacacacactctctctctaacttatgtgtcttacatcttaataaggcagcagattgtatcagaatcagttaactctttatcaaaaaacccagagcagacagacgggtgaacttgctcatgggctgagctagaagggaggccacttttccttcacacagcctcggactctccctgggcttttttgtgtgtgctgcgtggagactgtgttctaacatttcagtcatatcttccttattttaaaactacagaattgatcttaccaacttactggggagcacgtcgtcagtaaattctaatggaaaaacctgtctgatcaatgggacaggaaagcgtcacagcaataccggtgagtcattccaagaccaggcacatttgagctgtgttgcttcttcgatgctgactataattctccctcagcattacgtcgtcttaagcagcttttgaatcttcgtctctgattccctttctaggtcagactgtgtctttttttaaaattgtgcctggatatccccttaataggttggacaagtcccattaggataattggctgtatgaatatgcgaaaatagcaacagtgaattttaaagttcttgaatagtctccccgtcccactgtgaggtgaggcatctggggtgggctatctgttttttgattcttggttcttgtttttaaaaaaataggatgttggaccttgggatgagagggaagtaaaacagttttggaacccttttagaaagcaaactaagacaaaactcctttcttgagaaaaatggatggacattgtaaagaagacagtagggcaccaggaagccttgagccaggtctgcctgtgtcacatttcgagttatgagcttcaccgctctgctgtctgtctctggagatcatcatcaaacccctttctctgagttgttgaatggctcagatgagttaatgcctatgaaagtactctgtaaacagaaaaataccttcctatttgtaatctcaacaaagggacttttatcatccctaaaacagaacagacatttctttttcaattatgaaagttacatagactctttttaaaaagttaaatgcacaaaagtatgatgaaaattaaaataaccctaatgagtccatcatccagggacatcattgttctaatttaaacatttgggtaatctgttctctttttttaagaagggttgtgtgtgtttattttttttctttttttgtgtgtgtttgtgtatatctatgtgtatttttattctgttttctttacataacactgtattgtaaacattcccaaaatgtaaattttaatcattgcataatattgcattatctgatatatgcacatgcattttgagattttgtgacgaacgattgtgactattgtttccataattaagggttagctgcttaccaagaaaggaacttactttaaaacatggcaggcacacttggccattttttttttttttttttttttggcagtaaaggaatttgaagtatccagttttttaaataaattaatatgtattgaattggagtttagcagtacttttagttaagatctcagttaaggtaaaaaggtcagacctgtagagttattaatttgtagaaaattctgactacagcaaaacatattagcccaagttctctttattaataaaacattagttacagaaatactaaaaaatagattggttggtctcctgaatgtcctgcgttaggtaagttgccttatgccatctggaagacttttttattttctcttcatagaaggatacaatagatttgttttgctcaaagagttcattttctgttgctgggcacatatataatactgtaaacacatttctggatatgacgacataatgatgaagagagacctttgaatattttcttaaatgaagattgaaggagtagtaagctgtgagaggagatttttctactatttcagtcctaagattgatcttttttgtcatggatttatccctttgtctctatgcatttctatgtgtctgctcagcatcttatcttctacatttgccctagttccatccttccttttttccatgcttgtttttccatacacctgcccatccaccctcctgcctctctatccagtcgtccgtctaaccatttctggcaattcttacctccctgtttcatgtatatctctccatttttacctgtcatttatatttatctatttgcctatccatatctacacctgcttgtctgctcactgtctatctataaagttaatggagatgattttgatgaaaacttatgaatttctttattgcattttacactgtgggttacaggggccaaaggccatggggaccagaaagtggaaataaccagagctcggccatttttgtttcatttcaaaatcaggagggaaggtcagaactaacctgattatcctttctgtgatgctaatcaggatgttcttagtataatgccttttggagactgttattttaaggaatgttttgctaagaatcagttgccaggacatagaatgaagagctattgtatagcttcagagtagttctcttttaagaaggatataataaattaaaaataattttcttgaggtcagactaaggaaaagtcaaagatatacaattgccatctctccaaatttattgattttatttatttattatttattattattattatttgagacagagtctcactttgttacccaggctggagtgcagtggcacgatcataattcactgcagcctcaatgtcctggagtcactgaagcctctcaagtaccttggactacagttgtgtgccacaatgcccagctaattttttttgtactttttttaaagacagtattttgccatgttgcccaggctggtgttgaactcccgggctcaaactatctgcttgccttggcctcccaaagtgctgggattataagtgttagccactgtacccagcccaatttactgacttaaaaaaaaagaaaaaaaaaacaacaacccagaacatattgtaacattcttcagggagtttagagacaacataatgaaggtattttcaaggtttggggagnnnnnnnnnnnnnnnnnnnnnnnnnnnnnnnnnnnnnnnnnnnnnnnnnnnnnnnnnnnnnnnnnnnnnnnnnnnnnnnnnnnnnnnnnnnnnnnnnnnnnnnnnnnnnnnnnnnnnnnnnnnnnnnnnnnnnnnnnnnnnnnnnnnnnnnnnnnnnnnnnnnnnnnnnnnnnnnnnnnnnnnnnnnnnnnnnnnnnnnnnnnncatcctttactgaaaaccatttttcttctgattctgagaaagctgctttgcatttactctctcgtttaattctcccatccttccttcaatgtaatttctattatcccaatttataactaagaaacagagactcaaagaggctaaatgatttgcctaagtttacatgattaatgagtgccacagtttttgtggaacagagacttgtttgaatctaaaactgttactctttgcagtaaaccacaatgaaaccttagctatatatcagttctccactttaaattttatggtaactcaacctctgaaaaggatcctgcaaatagcacagttttcagttcttttcttgagagaaggcagggctttcatatggacatgataaagaagacagctcttaggatgtggatataagattgcatttatgaactttactttagtatttgacagaatggggttttcctcacatgctgctgtgtgtttttgtttaacctaatctgagtctcattaggcagcttgatccagaagacagaaaggtctcctccacaagatgcaccttatgaagcaaacaaaccaatgaaatgcagtaactcccttcaaacttttgtaagctctggaaagccagaaaagacagctattgtaatatattttgccaggccagctgttatcatcacaaacaagcctgaaatagcaatgacttttgaaatcacagcacatttatttacttcttaacttttccataggtttgaaagcttgctccctccctttttatcatgctaaactgtagttgctaacaacattctattctgggtgggaattagctttggcataattaagaatggagatgggggtggataaaagaggttctgccaaaggacttgtcttatatgattttattcttacttttaatctgttttattctttaagcatgtattaactgcctactacgtactcaacactgtgctatgtgggaaaaatatactagaacaagggatggtcaactttttctgtaaagggacagatggtacacagcttagatttgtggtccataaggtgtctgttgtagctactcactctgctcttagataatacacgaaacactcaagactccaccataaacaatacataaataattgcgtgtgaatatgttccaataaacttttattcacaaaaacatgcagtaggctggatttggtctgcgtgccacaggttgccagcacctgtactaaaatgtccctgaaaatagagaactttgttttgttcattggctgtgtcaccagtgcctagagtagtacctggcatgggataggtgaccagtaaatatttgttgaatgaatgaacttataaatgaatgaatgactcagactccttctctgatctcttctatacttaaagagagtacaaagaactgtgggaggtaaaaggtactttcctggaagagagagtgtggagggtcatggaatcagttggtatttgagctggaccctgaagaataggtaagtatatgtcaccagcggtggtaggagaagcacactgcaggtaggagaaacatgcaaataggataagaagcagggcacttatggtgaataatgaggagatcagatgttttataacaggagtttcctgacttgcttgatcttcaaaatcacctgttattaaaaataggttcccagtaccctccctggagattctgattttgtaagacagggttggccaatgataatttacaaaataaatatttgaaaaggtgtatggctttggaaagttatactggaaccatttctaatgggaaataaagttctcacttttcttagtaaaaggactagtatcaactagtaattgctggacctataattaccctataccttctgtgccatagaatggaggaagtgccctggcggaaatctaccctacttaactgcctgtcttcatacgtcccctgttgatgttgtaggagtaccccagcctttatgatggaacagtgtgtaatttagtcagtaaattgtagtcatataaattataataaatgtatcaaatttgtagctactagctttgttgcttttgaatttctgggttggcaaacctctcagagggcaaatagatttaaatggcgtaatagaaaatttgcattctcttgctgtacctccaattcagagtgtagtgtaatgcccagatttgtttgtagactaagatcactggaagggctgtatagtttaagcctcttttttaataatggggggaaatctgaagcctaaaaggtgggcagggacttgctcaagttctgtcaccaaattattttggcagaaccaggagtataatgcgaatgttaagttactaaatttagttttcttttcatggtgccatgccacatgtatcaataaagttcctaatttacatactttctctcccctttaaatctcatagctttttgctcatatacctcttgtgtactgcttaccataaagttatatcttaatatcttatcctgaacgagtagcccactgttatcccaaataaaggctgagctctgtttccctggagagcttaacatatttcctggcacttagcatgtgttcagcaaataattgtagacttgaaatatcttgagcatcttttcttttcccatgtgttttgactcaagttcctttgcagttatattgtcagaaaagtcaagctcttccagaattgctgaaatacaaagataatttctcttaagcttccttaaaaaagttgaattccctattatggctgagacctttcttaacagctcttctgatagttaaatgtcagttgcttcaaaaaagaaatgtcattaaattatcagggaaataaattacatatttatttgggctgaaatattttaattgaccacttaaaataaagataatagcaaaagactgatacatttcctagcttgcacatttctctcaattgccaggacttttttgtttatatctcttaggagatttcatttttatttcttctgcattatggttatatatgtgcttttgactctcccagtgggtgataagttctttgaagtcaatgtacttaaaaaaattaatctctatatacccacaaagcctagctctgtaggagctaaatactaaatatatttactttaaaaaaattgttaggaaaaggtcagtgttaccttgatttcagtgttattttgcagccctcaagtcaacaaccattttactgaacatccagctttgtgcctttctgtgagcttaacattggtagcaggtgtggattgggacataaaaaagtaaataaaacatagttaagttgacataacccataagtataatgtgatgtggaaatctgagataggtacaaataacctgtactagaatctggaggcaggttaattctgacaaggtgagtccagagaggctcacaaagtgtcaatatttgagatgagttttactgggtcttggtcttctatttcagttgctggttttgatttttctcaacgcaacacacacacaaacacacagatacacacacacacgcaaagtgatttgttttctttttataatctctttgactatagacttaagagaactgcctttatgtaagattaaaggaaaagaggagcaggttttattgtgttatttgaaggtttttcagagtctgaaacacacagcgaccgaaagtatttgggatggatgatgccagtagtgtcatgaaacaaagtacgttggccagagagagacatatactattgtaaattaacggtgttcttttccaaggattttctcgtttacctgttgttgtcttcaatagtttaattacactaaatattctcgttggtgcggggagcatagtatggtggaggaagtttcaactttgaagtcagacagttctgtttctgtacctaacttttcacttattgtatatgtgactgaaggctgttgcttatcctctctagggttgtttcttcatccttgaaaaatgttgtgttttctttttcttttcttttattttttttgagacgtagtctcactctttcacctaggttggagtgcagtggcgtgatctcggtttactgcaacctgtgcctcctgagttcaagcgattctcctgcctcagcctcccaagtagctgggattgcaggcgtgcaccaccatgtccagctaatttttttttttttttgtatttttagtagagacggggtttcaccatgttggtcaggctgggcttgaactcctgacctcaaatgatccacccaccatgccctcccaaagtgttgggattacaggtgtgagccaccgtgcctggcctgaaaattgtgatcatggaaagtacctcacagaattgtgggatgaatggagctaatgtttgcaaagctcctatttcagtgtccaggatatgttaggccatatgcctacagagtcaggcacattttcttgaaacacaaagccctttatctagcttaacctcttcccactttagagtcgtgggtgcaggaaatattttgttttcctctttaccgtaaggaaagtaacagtgctagtgtgttgttgaaatgccatgctctgggcatgtgtttggggagagagatgcagtgcgtggtggggaatgggaggtgctcaagagggcatcctctctgaaaggggtgacagccgcttggcgctagctaattattgccacgtggagatgcatcattgccagatttttatgtaaactctttggtttttaaaatgttggcagctcattcaagtatttttaaagcactatgagagatacttcctcatggaagaagaaaaatgcaacttacaatcttactcagtagcatcaactttggctcaaaacaacaacaaagcacgttgtaagtccacactgcaaatggcaaacagaacccgtctaaggaccagatttggcctgcagccctcaatttgcatcttctgtgcatatttttaactggtagagataacagtaaatgatggcaaaacttactgagtcctttgcatgtgctagaaactttgctatactttgcatatatcattcaattctcacaataacccaaagaggtgtctattactattattatcccattttacagacgtgagcattgaggctcaaggaaatgaagtatctttcctgaggtcacacagatgaaatgtgacaggtagctttgaaaccaaagcctgttctcttttaaaatcatacataccagtggatctcagtcctggtggtatgttagaatgattggcgtgcccttaaaaacagtgttgtccaaagtccacccccaagctcattaaatcagaatatctgtgggtgggactcagacgtggctgttttttcgaaagcctcaaatcaatgattagaaatagctgtaagatagataaaatttgtgcctccacatctggcactacctatctcctgtactctattttatttttgagtatttattgttctctgaaaattatgtgcatctttacctgtttatgaattttctacttttaccacactgggatgtaagctccgtgagcgccaggatttagtctttttaagttgtttgttgtatccccacctaggtcagtgcctggcacataatagatgctcagtaagtatttacttgaatgaataactggttcttcatcacagggagcttacactctagtgagggagatagataatacattcttagtcctatgagataagctcataactgggatgttcaatatgactttattaacacagggaatacagctgattatctcttagacattgttaggataaattgtttctatacgtattgaatggactgtggggcatttttggtcacctgcactactacactggatccattctgtgctctgggctgtaagtgtgtgtgtgtgtctgtgcgtgtgtgtaatttcgggaacgggtaacacattcgtattacctctgtttggacacgatttttagtgacagagctaggaataacaggtggaaccttctaagttttgttgcttaaatatcaggccccctcagaattcaggactgatggtagaggatttaccagtttacagggaattcagatattctcttctctttctaggaaagccaaattgttggtcattctgcccccaacatttacagaagcagtttctcggttttatttatccaagattcttatgatgaatagtgttaatatcgcagcacactatgggctgtgatatgcctatatcacagagaaggcaagctgtggtgaagtggaataaatgaaaaactgtctataactctgcttctagatgccccacttaagcaagtaaatgggaatgtgagtgacaatatcatagggataaccttgaaagagtgctagtttttaaacaaaaacaaatcatttggaacgttaggatttaaacagttactgataataaattgcttgtgacacatctgaaaattgatggatcatagtgatagtgaaaatatttaacaactgctatggcccaggcaccgaacaatcgaaaccaactccagtgtaaacagtggtgccatcaagtatgcgctggttgtcagccttgctggtggagtcattgtgtcacgatgaagcaactaagagccagtgctgcacaaagtgttgagagaaacaaacaaaatccagggtgctccccttatgcggagtagagagtagatagagccttgtttcagaacgataaaacttcggtcaaggacttgatcttcccacttattgctgggggctccagggcaaatcatttgttctttctgagcctgagttgttgtttcttcttgttcttcttgttcttgttcttgttctcgttctcgttctccttctcctactccttctccttcttcttcgtcttcttcttcttactctcctcctcctcctccttctcccttctcccttctcctttctccttctcctcctaccctctcccttctgcccttctcctttctccttctcctcctccctnnnnnnnnnnnnnnnnnnnntcctttttccttttcctcctccctctcctttttccttttcctttctccttctcctcctccctcctctccttctccttcttctttttcttcttcttcttttttttttttttttttgatatggagtctcactctgttgcccaggctggagtgtagtggtgcaatccctgctcctgcatcctctgcctcccaggttcaagcgattctcctgccttagcctcctcagtatctgggattatagacgtgcatgaccatgctcagctaatttttgtatttttagcagagatggggtttcaccatattggccaggctggtcttgaactcctgacctcaggtgatccacctgccttgccctcccaaagtgctgggattacagtcatgagccaccgcacctgtccagagcctgcgtttcttctaatatacagtggaggagagtaatttttgcattacctactttgcaggctctggagttagattgagcgcacctgaagctaaggttaaagatgatggctatgggcatgatgacagtaattgttcttctctggttggggactgattgatgatccctgatttctctgtttaaacgttgcccaaaacaaaggttgagaggtccttaggggagaggcgagataagcagaggtaggacttgcctttcttctgtgcttctccagaattagttgtgtcctgtggcatccacagacaaaaattgagcaatctccttcatagttgagttgagattgtataattcgataaaataggtttaaatagccttatgcctgtataatattcatgaaaagtgtcatgagtgaggtggcttgcttgttttgaaaatgggctgattttgacaaaggggaaaaatcgggattcatttactgtaagttgaaagtaagaaacaacaaagttgaatattagaagaacttggctatcgcaaaaaccacatactttcacatcagtaaaacatggagttctgatctgagtgaaatgtgaaacttcttgcagaccacagagagtaaaaaggagtacttttgtttcattattaataccattgtccttatttctttaaatgagaattgataatacccataacagaatctttcacacaggccaaaaacaggaaaggataaattaaacaaaacaaacaaacacccaaaacctcaccaccaccaccatgactgccaacaaaacccagtgctgtgaggatgcatcagctttaagatctctttaagtcattgtgttctagagaaaggggttctttatttgtttctatcaggatagagtgagtttttgttaaagttgtctttcttttttttttttttttcttcttctggaagactgacgaagttggccttttgggatattacaagaaagataactttgtcttctaatgtctgcagtgatatgaggcaggtgactgtgtgtattctgtggtgatccatgttcacaaggagagacaggccaaggatgcccggttgatgagtgcgctataggtgcttgggagtgagaaggcaagaaagcaaagtgaacttaaaaaatagctagccagtggaattgagggagaaatgctcattctttgctgacacatgaaataattgttgagggagagttgctcaatctttgcctacacattgaaataattgtgttgaagagtctatgaaaagggggtcaatagatttgagttttcatcactttggccaccacctaattatagatggcctccactgtgaaatatgtgagttgaaatagatttttttaaaattcattttctggactggcatttagaatttgagtttattcaatccttgcttcttgggcagttagggtgtcaatggcaataggaagggtagctgaggccagagtggtgggggtagatgttgggtggaatgtgtgtggttgagcagagcattattattattgctattattattttttaaaagaatccttatagtaaagagagccaacattgattgaatatatgttccttgccagaacttgggctaagtgctttattataagttatcttatttaattttcacagagacctgttgaagtgtaagttttagctttctgtttcacagctgtggaaactgaggtgctgaaaggatgaagaacttccaaaaagtcgaagatattaagcagctgtattagtcttcagatcctgatatctttctcatagttattctgatatgccgtattaagttgcagaattgaggccgggtgcagtggccccaatttttattttttagttattcttattttctaattattttatatgctctctctctctctctctctgtctactgtcaaatcccggcactatgggagtctgcagtgggaggatctcttgatgccaggagtttgagaccagactgggcaacatagtgagaccccatttctacaaaaaaatgaaataaaacaattagttggtcatgatggtgtacacctgtagtcctagctactcaggaggctgaggcaggaacattgcttgagagttcaaggctgcagtgagctatgattgtgctgctatactccagcttggataatggagcgagaccctatctctaaactaaactaaactaaactaaactaaactaaactaaactaaactaaactaaactaaaagtaagataaaataaacttacggagttggaacattgcaggctatctatctggcttccctgccctgaattcatcgttctctttgatgtgctattgtccaacatttctttttttttctgtttttttctgttttctgtcttgctgtcacccaggcttgagtgcagtggcctgatgttggctcactgcaacctccatgtcccgaattcaagcgattctcctgcctcagccttctgagtagctgggattacaggcacccgctgctatgcccggctaatttttgtatttttagtagagacagagtttcaccatattggccaggctggtctcgaactcctgagctcagatgattctcctgcctcgacttcccaaagtgctgggattacaggtgtgagccaccgcaccaggcctttccaacatttctttaaagaaactaaaaattaatttgaataagtaacacaaaaatatagtttaaactatagtataaaattcaaaactatgcaatgacaagtacatctttattttatctctttacttctcccacccagaggaaagtataagttctttatatatccttttagaaataaactgggtataaataagcatgtgtatacacacacacacagaaacacacacacaaacacacacagatatgtatttatattccagtgtatataaatacatttatatacatgccatttatatacacatttgcatttctgttattagcgactctaaacaccatttgaaatgagccgtacccatttgtaattccgttttctgaactgtccttcacttccttttccattggattgctgaatttttgcttattgatttattacagttaagaaaattaacttgtagtctgtgacaggaattgtaatgctttaccattttgcatttcttttttaacttgcagattaaaataaaaagttttatatagttaatccttttttgattttatgtttctttgattttgtgtgatgcctagaaatgccttccccactttgtgatatttaaaaagaaatttccaatttttcttctagttatttcttctgctctttctcaaatctttgaaccattgaaattttattttggtaaaaaatgtgaggttaggatttattttgatatttttctggatctgcatttctaaacactgtttattgaggagtccatctctttcacactgatttgaaaagctacctttattgtatattaaatttcttaatacttaagtatttaatacttaagaacaccgtggaatactatgcagccataataaaggatgagttcatgtnnnnnnnnnnnnnnnnnnnnnnnnnnnnnnnnnnnnnnnnnnnnnnnnnnnnnnnnnnnnnnnnnnnnnnnnnnnnnnnnnnnnnnnnnnnnnnnnnnnnnnnnnnnnnnnnnnnnnnnnnnnnnnnnnnnnnnnnnnnnnnnnnnnnnnnnnnnnnnnnnnnnnnnnnnnnnnnnnnnnnnnnnnnnnnnnnnnnnnnnnnnnnnnnnnnnnnnnnnnnnnnnnnnnnnnnnnnnnnnnnnnnnnnnnnnnnnnnnnnnnnnnnnnnnnnnnnnnnnnnnnnnnnnnnnnnnnnnnnnnnnnnnnnnnnnnnnnnnnnnnnnnnnnnnnnnnnnnnnnnnnnnnnnnnnnnnnnnnnnnnnnnnnnnnnnnnnnnnnnnnnnnnnnnnnnnnnnnnnnnnnnnnnnnnnnnnnnnnnnnnnnnnnnnnnnnnnnnnnnnnnnnnnnnnnnnnnnnnnnnnnnnnnnnnnnnnnnnnnnnnnnnnnnnnnnnnnnnnnnnnnnnnnnnnnnnnnnnnnnnnnnnnnnnnnnnnnnnnnnnnnnnnnnnnnnnnnnnnnnnnnnnnnnnnnnnnnnnnnnnnnnnnnnnnnnnnnnnnnnnnnnnnnnnnnnnnnnnnnnnnnnnnnnnnnnnnnnnnnnnnnnnnnnnnnnnnnnnnnnnnnnnnnnnnnnnnnnnnnnnnnnnnnnnnnnnnnnnnnnnnnnnnnnnnnnnnnnnnnnnnnnnnnnnnnnnnnnnnnnnnnnnnnnnnnnnnnnnnnnnnnnnnnnnnnnnnnnnnnnnnnnnnnnnnnnnnnnnnnnnnnnnnnnnnnnnnnnnnnnnnnnnnnnnnnnnnnnnnnnnnnnnnnnnnnnnnnnnnnnnnnnnnnnnnnnnnnnnnnnnnnnnnnnnnnnnnnnnnnnnnnnnnnnnnnnnnnnnnnnnnnnnnnnnnnnnnnnnnnnnnnnnnnnnnnnnnnnnnnnnnnnnnnnnnnnnnnnnnnnnnnnnnnnnnnnnnnnnnnnnnnnnnnnnnnnnnnnnnnnnnnnnnnnnnnnnnnnnnnnnnnnnnnnnnnnnnnnnnnnnnnnnnnnnnnnnnnnnnnnnnnnnnnnnnnnnnnnnnnnnnnnnnnnnnnnnnnnnnnnnnnnnnnnnnnnnnnnnnnnnnnnnnnnnnnnnnnnnnnnnnnnnnnnnnnnnnnnnnnnnnnnnnnnnnnnnnnnnnnnnnnnnnnnnnnnnnnnnnnnnnnnnnnnnnnnnnnnnnnnnnnnnnnnnnnnnnnnnnnnnnnnnnnnnnnnnnnnnnnnnnnnnnnnnnnnnnnnnnnnnnnnnnnnnnnnnnnnnnnnatgggaatgctcataatgttccctgttactagtgacattggctttcgatttgagaaatgtattgtgttgaaaagtatccacacttattttgatagtgttgttattgttgttgttttaattgagactggttgttaaaaggttatctagcttttttttttaaagaaactttgaaagtaatcatatattctaaaaaaattttatgtttttctcttttgtcctgtaaatttgctgtaatatatgaataaaattttcaaatatgaaatcttgttagtattcttgctaaaataattatcaacttgttcattgtttctgtattatatatttttagtgttgctagatcctagagatcattaatatattaatgatctgtgcttcaattttcataagtgagattatttgaaaattctgtgtgtgtgtgtgtgtgatcgagaccatcctgaccaaaatagtgaaatctcgtctctaatgaaaatacaaaaattagctgggcatggtgtcatgcgcctgtaatcccagctactcgggaggctgaggcaggaggatcgcttgaacccgggaggcagagtttgcagtgagtgagattgcgcccctgactccagcctggcgacagagagagactccatctcaaaataaacaaacaaacaaacaaggaagcctttcttttttctttattttgaaatagtttgataacatttacatgggttatttctttaaaatatggtagaattcccttgtgaaaataccttcacttattgccttttttggagtgaagaacggagtgaagaaagttatttctttaaaatatggtagaattcccttgtgaaaataccttcacttattgccttttttggagtgaagaatgtgtttgctctttaaaattttttacattttttttctgtagtaattggactaattagcttttatatctattctgtgattacctttgttaaattatagtttttttagggaagtcacctatttcaaattcatttgcatggtgtaaaataatttctcatgattattttcatttcctctgtatttatggttatatttcacattattatttaaagttttatggatttctgctatgtgtatccatctttctggctaaagcatcagagtttaatttattatttatttaaaaaatagcttttgcatttatgtgttggctctaccactttgtaattctttattttctctttaaaatcttcaataataccttctactttttctaggtttattttgttgtttttctcattgtttgaacttggctcttaatttccatatttttatttctgcttttttattcatataaataagatataaattttcctgtaagagatgcttatttgtatgccttaagttttgctaaatagtgtttttaatcttattttttagttatttgactatgcacaggttcttaaaatcccagacccattagaatgtaagctttgtagggacaggaaccttgtctgtttatttattttgggtctaccgttgtgcctgtcatatatttcttaagcacttgctaatgtgcttaagaaatgcttttgtgtgaataaataaatctccagggaattatggaatttgtggctgattcagtcctgtaactctagttcgtttctgcctcatttggatattctctctaggtatctactaatgtgtaggaataagaacatattagacatgcttcaaattacctttttaggtcatgatattaatagatttattttaaaagtctacatagtttttctcaaatcaagtatacctgggtaaaaatgtctttctaaagattagcctgtctgggcgcggtggcttacgcctataatcccagcactttgggaggccgaggcaggcagatcacctgaggtcaggagtttaagaccagcttggccaacatggtgaaacctgatctctactaaaaaaatacaaaaaaaccagccaggcatggtggcaggcacctgtaatcccagctactccggaggctgaggtaggagaatcatttgaactcaggaggcggaggttgcagtgagccaggatcgtgccattgcactccagcctggacgaaaagagtgaaactctgtctcaaaaaaacaaaacaaaacaaaaaaaagattagcccaatctatttctagctacttgggagattgaggcaggaggatcacttgagcctagaagtttgaggttacagtgtgctatgatcatgctacttcactccagcctgggtgactgaccaagaccctactggaagaaaaaaaaaataagaattgctcaagaaaaaatacagttgagtagaattagaatgctagcagtgttgcaatagcagagatcacatgatgcccatgatgtttgtgaccttggacactttaggctaaattttgcacagaagcccaagtccaggatagaaatgataacgatgaacctgctgtagtgcagggaaagatgcagagctgggggggagcccaaacccctactgatggccactttttcttctgacctcttcctatgtctcatttaaaaaccagtagctttacttcgaaaactcaattttcagatgagaatcaaaacaaaaatgcaaagaaggcaaatgattcataaaagttgctgagtgaattagaactataatgtgggacaaacactccgcctttctgtctctgcagctagtggtatttccaggttcccagggaacctcctgtcccttgctccactgtgcatttttagatggacctgatatttggttacctcccttgacaggcccaacaatccttgctaaggcacagacttgtgtatttgctgatccctgaggggaaagctgtgattcaggctctgaagtctaagaattgcagacttagtttcttgtctcccgatgaaactgctaatctgggtgccaatggtgtttctgctacatggacacctgcccacacagcatgattagaaattataatgatgacgacgatgagtcttccaggacacccacgttctttgcaagatatttctgctaatcgtttctaccagaatcagttggaaaacttttttttttaagttttttttttttctctgtatctaagtcaaccaaaaatgctggtctaattcaggtatagattaaaggtttgtcctcaccattaatggtgtgttattattcatgcagggcatcctagaaccttgggcacatagtgtaatggaaagcacgctgggccagggagatgtggattcaggcttgagcagtgccaaaaattttcgttatggccttggtaaaggtgatttcccatctctgtgactttgtgtctccttctgttaaatgggcattcaaatcttttgtacctaacttattagggccctgataatcaaattagccaataagtaagaaaatgttttcttaaccacactgtaaattaagaggattcatattgaaatcacttttccattattgctgtcttagcctgctaaagttatatttagtgtagtgcaactaagcagggttgtgagagctgggaaggtagactgttgtattgggcagggtcagggcagataaaggaccaaaataatgcctgaaatgctgtattaacctgctctaccttgaactgctgtcttgaattggggggaaaaaatgaagctctgaggggatggtgcacagggagaaaagagagaatctcaggaattgaaagtctcaatggagaagaggtgggagaagaataggaggctagagtgagggcatgtgatcgtggagtaccgatctggagacaagagaagaaagtagaaaaatgccagcactgtctttggaccctgtgtatctggagtgtgggaggacaggcagacacaaatagagaggctctagggaaaacagcattctcatagaagatccttctccacaaaaagccctccaaatgtcctccaggagggtagaagctggttttaaagctcctcagggtcaggaagatccttctcttatttttctttgcatcgtgcagtttaatttagcacagtactttgctcacagcacttaaaaaattattctgggccttgctttttaattttaggcccaaatacctgaaaaaatgttcaggaggaattctgataagaaagagctaacttaggcaattccatttctttttttggttcactgtttcctcatctgaaaagtgttgggctccatgacgtggtttctatgacactcagtacctttgttgaagagaaaacatttttctaaaactaggatttccaaaaaaacaacaacaaaaaaaagaaaaacaaaactcatgaatatgtggatatttttgtgatagtgatgaaggtttgggaatggagtagaatgtttcctaaagtccttttcttttagcagaagacttgagtttgtaaactcggctcatataatttcagcttgcctgtctaccttccttccatctacctacctacctacttacataagtacctacttatatatggagaacacggtggaatttaatttttcttattcttttcgactttggttggcttggtgaatcaagtaaactgtgttgaagaaaaactaacttttgagggaaaaaattgaaaaaaaattatgattcttttttttttttttttgagacggagtctcgctctgtcgcccaggctggagtgcagtggcgcgatctcggctcactgcaagctccgcctcccgggttcacgccattctcctgcctcagcctcccaagtagctgggactacaggcgcccgccactacgcccggctaattttttgtatttttagtagagacggggtttcaccgttttagccgggatggtctcgatctcctgacctcgtgatccgcccgcctcggcctcccgaagtgctgggattacaggcgtgagccaccgcgcccggccaaaaattatgattctttgaaaaggatttttctcaggttagtttatatagtttcacagatgcttgagataaggattagaaagttcagacactgaatctccacagacccctgtgaatgtgttggctaagcaccttgtcttctcaggaacacacactggaacagactttctttcagtaaaacagggccagaatagtctttgaaacatccaacggtggtttgggaagaggattctctatataatgcctgtccaaatacagaataaaaattttcaacaattagcaaaaatgtggatttttcagttaccaattccttatttggcacagttggtctttctcatcttattcattcattcatttatttcattttatttatttacttttaaaatacttgtttaattcacctttcttgctcccattgagccttttaactaatcaaatgcatttgaaatgctattaatttatgataacagtaagacccaagacatcactttatgtaatatcttgtattgtagttcattgttgtcagctctttttctgatggggttttgatttagctggaggcagtttaagggtgttcattccccaataatgtttgtctgttgaagctggtgagctagactaacagtacaaagagttcctgtgtacccttcacccagctttccctgatgttaacatcttatataaccaaagtatgtttaagcaaagaaattatcattggtgtaacatgactaaagaagtgattatatcttttattggcagttttccagtttttccactaatgcctttcgtttttttcctagatctagtttaggatgctgctgtgcatttagtcatcctgtcttctttgtctcctcctgactgtggctatttctcagcctttccctgtttttaggaccttgacacttttttagtgtaacggtcaggtattttgaagaatgagtgtcttgcaacttgagtctgactgatgctttctcatgattaaattggggttttagatttctgggaagaccaccacagaggtgaagtacgcttctcattgcttcatatcacagcgtacatgatgttaatgtgagttattactggtgatgttaattgtgatagtggccagttttgttttattttattttttaatagaagaccagttgtctgggactatacacactccaacacatttgcaaattggtggcaatgattattgactagtcctcaaactactaacttcatgataatggaaagccgaaactcccaaatcacatggacctcaaagttcaattagaaaatttggttaggacctgacgacaatgttgcgatttgctacagcctgccctgcagtctcaactctggggtcccctcagtggtgagctcagtcacagtgctgcttctgtgtatacttacccagtaaacaacccaggcattggggcctgtctcagaaaccacatctccaatagaaaggagaacacttgggaaagcaggaaggagtaagaaacggaactcgcccattcctgacaactaatccttttcctttctaagtatggcttagtggatgtcagccattcactgttcaggacaggatagggatgaggagagaattctttttcatttgacaaggacattgaattttccttatccatggatcaagactagaaggtatggagaggaaaagggcttctcatctctttctttcagtagcttcatgcactgatgcatcgtacttactgaatgttttaccttctctgtgctcttctcagaggatgcacagaggattgggaagaggaagtattggtgacttgatctagaaaaaagagattgtttcaagccacaaaaagtttgagggtaaaatctcaagtcctgtgtgtgatgaatcagtagaaaaggtatcccagtggccagtgtgagtaagctgtcatattttcggtagtaatccttggtcctgtttgattttcctcatcctcacatataagatggagccatttctccctctggcgtttgccatcacagcgtcctgcagtctcttggtcttgagatagaaggttgagagaaacactttgcagtattgggagaactgggtctgcctgtgggagtacttgtatctcaatcaatattacagaacttggctccttgtttccaacaaatgttttgctctgttctcatcctgggagttgaaggttgaggcgaggtgggagatgtgctgtataatatggcagccactaaccacatgtggctgttgagcacttgaaaggtggctagtgccacatgttgaaaaataatattttggatatatttgtaaaataatttttttcaatgagccttttgaaatgtggctactagaaaattttaaatggtgtatgtggctcctatgataattctattggatggtgctggcttagagcctgggaagaacatggatcagagtcaattgaccttgtgttctcccctgagttctaataatattgtcattaaaaggagaagcttcaacagccataattttcattttaaaaagtctaattcagaagaattggctcattttatattattgcttggactggagaaaaatctgacatttggtattttcataattgagaacataacttgctgacttaaaaaaaaaatcacaacattttgtgcttggccttaggtaccagcctttgagctctttgaaaatagggattgggtctttttctctttctaccatcctttttcccccaaaaccacacactaacacgtagaagatggttaactggcatttgttgaaaaccaaaataactttaaatagagaaaactttgtgaagctaccttgtatttatggttggaagagtgaaatacctttataaggcatcccattttcttaagatagccagcaaaaatgaagaacattgatccaagtgtttatttacttattgatttaattaccattctcatcaggtgtccctgtcatctcagcttatgataaggaatcttttcaagatgcttcacctcatcactctctaggtaaagggggacagaaaaggatgctgcttacatatacgaatccccatctttgctcagatattatgtctaagggcctaaggactggataatcttattttttctgtggcttgatcctttccaacatttaatctatggaggttgtgaggataacaatgaaaaggcaagtttaagcttggactgtagatacttttcactgggtggttttattttattatgcttcattgtgaaccagagcctctgtgaacatatgacttataggccctcaggcttccactgtgtccctttccctgattcgtccttcttcactgcatgccctggtgttgggtgagggagcaggctttatgtgatgtcattttctcagagccctgagctgggaaattcaagagtctccatgattcctagttagccatggaagagaccctaactggtccctcaggaacatgtttggttggtcagaggtaactcttatagaatctatgatggcttagtcgttcactcttcctagaaaagacctctttaaaaaggccttttggttatatacggcctgagttttaagtaatatttgcaatgttgattctctggtagaagagaatgaaaagttgtgagtgctcttggaagagtgccggacagctgtagtgatgggaaaagtattggccttggagtcagacctgtgtttacttcctggctctgctattttctagttgtatgactctatgcaagtaacttctcatctctgagcattaatttcttcacctgttcgacatagacaatgtctgcctcacaaagttgtgatatgttaatgtatgtgggatacctatctcaggacccaatacttagtctttataaaacactaaatgaattggttttctcatgtatgtcttatggttttgctggtgatggaccaataatcatcttccatcttcactttagaggtgggggaaaagggcattagagtgattgtgtggtaaaatccactctaattctagctgtgagaaaaagagcagtgaaaatgtggtaagcaagtgcttctaaaaagcttggactaaaagcgcttgatggatttgtgctggcttcccggtagactcatctctgtactgcccgcacagcacaattaattgttgttactagagaaggaacaaataaagaaaagagagagagcagacataaaaacatcctttcatctttctgaagacagtcccctttgtcagatcagtggagctgtacctgtgaatcaccttgggaaagcacagtgtgggtaactagaaggaaggtcttgtggctcattttgtacccacttcctgggctggggaaatatctaaactaacctttcttacttgtcaatatctactaccgttcaccatgcatcttcacagatgagggcctctttctcacatcttcactccaaacacattactgtgtagacagccacttattttctgggaagaaaactttgcaaagcagtagcagaataaagtcgagggtaaacagaggccatggaaaagcactagagtttgagtgcagagacatgagtctgagcatgagcagtgaatagctcatgaaacactcaagttgcattctccttatgtggaaataaaataagtcatggttgttctatgcacgtggcacctgaccttgggtccttattgctatgctgctagagtctatgaatcaagatttgccagttgtgatcttgaaatttagtcagattaaaagggaactctgactttgagggtgaatgccccaagtgggcatcttattctcctatggattcagcttgttaggcagaatggaagtggaggtcatagattttagggttttctcctgggattgaatccagctgaagcaggaatgattctgggtgagctatataacgtctctgagcattagtttgtcattttcttacataggaatagagttattgccagatttggagatagtacatgttgcaatgtggttgacacagaataagctttcaataaatgattggtattgttgttgttgtcgttattatctataactacaataatttccctagccttattttatagggataggttgtggcaacatgaaatgtgacttggaaaactgatttgcactagatagatagaaaccatgtttttctatctatataatgaacaatgtcatttaagaaagcttagaggcaattccaccagcaccatcttcttttttatttccactcctagattatttgccctcaagtctttggtaatttctttttgccacatctcttgaatgtttcttctttactatattccatctattattaccataagtccaacgttcatcacctcctgctccactgttgttcctgtctcctggctctcctagagccttggttctcaaagtgtcattcacagagcagcagcagcacccgaaatgcgtcatctcaagatctaccaagacctcctgaagcatgaggcatgttcacccccgtgttgtaggacctccatataactcatttaactacttctcctgctcagagtacatgcttggccagtgcgtgtttgttctgcctccagaatgttttctgactctgattgctatcattacttcttttgaatctacctaaattcaagttaccatccattgccatgactatggcaatagtctctgaaattgtcttctacttttatggtttccccttgtggcctttttccacaccatctggagagatctaaaattgttggtcagatcatatcacacccctccccttaagccatacggtggctgctgtagtatctgcagaaggtccctgacttatgatggtttgacttacaatttgtccacttcacactgagtttatctgggtgtaaccaaccccatagaaatcaaggagcatctgtagaaatgtttgaaagaccctttcatggcctgcaaagccctgtgagatgactctatgttctctcctttttttttctttctttattttttttgagatggagtctcgctcttgtctcccaggctggagtgcgatggtgcgatctcggctcactgcagcctccaccttctgggttcaagcaattctcctgcctcagcctcccgagtagctgggattacaggcaccagccatcacgctcggctaatttttgtatttttagtagagatgggttttcaccatgttggccaggctggtctcgaactcctgacctcaggtgatccacccgcctcggcctcccaaagtgctggaattacaggtgtgagccactgcgcctggcctctctgcttttttcataccactcatcactttacacagtaatctgtagacacactgaccttcctttagccctctgtataagccaagctttttcccacttgatctttctctgattctgtgcaaaactggcttggaagtatctttcaaggcttagctcaaatgttatagccttacctagctcttccccattctttagctaaagtagcacacatacccccctccccatcattcttctgtcattatcttgctttatagtctacaaagcatgtatggttctctaaaagagtgattaccatgcttttgttttctttatgtacattgcaaactgttttggtgagaaatattttagtaataataataatggtgaagatttagtgagtgtttgctataggctaggcacactgtatggtaaattaaataatttaatagatcatttatttggattatttcattctatttagctgattatatatttatattttttgtgttcctcttgttttaggatatcagcttcttgagagcagggtccatgtttgttgcatctgtatctccgcctgtagaagattctctggcatagggatttttgtgcaggaagtgtttattcaggaactgaatggatctcagaagattatcatttgggaatagatctacatgacaagaaagaacaaagagtctctctcattctttttcccagatatatcccgggagaaaataccctcgactttttcttatctttaatctgagaaggaagcagttgttggaatctgatttaggattggctctagtggccctgtgtgcagacacagatcttgggattcatctgaccatttggggagagaggttcttgaggggcaccttgatgataacgagtctttctaaagctttaagtttggcgtttgaggtggttggaaataccaggtcttccgacttttacgttctttgtgcgcacgctggtgatgtgcgtatgtgaacctttattattatggactcagccagcagtaaccatggtgagtagacctatcacacagcatttttctgagtcagtttaaaatgctgacaattaaatataccgtactcttttaagcaatccatcagtctctcttgttgtcatggtgaccggagtatatttagaaatgtgacaagtacactgagttcaattgcacttttgccaaaacatagttttgcagctaaaattgaatttcctgattgaagatccaagtgctgttaagggggcatgatcgtttctatacattattctggaagtataacttaacgttattctgttaaatccacagttacgagtcttatcaggtattgatagttaaagtggttgtacttaaagttgatgaaataaagtgaaataaaagtgacatgatgctttttctattgaaaatgaaactgggccttactaatataactagtttaatgattagtttctttatatatttataaagacattgtaggtatgtacctgtctgttcttcagaattatatttctaatttaaaattatatatcatggagatcctcccctgtttcctgcttgtattctattcttagtattgtgagggcattcttttttctttgggtctgacctctgtttgataagcattcttatttttcctcaatctcaattcttctggattttaaatgaagtaaagagacacaatgaacgtgactttttgcccaaacaaaggaaaaacgaaactcttctctttattcaagaatgtagattaaattcttactttcttatcatcctctgtcctgtcaacatagtgctgagaatgatgttgtgtatcaactcatttgaccacataaagtttaggaattaatgtagtggctgggtcatgattacaacactgatttcattcctggccaaagactgattcttctgctcttgaggtgagaaaagccagtactcctggatactttcgcttctctatttttatctgactgaatgagtctgcaactgggatagtttatgagcctctaataatatacggttagactaccattatctctttcgtgaacattgccaaaagtgtttttttggtaagagatatcttagttataataacagtttgtaggatttatggagtgtttactacatgctaggcactgtatatagtaagctccttaatggatccttatattggatctacacagaaatcttatgaggtagttcccattgtattcttattttacgttaaagaaacaggtttggagagatactgtcttttgaagaagcatataagtggagcagtagtggagtctgaattctgatacaggtcctagtaaccactgcctgttccatggaaggcacacagtgagtattttttttactgaccagtggcctcttgtatggtgacatcatacagatgtttcagtgtttccagaggctcaagaaagtagcagctatataaagatagacaggtagcagcgtctgaaagtagagatgagctactctttatctttcctagtggtttagagccaaagtagattagtgctagggagagagggaacataagtcctgtctagttcagtggtttcatctctgaactcctttatgttcttaaaaatgagcttttgtttgcatgcattatgtataatgatatttaccatattcaaaaaagtaagaaatgaaactacaattttaatgaaaaatatttgtataaaaaataaatatatttgtgaaaaaatagtgacaaaagtgggagctggattctgcatttaatttgttgtgaaatattgttttgattgatgtttatgaagaaaatccagcctctcacagctatgtatttgaaaaaggaaggataaaaagtaattgtggattttcttctttgatactataccaaaacttgacagttttcacattacctaaagttagtagtttcttataggttagtttcaatgtggaatgtgaaatcatattaatggactttttataccctattatattaaaatccattggtcaaattttcactttgattgagtctcctatgattttgtaaaatcatgcattggtcatttagaaagtcgttggtcactcacttattcagttcttgcaaacactgatcatttcattctataatataaaaagtcatcttcattaatatcactgctcattcatcaaaaaagcatttgaaatattagaaaggtgtcaagtgcacagtagtagatgtaaggttttcaaaattctgatttttacttgaaaacatgaattttatttttggctacaaatactgttgttttccttgaaacgataagctctcttgctttatttttgagaaaatctccggcaaaacccacatttaaagaaccatagttcgtcagtcattgtttcaaataaaaatgatgttccatgaaaaaagcgattggttagcagctgtcaatttaaacagttacacaaagtgcatttcttagagacaatcatcgtagtttgatcttcagcaggtgtttcatggtacttcccagaggtcacacagaatgtaaaaaagatgtgtactcaagaatattaaaaatatgtctactttttgattatgctaacattttatgtgatcaggtttctttagtaaaacctagtcagacagtactcaaggactgagatttaataagattgatacgtttcaatgcattaaagagagtcttaagtgaaactggctccctgtcccgcttattgtatgtgtcttacagtgaaatcactcccttgattcactttaagactgcaacagtttttttacccactgttatttttgtagcattaatgtaaatttcaacacagggaaacggcttcttagtatgattatgaaaataattttgaacttgtggactcttgaaaggtctaagggactcctacacatgtatgggtcacacattaacagccactcattgagtccagtcccttcatttgacaggagaggagagtggtggaaagatgtgtctaagatggcagcacaagttagtggcggagctgggacaagaacctattgttacttaactcttctttcttttcttttgatttcctgctccactttcaggaatttaaaggtaactcaaggaattccaaacttctttgtcagagatggtgatgacaaatatatatagtttgtatatcttttatctgaaatgcttgggatcaaaagtgtttcagacatcagatttttcctaattttggaatattttcattaaacttactggtttacattcctgatcaaaaaacatgaaacccaaaatgccccagtgagctttcagcgtcctgtctgtccttgaaacttctggattttggagcattttgaatttcagattttgggttagggatacaaaacctgtataattattgaactttttgggaataattccgttttttaaaaaatgttaaaccttttgcatattttccctactctccgctcaccactactatctcttctgcttttcaatggtaaccactcatgcctttttaaacaaaacatgtgttgtatttgccaagacacaggggaagcgaagttaaaggtacagttgactgttcattttctgaataagatggaattctagctttgtggggaaggaagaatcagtgagttttcgttgaaggacccatgccattctttacctaaattaaagttgttaaaagtcacaggaaagaaaattgtgcaagcaattatcatcctttatatcactataacccatcttactaggcaaactgtgccctttgctccccaattattctctattaaagtttcttgctctccctccccatccttctctttctctctccctgtctcctcccctttccttctagaaagaggttgcccaataaaacttgctcttaactttgcttttggttatgttgatattttatgtgacttgttttcttcactaaacagtagtcagtctatgagactgtattgaagaatgctgagaaagtcaatagaagtggacttagaatactacatgttcttttaaatatgtctcttatgttatagagtaactttttggggagctaaggtttgcagacaatgctgcgtgtgaacatatgtgagtaaatctgataagctgtggaaggaggcttgcaaactttcaaatgtattgtgctttcattttcaacttaattggatgttcttttgcaaggtcttgtttttttcctagttctcattcaccgttcagttgccttcccccacctgtgagctttttgagtcaaactttgtttattagcttttttcctgattcttctttcatgtctttctttcctatcccaaagtatgatttgattagacctcaggttacccttctgaatgagctcttcctcaatcctaggcctggccaggcatggtgcctcatgcttataatcccagcaacatggtaaaaccttgtctctacaaaaaacacaaaaatgagctgggcatggtggcccatgcctgtagccccaactactcaggaggctgaggtgggaatatcacttgagcctgagaggcagagattgcagtgagccgagatcgtgctattacattacagcctgggcaacagagggagatactgcctcagaataagtcagtcagtcagtcagtaagtaagtaagtaagtaagtaaataaataaataaataaataaataaatacgtaagaatcctaggccttggtgacttactctttttaattttttttcccacaaaactgatgtgttttgcccttactttcaccagaagaccatttagtcttcttattttttcttcctgagacttctacatttgtttttttctagccatttatattaggctcacaaattgcatagtgatagctgattgaccccttcaaaatgcctgttttctgcctccttgtctcagcttcttgaggatggtgctatctcatgcttggtgtatcataggagccccatggatatgttgaatagattttgctcaggggtctcctctttagagagcgttcttcacatttttatctggagatctgagcttttatgtatctcccactattgggctgctaaatctcccaaacccagaattgcaatgtccatcttttaatgcagactcccagccactgccaggatatcacatgtcttctctgacagatggctatgtagcctccacttgaacttttgcagctctttgcaaggcaatttgttctactgctggacagcttcatgtttaatgtttttccttgtattacactaaaactgattttcccattattttaatccccatatttctagcattgcatagtttgaaaaagtataatattgcttacacatgacatgtccccagatactcaaagatagctctaattcccccatctgcctcctttcctcctttagaccttctcttgctacttacatcccatagaaggctttggatgctcatcctcttggtgctttccccatttctacatcactttctagattttggtcctgatgtccaactctaagggactccctcaaggccacattttatctctgatggtactaggagcagtatgagtaaatggtatgtgtatgagtctgaaagctgagatatgaattctggtgcttattagatgtgtgaacttgattaggttacttaatctttctaaacctcagtttcccaagatgcaaaatgaatataatattaaattccaagactatttttaaggattaaagatataaaatgcttagcttagttactaaaatatattatgtttagcttgatcaattatttcatcttttatctatccaacaactccttttctttttcacacatgtgcacttggttttaaaaattatttcaagagttcttccctcctcctttccttctctcttttcttctctctttaaattttataacgtatatactcttataaaagttaccatcatgtttagatttccttctaaacttttatatctagaatttaacatgattttcttgacaaatatgttttcttctatgtgaattttcgcagctgctgcctacatttctgctcatgtgtttagcctctgttaatcttcctgtgaaaattgtgacttcatcctgccaatgggttaatgatgactggctcattgcatgtcacttaactcctcgctaaatgcttcacttgatcactcagtaactttacaatcatttagttgtacaatacatttaaaaaaattaaaagttcaattaatttcaatttcacaaacacttactaatcccatcttatatcacatgcattaaactaggtgtgtgttatagtagttgcatagaacattttgttcatttgctcattcattcattcattgaatgttcttttgagtacatactaaagaccagatgctggatagactttgggttcggattcaagaagctgtgttagacaaagagcctctattcaagatgcatgatcaactaaaagtgataaaacaatatggtaattttagtgatccagatataaaactaggcattatggtagttttaagaaaggctgcttcatcgaacatttttgcattaagaagcttcttatcggggagacactaaatgttgagtagggcctcagactctactagaaaggtaagacccatattagggcttggttttgtttgattataaagccattttgtgagaatcaacctccaggctccatgtgttatctttggctcctcaccttcacccccaccctcccaccccagttgcatgcatgccatatttttccttcttcttttcaataaggaagcatcagaatcaacagaataacataaagataggtgtggtgacattataggctcacttctggggcgtcattattacattaatttttctatatttccaagtaagaataacaatgtaagtacataaaaataatctcatgatagtagaacatattgcatagtatttctctattcatcattccctttacttcttgtagaaaagcttagtgcttgtggatttccttaaataagtgtcttaagcactgtatctgatctgatagatattagcacaacaattggcactgagtaattatatttggagaatttggaaggaattttttctctattgcaaagtggtcatgctgtgttgtctgcttttatttatatcacaagaccagatctgccgttaactagatgtctaggaaagagttcctttactactctgtgccttagctttgtcacttgtcaaacgagaatatactaggaacagtatcagttttgcctcactgagctgcagtgaagaataaaatcatttatctgtgtgaaaggacaatgcatacagatggtaacaattataaatattaaactaagcttttgagtgaccggattggctacttctcttaaagtgagttctgcttaattagttaattcttacttattgccccaaactttctgagatagcttcatgtttttttcctctctaccctgaagtgcctgcttgcaagcactatatgctcaatgagcatttgttgaatgaattttttaaaagtatttaccttttttgcttttattattattttaaattaacacataattgtacatgtttacggggtacagtgtgatattttgatacatgtatacaatgtgtaaagatcaaatgaaggtatttagcatattcatcacctcaaacgtttattatttctttgtgtttggaacattcaaaagccactcttctagctacttgaaaatatacaataaattgttggtaattatagtgattctatagtgctgtagaacactagaactgactcctcctttgtacttttgtatccatttaccaacctttggctatcctccccctcctgctacttttctccacctctggtgatcagtattttactctctatgtgatcgatttctttcagcttccacatatgagaaaggacatgtgacaaataactttctgcttctggcttatttcacttaacatgatgtcctccaggcttatccatgttactgtgaatgacaagatttcattcatttttttatggctgaatagtattacattgtaaatatataacacattttctttgcctgtttatctgttgatggatacttagattgattccttatcttggctgttataattagtgctgcaataaacatgggaatgcagatatcttattgaaaatgtttttttttttttcctttggatatatgaccagcagtgggattgctggatcttacgatatttctttctttttttttttttttttttttgagacggagttttgctgtgtcaccaggctggagtgcagtggtgctatctggctcactgcaagctccgcctcctggcctcctgggttcaagcgattctcctgcctcagcctcccgagtagctgggactacagacgcgcgctaccacgcccggctaatttttgtgtttttagtacagacggggtttcatcatattggccaggatggtctccttctcttgacctcgtgatccgcccaccttggcctcccaaagtgctgggattataggcctgagccaccatgcccagccaatatttctaattttagtgttttgaagaacctctatactattttctataatggctgtactaacttacattcccaccaacagtgtatgaattcccttttctttgcatctttgccagcgtttcttattttttttgtctctgataatagctattctaacttgggttagatgatatctcatggtggctccattttctgtatatggatgtccagttttcccagcaccatttattaaagagattcttcttgtttcctttgttgaaaatcagttggctgtaaatacgtggatttatttttgggttctctgttctgtcccattggtgtatacgcctgttcaagaactatcttgaataaaagtggtaaaagtgagcatctttgtcttgttccagagcttaaaagaaacctttcaatttgaacgtgtccagtatgttgatgactgtgggtttatcatgtgaagtgtttattatgctgaggtaaggtatgtttcttttatacctgacttgagatattatatcatgaaggaatgttgaactttatgaagtgctttttctgcatctaatgagataatcatggtttttgtactttgttttgttgaggtaatgtatcacgtttattggtttacctgtgttaaactatccttgtatccctcggataaataccacttgatcatagtaaatgctcctttaaatgtattggtggattcagtttgctagtattttgttgaggatttttgcatctatgttcatcagagatcctggcctataattttctttttacatgtttgtccttgtctggttttggtatgagggtaagaatgcattcatgaaattctttatttttgagatttattcttttttattatgtctatctttgttgaatttcttcttcatattgtgaattattttcttgatttagtaaaattgtctatctgtattttcttgtatctcactgaggttccttaagatcattattttgaattccttttctggcattttattgatttcttttttactggagtctgaaactaaagagctacattcctttggtggtgtcatattttattgctttttcatatttcttgtgtcagtgagttgatgtctttgcatccggtggaacaattacctcttctatacaaactttctggagtgattttcataaaaaaagacttccgcttgcaattagggttggtgttacagttgggaggggtgtgatgactttgtttctgaatagatgcagtgatagggtctccatgcagcttctaaagctacgttcaatgtcagcaataactgtgggcacctcagtagcttaagttgtagaaatttgtggcagtggtggtggtggcatagattattaatgtcctcagtgtcaagggcttttgaggtcctcctattcttatttttttcataatggggagatttagccaaggggactgctcttcatgtcagatatcacatgacctacaagcaagtgcagtggtgctgagttctaggtgcaggtgcttgaagtggctgtgggactagagtcttatgcccaggatcttgccaacctattgtgacacctgggtcttgggttacaggttcactctctgtgctagggttggatgtaggcttcccacagagccaggatttgtgactctgagacattactctacaaactcagtcccagctgtgagtggctcaactccaggaaagaaggagtgcagggaagtttggacccagagagcaggatatgccctgatttggcaacatgagccagtagggttcagtggcaacttggatctcaggggatgaggcaccatgtagtagtgattcttgacccctggatgttgggactcagcagtaccttagactctgtaagaccacatgcggtagcagtaccccagaatggcaacatacagctgttacttgtgccctgagtgggggcagagtacagcacagtggtggctgtatgccacagggagaggggtatcttagcagctctgacactaagcaggtagaccagctccagggaaacagcgtattagagttgttttccctttaggctggagtgtctcagatcagcccagccactgctcagttttccaaggatgtgggttatcacatcagctcagctttgggatttacagctgctcagctgagcgatggcaccaattcaccaagggacaatatgccacttcagctcaggcctgggggacatgacttttctaggcagcccaggtaccatttccctgggatgaagggtgctacttcagattaagtactggggtgcgtgaccgctctgagtggccaatgtactgttttcccaggaggcagggtactgcttcagcactggcctgaaggggagggtgaaaggtagattaagtgactctaccttcacctgggcccatggggaagagtggaacagttgctggcagctcggcttggggatgtcgggccactgggttcgggtggttcaacggtagcttagccttagtgatggagtgtcatagctatgcactcccagagcaagagacactccagccaaagctccatttccaagacggcatagcgcagtagctgcgcaggccacagagggcaggtcacactggttgctctttttcttggggaagcacggctatgtggacttcaggcaggtccctcagctgggacttggctcctgtgaggactacatgagactccatgggtgaggtctgtagctgttcaaggtgttgatggggcttgctgggatccttttgtgtaccattctaccctagagagaagttcctccctgtttccagcagatcccaagtgggtgatgggtggtaaagaccaggtgttttgtttctattctctatgtggtcattctgagtttcttgctatccagggtttctgttacttctctgatgcagtctggtacactgccttagttattattttttcttcttctgtttttagttcatctttttgtttttttctatatagcaatggggtttccctatgttgcccaggctgctctcaaactccagagctcaacagatccactcaccttggcctcccagagtgccgggactacaggcacgaaccatcgtgcctggcccagttatttttgttaaagtttagttgttgattgttgttgtggctgtctttgtgaaagagacgagagctaggggcttctggttggccatgctactgatgtcactcttaaagtacttatctttaaaagtccagtgctggagatttgtaagctacttatatttctgctcagaattcctaaagtctctcattttatttctagattatacattccattgatagagcccttataaatataacattaagaagttgagcattacctttaggccaaagcaatttacttttaaaaaatctgattaatttcaacacaatcaaccagatgtcagaagatttcagtgcctctgatagatgctgacaggtgtggaaattaaaatcagagagggaagcaattaaatcctggcaaacattactttaatgagacaaccaaatcataagctatggaataccttgtattcttgataagtatcttagggtggcatgagagtgcactttaaattgtatgtggtatttgatgactggaatgcagggcagtccatatttgtcatctaattcctttggcctgatttaacatttcagttgcttctggggacagacttctatgtttaaaacattgttttattttaataaatgttaggttaagtaatccttttactactacctctgttgccacatgaaacttatgaaaatgaccaaattattattggccttttcgcagtggttttgggataactgtgaaaagagaaacacagaatgtgtattttatgcaacttctaatcaaaagatttgataattacagcactaaaaccagaacccagttcctccatccccatttcattattcttttcaatatgattccccctattcggaatgaatatcttggacaccagggtgaaagaggtaccagtttattgacttagtgggagtttttataagatactcttatattgcttattgaggtactaaagcacttacaaaatatcaagtattttgagttagctttacactggttcaataacacttagaatttttgttcataatactaagataatcatcttagggatggttacattttgttgtgaggtgtggtggaaaattcaaaggacaccatggtttgtgaaaaacccattgcagctgatctctgcacttttcatttccatgtcattccattttcttctgctttttctttaccccctgttattttcttgcttctctctctttattatcttaccttcatttactccatcctgtttttctccaaaatatagttgcttctgtaaaattgcttctgagggtgagcatatttttgaggggagagaggatggatggtttgacaaaggatgcagacatgtcaggttctgggtcagcagttagttataaaatacacagaggcagccaaggataactggcttcattaccaaaaggctagagtgggatttgtcagttgtcccagatgtctgtatggaattatggaaaactccattgcattatgaaacactcaggagctactcaggacacatgccactcaatccacgtgaagagggctggtgaacttcttagctagaaagacttcagctttcctattgcttaaaatgagactgattggtgaaggatttgtattagtccgttctcacgctgctataaagaactgccagagaccacgtaatttataaagaaagaggtttaattgactcacagttccacattgctggggaggcctcaggaaacttataatcatggtgaaaggcaaaggaggaacaggcaccttcttcacagggcggcaggaaagagtgactgccagcaggagaaatgccagatgcttataaaactatcagatctcgtgagactcactcactatcatgagaacagcatgggggaaattgcccccatgatcggattacttctacctggtatcacccttgactcatggggtttacaattcaagatgacattttcggtgtggacacagtcaaactgtatcacactcttcacaaaacttcactggtacagacttgcgtatatggcttgtgcttcgacactttgcccagggatgttgcatcttgaaactttcctggtgagatctgagaaagtgtttatggtaacactgcatcaaacactccttttgccttagcttagtaatgtgtcaccttctggttagaccacagatgtgaagtctactctttctcctttcacttgctaataaagcagaacttagaactaagtgtgtgttagtgcttcgacaattgaattttctgtgctatacactcggtttccctttcctgaagttgtttagttaccctcttcaaatagcaattgggaggctacgtcatgtagtaggagggtgcttactgattttggtatcaagatacagtgttacatttttatctgctccatgttaaccatgtgatctttgaagtttggtttttgtatttgtaaaatttgggtaataaggtctcattggagttataaaggggatggtttgagacataatggtcattgtgatttttcaagctataaaataaagcatgatgttaaaagatgattaatgttttcatttggtggtagatgacaagtttcttgcagggcatctgatcaatcatgctctttttttttttttttttttgaaacttttattttaagttcaggggtatagttgcaggatccatgttcttttcttaacctgttttgagtcctttatgtaaacgggacattttatcaaaacttcctagaagtcttatatttctcaataaatccatccattctattaaaacaaatttgctttgttcttagagtctggtggaaactccaactctctgaacctagggcatgattatgggcacaaagttgaaaatgatgtgtgattcatcagcaggtctttcaactaaagcagtatctgttttgctttttaggggtcaaggaaacttttgattttaaaatcttaaaagtttttgggctgtctcttgttagatgaggtcatgtgagagtgacatagattaatatttcggtgttttaaaactaggaaacataagtcaaagagatattctcttgcctaatgtgcttataatgttatcttttgatcatataaatgtggatttatgggaagaaatgttatcactgctctctataaccatatacatggaataatggagagaaatcttatttaaaaagtttaactaagggcaactttggctatggagtatatatcataatcttcacatacatatgaagaaattgacactcatggagtttaaataacttgcctaaggccattgattaaaggaaatctgactggctcgaaatcctatgtacttttcccatttcctcatttcaatcaaatagctggttttattttattttctctctccaccaagccttgtgaattaagacaatgagttgctgtttgtctttgtctttccctagcctaataacctaggaaaaactgaagtagaaaggaaggattactggactagcaggcacaaactttggctccaaattcatgccctgccagatactaaactgtgtaatcttgggcaaattactttccttttgtgaacttcagtttctacttctgtaaaatgtggacaataatattcattttatatggtttctgtaaagttaatcatgaggatggtgttagttcctttctcatcctttctgtccctctttgagcttctgtttcctcacctatgaagccagtagaatcatctcttcctgcttcttcatcgggttcctgtggggtgcaatgaatgtgaaaatgttttgtaaaacaagaaaccattatgtagatataagaggttatgactattaatgaataaatatgggtttggtgtctggaagtaatttttacttatttcatttgtagacactagcattgcagttggctgaaccttgtgtcaaccatccattccaggagccagctatctgaggtaagagaggaggcgtgtcttcttgtttatgaaatactaataggcatctgagccagtaatgttgattttagaagaaatacaaagaatagaagaaatacaaagtactttatgaggaaaagaactgaaaaatggccaagacagtgagctgacctctctttttatttttgtttttttgatttatttttttcccttttaattcatagcccttaaggtttaataccaaaaccaaaaatctgggccacacagacgattcagatttaatgtgtatgtatttaagtgtccataaaatgcaatggagtagaatgtgcttaaccattattttattgtatcctcaactagtatgtggcaggagggctttttacctggtttcctaacccttgattgagcgcatttttgactacactatactgccagtgttacctggctctgaaggggccaaatatttatggctgggtcagtcactctctcttagctgccaaacaaaatcatctcaaaaagctagaatccaaagccacaacagaaaaatcctaagaacacagaaaattgagttagtcttttgaaaccttgcatccattgtatctgaatgccactctcctgggggactgttgggaatgacaccaatccttggcagaagaatacatttgtcttgagtttgccaagaaaatggaggccaatggagaaaaaacatttaaaggaagcatcatagttgtaaaatttaccagatgcgatttttctcctaaagtcaacctgctgaatctgtaccttctaatgagctctactgtgttttatgtaatgtaacttaaccaaaaagaggtgaagtagtcaatatgtagaatagtaactttgtagaagatttgatatcattatttagagtactatacacatgtattctgctgaatattttgttaattcctttggtatgttatatctatgacctcgaactgcaaccatgacttcagttgcacagacctttgagaagaataaaattggttggtattgccccaaatttgtaggacttagaaaatttagaattgagaggaaattaaggtgtcaggtttacatgattttcaaagctaatatcatatatatataataagaacacgtgcagacaaggtaggttatgtatggactatgaaatttctgtaattaaaccagacataacagccacttaagttatttagattttcttctcattcctacaaaaaaagaacattgtttttatttttattattatttatttatttttcaagtggaatataagctagtttacccaggaagttttttatttatttatttacttattattttactttaagttcttggatacatgtgcagaacatgcaggatttttacgtaggtatacatgtgccatggtggttgctgcaccctatccacccatcatccaggttttaagcaccgcatgcattaggtatttgtccttgccttgccctccacccatcaacgggccccgatgtgtgatgttcccctccctgtgtccatgtgttctcgttcaactcccacttctgagtgagaacatgcggtgtttggaagccatcattctcagcaaactaacacagaaaaagagaacattgtttttaaaaaaggtagtagcaaaaaatgtaagaatggctcctgtccaccttttatttcttttctagtccacaaaataaccctgcaaaaacttatttctaatgttttatttttacggataaatatatcagaaaagaatgtactgtagatacctactatcatagtttttgacagctctgtgaggcagagatctaacttgttcatttagaaactgcagttatcacactaaccttccctccgatgccaattgttaaatattaatagaataagctttgaaaagtaattaactgtatcccctgtccccacagaaacccatcttgaaactatcaagaggagttttaagcaagccctgaaaggttacaaaaattactctcaagaaagaggaattttctctctttctcttttcgttatattttggaggtggggaatggtagagagggaatgatagaaacctctcaagtaacctttgggaggtggagaagtaaatagtctgggagcatgctgtagaaatttaaaataatcctgtggcaataattggtatcagtggcagtaatgaagaaagaataacagtttcaataaataattagacttgacagtaaatgtgtcaacaggtacctacttaatgagtgtaatcattgtttttctctgctctcaacgttgatccactgactgcggtgtgttctctgtcccatttccaaaccaaatctatttaaagctgcactccacggaatctgcaacagtataccctgtttactatttagagctgatacctaatgttctttaataggcaagatctgtacttgaacgagaacaggcttctggcctcttgtagacggttgattatccctgttttccacagggtgattcattagcaaggatgaataatacccaattaaatctcatggacttgtctatattgccagagtgaattgtttattataatttggtggaaacagtcctggtctgctttaaataaaattaatcagttaccgttttttgaagtggaggtagaggcagtagttataagtgaaattacctctgtaataacctgaatagaatcacattgtttttgggagcaaagcagtatgttgtatgttatgtgcaccagaagccatgagaatccttttctaatcccagctgtaatgtcacctggctgtgtcacctaggcaagtcaccttccctctatgaggtctgtttcatcatctaatgacaaagttggaccagttgatcatggcattacttccggttaaatgttctcttatatatgattttatttcctagctagtcccttctctctcctggtgccatgtttccaaaatcataggacagtcctatgactctactgcacagccactgtggaaaattagttatttttctgcttagcttttgcttcttttacataccagacatgcagttaatgacttttattatatatactgtaagaatgggcatttatacaccggtagcggtagtcccttaccccagcaacttgcaattccttgttaggaaagaaaagctgttttcctccacatttctttactctgtgacattgttccctgatctgggtcttatgagaggatctggtaaacttcccccctattaagaccgttaggaagaggtggatgcttcttccattatttgatttttccagagcaaatcactggatctgtaaaggagatcagaatgtcaaagccagaggggacttcacgaagtaatctaaacaaattatttcatgtcacagatggagattttagtgtctgggagggaatctgatttgtctaaagtgtttttgactgatcttggactagaattcttctgactacatagttgtatctttaagtagagaaatctttttctataaactatcctttcacttcctagttcttaaaaggccattatcttccaggcaaaaccaatttcattttcagcatggggatgtgagatgtccttaaacataaatggactccaggtatcttcattaatttcatgaagacatggcacagagggttccggctaccttctgctttccgtgtttattaaaagactgtggattcccttgcagttcttcctgtaagaggttgtttgacgctgacatcatcactctcctccacccgcctcctgcccttttctgaatcagtgaattataggaatctgagaatgagctcctgtttcctgcacattgttggggaacattaaaaaaaagaagacagatgagggatttataagcaagaggacagaagaataatagccaacacaatgaagtctagttcaaggcctgcgattcccaattgctgggctacacagcattaatagcagtgtctctcaccctttcagacccttctctcttatttcagacccttctgccttattcttgtggggatgggctgggactgagaaacagctagtataatcattgccaaaatgaaactcacatgtacatgggggcttccaggtctggagaagagtgtagtaattgttacccatccgatagaaggtgcttagagaccactggacctaagcacttacctggaacctcacagtacagaggttcaaagagtagaaatcagttgactgagtctgaggttcaaatcctggctctaattaatttgctatgagtttagtgaatgcctaactttcctctgagctgcactttctccatctgtgagatgggaggaggagggtggcatagatgatgtcaaaggaaccctctgattttcatgagtctcagatttgcccaaggacctgcagcgaatgtgcagccaagccagatcttgaattcagagcccctttttctggtttgagatggtcatcattataagttccactacccatactttccaaacagtatgtttgcagctttcagccttgttttattaaatctactttttctcttttatttgacagtccctttctgtccagggacctgcctaaagtagcaaatcttttttttttttttttttttttttttgagacggagtctcgctctgtcacccaggctggagtgcagtggcacgatcttggtttactgcagcctccgcctcccaggttcaagcaattctcctgtctcagcctcccaagtagctgggactacaggtgcacacccccacgcccagctaatttttttttttttttttaagtagagatggggtttcaccatgttggtcaggctgctctcaaactcctgacctcaggagtccacccgcctcggcctaccaaagtgctgggattacaggtgtgagccaccgtgcctggcctaaagtagtagttcttaatatacgtgtgtgtatgtgcgtgcacacgtgcatacacatgatcctgtgtttggggcagatgtgaggattatggaattttcagaaactcagatgaatttatgaaatagttggaaaatgcagaactccagaaaatgctatcaacaagtttaggaggtttgtagatgctctgaaggccatccatgagttaagcaaaagttttcattctatgtgggaagtatgagatgacatttgagtggcatacatttccttttgctgttggattttccccgtagtcacctattgttatactctgagtgttaggctcgttttgtagcatgacttttggcatgtatgtatctcaaactattgagtgatattttaatattgaaactcttattctacttcattcattcactcatgcattcaaattcaattttaattcagaatttgctaaatgctagacatctcaatacattattgtatataatcctataaaatagaaaattgctaggtgctcagagaggttgagtaatttgcccaaagttttacagctaataaatataaaatctggatttaaatccggatttactccaaaatatgtgaatacctccagagataacattgaagacaaatagagacaatgatgcaagttcataaaccatggaaatttctggtagaaaatggtagatgggccccagaggaatacagagaatgtgtactatgggattttaggaagggacaagatcatacattatgaattacttcatatcataattcgttaactacgtgtttatctggctccttaagaaagaataaaaaaagctagataatcatatgaaacacattatgcataactcagtttttttcttgttcttcaaacttctgtcaggttagtgctctcaatatcttcatttggtaagtgagatgaggagatgaagagtagttagggtcatagtgccctgatcatactgagttttcacctaaataggaatttcagtgctttgggtcatctattttgttcccctcctcccggcctacccccccattatattgagcttgagacttttaacagagataacttctgaccatgcacagatcagcacaaatgcagatgtgagcagctagaatttggatgctgccaaattgtgatgactgccacatgtgtgaagctaaagcttagcacctgatgacccactgtgagtgtgtgggggggccagaagagtgaaaggcaggtcagagatggaagacgcctcggagtttgtcaatggcagtaccttcaccttgcagatgcagaaatggaggtggttagaaggggtaagacttactaaaattcacacagcaggttaatggctctctgagaataatggcaaaacaagaacaaggctttataccagcaatctacagtagtatctacttttatttcctacctttccgttggcatatactcacactgataggcttgacaggcagataaacctgtatttgaaggtcagcaggattagttgtgtggccttggataagttacttgatttacttgggtctcaggtttgttgtctgtaatagaaaccataccctttttcttttctttctttcttttttttttgagatggagttttgctcttattgctcaggctggagtgcaccggcatgaccttggctcactgcaacctctgcctcctgggttcaagcgattctcctgcttcagcctctgtagtagctgggattacaggcatgagccaccacgcccagctaattttttgtatttttagtagagacaaggtttcaccatgttggccaggctggtctcaaactcctgacctcaggtgatccacctgcctcagcctcccaaattgctgggattacaggcatgagccaccgtgcgtggctgaaaccatacccttttaacaggactataccagtgtactgttcaatatacagaaatactatcacccatctgattaataatccttatcacagcccaatgagacaggcacagatgttctgcttttcaagattctatttcctaacttcatcttgacagttgtaagtctcttgcttctcaaagtttggtctgaggaccggaagcatcagcattacatgggagcttgttagaaatgcaaatctcagatcatactctagaacttctgaatgagaatctctactttaacaagagccccaggtagttcatatgctcattagtgtttgagaaacattcacttcggccctcgccctatttcaaggctattgctgtggtgtgctgacaatgcctggcatgctgccagcattcttggggcatgctgtaccatgccttgagatagcggggtccggggggcggggatgctgtgaagtcactccttgggaataatggaagactgggttgaagggatccagcaggctttatctttttaacacccttcatttccttagaagttactattcagaaggggtcaaactgggattggattctaagtctttctgatccaaagtccatgttcttttcattaaaccacgatgtctcagtcaagaggaatgctgggttgtgggtgataactgttcattccctgtagtgtgaatatttccacactggctgctttaccctattactcaattcctagaggggaagaatttttttaaaaaaatttaaaaagcctgagttgaaagccaggatcctgcagcttaatcagttatttttgctttttaatgagggtgactattgtgaaataagtaattattaattactcaaaactaatgaaatattttagtttccttgctcaaaaagcatatggatgctaaaagaaagcatatgggtgctttctgggaagcatattggtgaatggacaaattacagtggtgccaatatgcctttgctgtctggctggggccatcaaaacgtgtgctggcatctgagtcctcgtgtgtttaaagggattttttaaaattcccatttgataagtgcctggggttgcctctggagttacacagcgctgtctcatcaatctttctgccatgctttcactcagacattactggctgagtataaactcggtataaacctttgctgtaagtagcttctgtggctctttctttccagatgcctcctatcctctgcaataggttcagtgggcctgccccatggatggcacgtatggagactttgtctatacaacattttaccacagtggtaaaagcagtagccgaaaaggtggcagcactgagacctgtttgctccatcagggactctgtctgaggccctcggccagctgttgaattgctgcactgcaaatttcttacttgtaaaactggaatgataataccagtgctcctgagctcacaagcatgctgttcatccaatttgcagtccatgccctttgctcttcctctcctttccttcatgcctcttctcctttgctgcatgttcagctggtctagtaaaaagcttgatggatttggaggtggctgaaaccattttgcttgctctggggattgcacacttctgagcttgtcagaggcaggcaacatggcatgttttagaagatacttggctgagtgtccacgaactgtggctctcagaccaacgtgacttagtaatcatttactcaacacctacaagcaaggtagcttgctaagaaattgaaggagggagctggcgggtctgtggaggtgagtttgattcagggccagtcaagacttggtgtgatgtgtgagctcagtaattatactttgagagagacagaatttggagaactctttcctattggaggtttcttatagaactagggacaagagctggctttgaaagattattaattggactttgataagatattacaaggatttgaagagtaagtctctgtcaggcaaaaaccagcttgcagtgggactcggaagcaggcaaatatcaggcatggctgaagaactgggcatcaatcacagacatgtgtagctgagagaaatcacttccttttggtgaaccctagactctatctgcaaaatatgagctttgaacaagatagttctcaggaagcctcaagaactctagctgaaattctacaaagtctcttatcacacagccaggttatccacttagcaaaatcctggcactagaatagcagcaatggagcaaggcctgggacccaggtgtcctgcctctattttatattcttcttactgtccacagagcattatgatgaagataggtggggtggacattattattctagtttttaatgtatgaaacataggatgttaagggaatctaagacataaaacgaataagagatttaactatcccagatattgatcacccttccaccacagagggccagctcttataaaatacaccccttgccattttgcctgtgtgggccttgctttcctgcctgaggaaccagcacgtaccccttctcccacgaaagtcatccctgtctgctctttggctctggaattcagtcttagcaatggactttgttttataattaaactttattttgtattgccatctttccatgtttccacccccatctcatccctcatacatattttaaaggctttgaatttaaggattactttctgcttctctgagttccctgtagctcctggcacagggccccagacatagtgctcagtagagaagcaaatgactatgttctgcaatagtttttctctctgcctattgcttgtttctgagatggatatgagacttataggcttaaagaatttcggaactggaaaggaagttaaaacctatctagtccagctcccccaccccagggaagaaatgacttacttaaatttgcctgcatagttagtggcagttctgcaaatcgtgcccacatctcaccaagcattggagagatggttggcacttgagtctcttcttaggactctacaggctctgtctggagtccttgtttctatgaagaccactaagaataaaggtaatacaggtgctgctgctgctgtattaaacagatggaaagaagtagacattcattgtatgtctgttatgtgataggccttgtgacaggtgttttcacatagtttagcttggtcagtcatcaaaagctagaattcccattcctccatgagggagacagattgtttctaaataggacatttagcagaagctctttcctgtaagctctgaaaggcactcggtagtggatagatgcttccctcctagaacacgggtgtagggctctgcagagtagcatgcatggctcttctaagggatatggattgtagagactgtgaaaataagcagaagttgtgatcaaaattggcgttgggggacttgtggtcacccgagtgtaccagaagactgagctcttctactctcctttccacacatacatctgagtctttggagagctgcaacctgagtgcctcgttcttgagtgtctgtagcattggcttttacttgcacttactacattttactcctgcctcttccctagctagcctcgacctcaacgtgtattatttcctccccccttgtcatttttcttctattacttttgcttcttccccttcctccttctcctgacttaaccttgggtggccgcaggtcttaaggctctgtgatggcagagtcttctgtattggactgtgaagattctggcagggaagacaatacacaaatctgttaaatacacaataaaaatagcttatgatctatgggacttggtattaagcaagatgatattaacgaggtttgattgctgttctgaaatgtggcagctgcgcacacgtattggctgctttttctccccacctttggcagcttgtgagcggtgttgccatgacactccttgggctctgtttagatcagctattttctgaaggagtcgctgaccttccccacgatagaagctgttgatgtggtcacgtcagtgcctcttcgggagctgtgtgactggcgagccctcagttgccacttggaaacggttggaaactgtagatcaggcacagacattgaatgtttaggagcaagaagggcttgtgaatatcccgtactctcatttgatgtgtgaggacagtgaggcgcattatgcggaggtgacttgctcaaggccacagagtgcatagagagaaggctgggagaggaggtcaggtcttgtttccctgcttgttgatgttccagctgcacggcactgagccctgcctgagtgcgcacttcagtcctgaaagctgcagagggatgggctggtgacactgccgtgcctaggagtgggcagagaaggtgaagacacggagagtaactcagtgcagaggcagcgacgggaaagtgaaggagagtaagaagcccagagtaaatggccaaggtgccactaacatgtccatccacagaaacttttctgggggagaatgtttcttatcagattccgcagatgggttccttgagaagtgagtgcttaaaggggctgggatagataatcataatgccatgttctcactgctctgaacccttttctgacctcacgtaagacctcacctaaaacttccacaagagccgttcattgtcagtaccatgctttttttggagtactgtataatgtcaagtatttttccaatagtttatatgtgaaatgtggtctccgccacaagattacagggtcctcgggagcagaaattgtgacttaaatgggcctttctcccttccactttttattcttgccctaccttttaatcaggcacctggaagagatctaaacacaggatgagcatccagtaagtttttgttgagttgaacttagttggattcggatgacctctaaaaaatgtttactaattgctggtgaaaattggcaaatgattattttgtggaaaaatgttctcaccgaattagattttgttaagaattcttatgtgtgattatttttcataaacccaatacactgtctattattatccttattttacaatgaagaaaaaaaattcaattgactgctcaaatttacctctaggaacaggtgatggagatttgatttgcatttagatcttttgtctccaaatattgtaatgttacttctgctttcccccactacataccgaagaggtcttacttcattgacagtggttcagccttctgctgaggagtcttcagtctttttatgttgtaatctgcctccttatgagtttgggaaaagaattatggggcctcaggtttaaatgctgttatgctttgggtaacactttagctgatttgttttcagtaaagccagaaggaaaatactgcatttctgtcttctttaatttccttaatttgaaataagccttgaactagtttgtaagactcctttaacttttaacaaatttaggcacatatgtaatataaagaaaaaggcactctgccctaaatgaattgactaattaagctgagaacaaaactagaccacttttttttttttggtttcaaaaaaaggatgcaggaatttttaaatgctacagctaaaacccagattttgtctgatattgatgttctgtaggttttctcaatatttgccatattcattagatgacattcattatactttcctaacttttataggatttagatgaggtttgttgataacattctatattctttctgaaaagaaaaacacacacacacaaatgtcgagcagtcttctttttttaatgtatattctcaggaaaaacaccattgactaatttaaatttcagtacggaggcaaagctgatctgtagtgaatgtaacatcttgttaaatacaggtttcatgcttcttttttgtacctttccaggcttttaaggaggagaataatttgaataataatggcataatgtccagagggaaagttgaatacgtaagacagagatgcatgtgggcctatttctgtactttgtgtgcgtgtctctgtgtggtggctttatggtttttaaaataaagttttctgtattttcaatgtatataataactttggaatcaccaaagaaaagttgatattgagacttgggtttttagtggggaggaatggatgttttttttcttttacagttttaggcaaagtgaaactttagaaaattatattatttgaagttagatggaaaccaaacactatctttatagtttctttcagaagaaactttgtcttaggaatctgggcactcttgtaaactttctaaatttcttcagccctcattgatacccacactttgcttaattcagttgaatcagtttacagtgaataacgtccctgggaacattaatcaatgaacacacacacgcgcgtgcgcgcacacacacacacagacacacacacacacacacacacagggaggacaaaaaggaaataaaagcatcactttgtaccttcctcaattcaaacctgtctgctttcttcagaatttcggatgtatgtgtctgtttcttccagtagattgggagcaccctgaagacagaagagacatatgtatatatatatatttttgtttgttttttcttttttgtttttagacagagtctcgctctgtcactaggctagagtgcagtggcgtgatctcagctcactgcaatctccacctcctgggttcaagcgattctcctgcctcagcctcccgagtagctgggactacaggcgcccgccaccacacctggctaatttttgtatttttagtagagacagggtttcaccatattggccatgctggtctcgaactcctgaccttgtgttctacccgcctcggcctcccaaagtgctgggattacaggcgtgagccaccgcgcctggctagaaagaagagacattttatgtatgatcgtcataatgattttgtgaactcaggtgtagtaaggtaaaacgccctggtaaaatcacttactgggacttttcagaatctgtttagaagtcattccattactcttgaaatccctctgctttatagactttctgagaaataaggaaagtccatctgcctacttgtcatagaaatgggtacttcagcagtaaaatagcctgtttacatactggctcaaactgtcaatgtaggaaaaggtttcgtgtattataaaatgttacagagctagaaaaaatatatacaagtaatatatagagtgcatatatatgtacatatatatgatctgttccttgtcacaatatttaacccaaagtgctatttacagtaatgaatcaaaatgtcagtcttaaaaatatgaagtgtcaaagtgttcccacgttgtagaaaagtttgatgtgacagtttgttaatcatatgactattctatcaatgtgtctcataatgtcttttgctcaacactctcgtaggctcctcacacttttttcatgaattcctagcttaagttactaacccaaggagcacatttgagttgcgtgtctcccacacctcacacaaaggcggctatgttttgctgtacttaaaactgaatggatttcacattattttagagtggtttgattttgtgcctgacgcatttatggatagtagcttaaaaaatttctgtaattttgctgttttcactacagaatcatcaaatgaaactttaacttatagcgcggatgttttttgtttctccaaagtttcccaagatatcagatgtccttatttgctagtgcccattcgttgaacttggacacatttttgaatttttctcagcacattgatgatcccaacttctttttcctactaaaagggcagagtcttagaacataaatattatatatgtggaaaagggcaacatagtttctttcgggaggatttttggccatgctactcactagttcgtggatcacacttaatctctgtgcctccgtgtcttctggagaaaatttaagggtgaaattagattagatcagtgaatttttaaacttatgctctagaagccctaggattctgggtagaaatgaagctccaatgattgagtgtggggtgggcagtggggactctgggcccttcaaaccaagcagctctgctattcgcttgttaaaatttagagttttataaactgtttcacttaaagaaaggttctactgcttaacctgcctacctgttggcatcactgtcttaagtgatctagagtcagtggcttatttcccacaaggattcagtgggcaactgtgacaatagttcttggctaacctggtcactatggaagttctttccgtggaaaaagattctccatccttcaatttgagataagatttactaattgagacctcatttgtttctgattttaatctttgcatcattttagttttaataaactaactttccaacttaccagattttcgggttgacaaagaccattatttagagaaacacaggcaaaggaaagtctaaaagctttggctggaatttcaactgcttctggtcaagaatatgaattttactttgtacggccaaagcgtttcaaccattctggggaggtgggtgaatgcccacaacttgaacttttcattccattgctttccatcctcaagtctctcccttcttctccatacacatgcaactaccaccaccaccatggttctcttcgcatggcctatgtatgtccccagacatggtggagcagaaaagtaaaaagttgtgatttacaaaccaaggtagagactataagaagaacaaaaatgattaaggggcatgagttagtgacactaacaaaaagccttcatgtatcaacataaaaaaatcaaattgaagaaaatatttttcatggacagaaaacctaccctaaagacaggaaagaaggtgaacggctatttcactagatgctgaaacatcatctccaaagttcctcaggaatcaaactatgggattagattcaactcttttaatagctgaaatctagaagggagagagtggttacgtctatagttttatgaatgatgctgaactctttctcacaataaaatgctcttctactaacaaatttaaagacttgagcacccagaaacagcagttgcatgccaagtcaggaatattctttttttaagtcacatgtcagccactggggatgcacccgggtttaggctggaggttggagagggttcatccaaaatccatgcacaagatatttatccaaaattctggagtggttccttgttcattctctgaagaaattggtgagataaggcaagcatcctaaacaaatgttgagctctaaaaatacagtttaaataaaacagaaagcattctgagtatagttttggccaaaatagaatagtataataaatcatttggctggagggtatgacatgagaataaacaaaaaaacagcatgtttgctatcttttctgtttattttacttatgcatcaacccccttctgcctccttttactccttgctagagtgtggaaggatcttgaattcagggccttgtctgtcttgtttttcagctggctggagtcacacttggcttatttatgagctcaataaacattatgaatggatgagcaattttgaaagattgacatattgaaggaaaaaaatgacgtgaatctgaaaaattctgacatggccacttctaaactctctgggacttgtactaaatgcttatagatttaggtagcattctgagcattacctcacttattcctttcaaccagcctctgaggaaggtactgttattatcaccatttcacagaggaagaattgagatccagagatgttacataatttgcccaaggttacataataataatataatagctaaagccaggatatgaactcaggtagtctggcttcagcagcttctctcttaactacgaagctatattgtttccacatggtgattataattataactgcctgttctactttcctgtacgttgtgaggctgagtttaggtgtgaaaggattagggaagaagtatatcaactagtgaaggcgagacaacacacaaacaactataacttaaagtagatagaaacttgcagagaaagttcagagaagaaaaaagaactattatttccaccagggtgaagggcaggagtcaaagaaggcttcctgtgggaagtgacttagtttggccttgaatgagtagaattatagtaaagggagatgctttccaagtaaacagaataaacagtggaagagatgccagtctaatgctgttgagtttagcagattctttccgaaagagtgtgcgctgagaagtggggagtggagagggtttgtggtggaaggaggtggaagccctgagaagggatctgagtgggaagatgcaagcgttccaaaagcatattcgcaatctctctggaggtcaatcctgggcaaaatgttgcttttgtcatgctttaactcattattttttgatgcattgtccgcaaagactagtccaaggaggtaccactccagaaagagtggccacacgagtctggaaaatgctgcaccctctggtgctctattaggtgctgacagtgcgtgttaacatgcccagtcttcaaggaagtcccgtgagacagcaatcaccttgctttctttgactgtagacctggtttgttgttttactttgagcaaacccctgttaacatccctcagaagacacacttcaggagccctcttccagccaaccagctggactaatttgtgtaaactttccaacaagttgtgtgcttctgctgaacacaggtcatctcagagtaaaacttgctccattctcaggacagccaacagtccccttttgaaagaagttagagcacgtttgcctatagaaattgttatgtgtcagttagaaagcaagctgcatccgaggtaacaaacttgaggagctgcagcccctctgacgaagtaaaagtgagaagcaggaagtgaaggagtctcagctcttgaaataaaatgtgcatacgggtgagagttgccaaccacaagaactctagctggctgccctgagaacatattaggagaaaacatggttaaagtcggcacctgacctattagctgcaggggcagctcattatcttttttattctttcaccctgcattggcccgaaaggggaagagaggcagtaagtggactgtaaagagtgcttattccacgctgggcaggtcattagaattgtcatgtcaaattcccttccttaatcccctcaactacccagtggagtcaggattattaatctcttcctctatacgtgaggacagtgaatccagagtggcttgctggtgctgaatagatcatgttgtcttacaacttgagcttttcccttgttcctttccctatttgtctgctgaactcatctgtctccaggttgtaaatgagattctcctctgaagagcctctgagccccctgtaactctattcttgtattgcatgacgatactcttgttctttaggtttatacctctttctccccttaagacctaaaactcgatctgggttactctagagcccacaggtttatattgcactgctctgcccacattccagccttctccactttaacatatgacttgatgatagcttttcagacccagtccctcacaagatacctctttttcaacccattattttagaccttctttacttgacatattttgagttttctggattctaggcttccttatcgttagtgtcactttccccccttctgttacatgtctgttaccttcttgctatttgcttaggtcctaccttaactttgaaggaacgcttttcaaacccggcctgcatcggaattaggaatcccaccctcagaagttatggtttagtaaacctgagagagtgtgggagaatttgtattgcactcccagatgatcctgaaactgtcattctgtgggcttatgtttattagcacttctttaaagcatagttcaagacctctgttttccaggatatttaactatcttagtccaaagtctttcctttcttccttgcctccttctctctctcctctttgtcttttcttcttctcttcctcccttctttctcccaccctcctctctctttcttctcatgaagtccatatgatatcctgtctgaattacataactttttttttctttttgtggagatggggtctcactatgctgcccaggctggtcttgaattcctaggctcaagcgatcctcccattgaagccttccaaagtgctgggattacagtcatgagccaccacatctggcctgaattagacaacttcttatttatgtggatctcagaagctccatcatccacttcttaagcctggtaaacacttttattagataagagagacagttttgcataaatgaacaaaaatctagatgaaaagttctcgaatcctgaatcacatcttgccataacctcttactagccgtgtgttcttggacatcttatggactggagtttccttgtctctaaaataattattccatttccttgtactgcagaagctcatgaaaaaggtcaaatgagatagcgggtgtataaagtgctacacaaatgcaatgatgctaatagtaaattattgttgatgttttctttgtttctgtacagttgactcatttgctttatcattaatgatgaggcatgaaagaaatgctgcttgtttttaatgaactatggaagactaggtggagctgacgggatgttgggatttcaggaaagctcttttaggtttctggaaatgatactcataccaatagttgtgagcttaggttgaagagcaatgttgtatttatactataatttttcttcaaataaactgtgataaagattttgaatattactttcatattctgaacttctcatgtacacttgaaaagagtcatgaaatagtagtagcggttgccatttataggggtcgtagggtgttgttatggttaaatttataaatccttaaaattatgatttctatcacaaaaatgcctaaaagggtgcattctctaggttttttccttctttcattcccttccttccctcccctccctccctccttcccctccctcccttccttccttccctctcctttcctttcttctcctttccttttccttttccctctcctctcctctcctctcctctcctctcctctcctcccctctcctctcctctcctctcctctcctttcatttttcctttcctttctctcgctctgttgctcaggctacagtgcagtggcacaatctcggctcactgcaacctccacctcccgggtccaagcgattctcatgcctcagcctcccaagtagctgggattacaggcgccctgccaccacaccaggataatttttgtatttttagtagagatggggttttgccatgttggccaggctggtctcgaactcctgacctcaaatgatttgcccattttggcttcccaaagtgttgggattacgggcgtgagccactgtgcctagcccctctaggttttcttaagaaaacctatctattcctcaagtgcttactctgcaaagcctaggtctgccaccaaggaataaaaatatggctaaatgtacttcctttcctcccagagttcactgttcaataggggacacaaacacataaataactagctcttgcaccaagcgaaatgtacagtgcgacaaaggagaggtacagatagtaggctgtgggcccgaaggagggtttccgtgggcgtgagtatgaaggaggggtttcctgaaggagggggtatttgaacaacccttttgaagactaaaaggatgtccgcaaatgaaatttagggtagaaacatgccagaaaaaggcacagtgttttcaatacgctaggcatttcttaaactatttatagctgaggttatgggaaaagagatagtagaaatatgagaatatcttctccaaagattctatgctaatatcctgatccatctgactatgcttatttgactgctttttgtgtttgtcttcttctttactggatatcctttttgccgcttcctttctggaattttctttcctggccattagcctctctctcctacaccgttgcctcactctcactgccatactcctttggacatcctccttctcttgtttcctaatacttttacatccccttccatcctttactccttagcttttgtttttatttgcagtgttaaagatagcctctttttatttccctgtagtgattagatcgacgtgtttacaatatgaacacacaggttttctcttcttcaggctctgagtcatcgagttcacaatgccatgtctagtcagtacttctatgtgtgtatagtgcccattgtggccgagtagagataaggtcactggggaagaaaataaatcgctaaaatctgttagaatacgtcagcttccaggtttgtctgaggatgcagtggaaaccacgttctgtggccagcatgtcagtagcttttgatgatcagagccttccattttgatactttaaaataatgtaatctaagttcacatcaactgaatccagacagtttcaccatccaccacattattaattccagatgggaaaattcattagggctcaaattttgtttgagacccaactgttttttaaattattattacaattattatctatttattttatttatttttttttttacaactgatgggaagggaaatttaacagctgtgtgattagcagggcatgaaattaaaaacgttttgcacagaatcaagaggttgtttactacagaatttgtcatctgagaattaagtgtcattaagactgcccacaggatgatctctttcaccattcaagctttgatttccacgcccggttttttgctaaaaggcctttaaccttttctggaaggaaaatgcatgtggatttatcacgaaggtaccatcagcatttcaaatgctaagtcaaggtaaaaacgacactcttgtctgtcacaaaataacagtacaactagatgttcagcctcactgctctcagcaaagagtgagttccaatttgaggaaatcaggtaaattagaaaaggctgcagctggattagtggcttcactctttccctctaaaactgtaggagtttcatatttccatcaaggcagctcaggtccctagagcatgatgtttacccttacattttcctgggtgtatgggctctttacgtctttggtctctttgcaaacgccctccttcgactgagctctagaaagtactctgtcctgggctgagcgcagtggctcaagcctgtaatcccagcactttgggaggccaaggcgggcagatcacgaggtcaggagttcaagaccagcctggccaacatggtgaaaccccgtctctactaaaaatacaaaaattagccaggcatgatggcgggctcctgtaatcccaactactagggaggctgaggcagaagaatcccttgatcctgggaggtagaggttgcagtgagttgagatggtgccactgcactccagcctggacgaaagagtgaaaactccctcccaaaaaaaaaaaaaaaaaaaaaaaatactatgtacttgttcctttgggcaagatgttggcagttttctgcagaagcgtggtcaagcacattagctggactgtcttggtcgaggtttgaaggcaatgccatttgcttgggcaagttacatggactctctgcagttcatttgcctcatcatcctccaacttaatgaaggtaatgacagtatctacctcaaggattactttggggattcagagttattaccaaaaatgtttaaggccctgcccgactcattgtttatgctcagttaatgttagctatctccatgcttttcagtcaatatattgcattgtgtttggaagtcttcatatctagtttcatacctgacacagacttgcttaacttctgccctggaatctttttgctatccctgtcttactgtctttaatagagcctttcttatttgatacttatttatatacttgccttcgttcgttttttagacaaattttattttcatatttgttgaattaaaccagacacagcttctacacttatggggtttcctttctgggagaatggggctggtgacaattaatgcagaaaacttttattggagatagacatgcaaaaacactcagagatagagttgaggaatttgtagtcattagaggagagagatgttagttttggctgggattggagttaaatggagagaaaataaaggaagactttctggaggaggagggttttgatctggaacctgcacgctcattagaatttgaattcgacctggcagaaaggggaaaagacttcccaggctgagtgaagttttggagctgcacattttattttatttttcatatttgtttcctgctgccctctggccaccattcagaccgtttggaggcctgttattgtaggtgggacctaagttccagcaccagtagatgtgtgagtgaggcttttatagtattgatgtcttgtatttaaaatgaacagaggaggaagccctggagtccattctaataaatgtatttcaaagggggctttcttcttttgtctgagtgagaggcaggaataggaatgacagaggcagcaagtgttggatgtctgtagaagaatcatagagttctctttagagcactaaacagagggctaataaagggctattgagtcctccttatgtttttttcctctctcagatgagttttaagggtaatagaagcgctttttttttttttctggtgacctcttaatcttacttttctctctttatctcttccttttcctagaagctaatattaaaaccactcttgtcctctgccattaaaaataaatctgggtaggtttcagcaagagagtatttcctagaatgcattatattctgggcagtagaagtgtatgtttaaatacttttcctgtagaaggtcattatgacaacagaggatgccaccagcaaccctgcagtatgtggtgaatgtgtttccacgctgtgtctgtctcgcctctgctctctgccatgtcaagctgattttaagtttaccgtcacttttagtatgtgacttgatgaggcaccataatgtgtgtgttgctggccaaacattacatgtcatgactgtagaatcatgagactggagttttagcctagaccttagaacacgtacctgcaagaggtagttattcgagcagcagtctttgtgagactggaattcaggcacagggaacacttgttcctaagttgctgccccgttgctcaaaacatcttggtaatgtctttctttctttcttttcttcttcttttttttttttttactctgttgaatgttatcttttattttgtttttattaaaaaatcaatttccagctttatcaggatataattgacgaaacaaaagttatgtatagttaaggtatacaacatattttgaggtacattgcattgtgaaatgattaccctagtcaagctaattaacataggcatcacctcacagttacctttctgtgtatgtggtgagaacgtttaagatttactctattagcaaatttcaagtgtacaatacagtattaactacagccaccgcactgtgtattaaatctccagaattattcatttggtatcactggatctccctttgaccaagaaccaagatctcctcattcccctggtcccggtagccatcattttgctctgcttctatgtgtttgacttttttaatttgcacatatcagtgaggtcacgcagtgtttgtttttctgtgcctggcttagttccttaagcaacatttcctccagattcatccatcttctcgtaaatgacaggatttccttctttgttaaggctgaataacattccacgtggtaatacaccgcattttctttattcactcttcaaatgatggacatttagatcgattccacatcctggctattgtgaataacgcagcagtgaacatgggagtgcaggtgtctccttgagacactgattttgccttagaggggattctggggctgggctccgtggtgaagggcactctctttccctcacctggaggttatgtcagcggtgtgctgggggttgtacaggtcatgttaagctgtccttcctgccttcctcaatgcgtcatttcttatttctatgttccacccaggtgctgcactctcgcctgaattccttaacgtgtgtgaggtattttggtgtgtggctagttgtttagaagtttctgagagggaatgagtgctggaaactctattttgtcatttgccaatgtaaccccacattggaattgtcttcagagataatgaagagccactgctaaaatcacagactcatgagatgtgaaagcggggaatctgtttagctcacatgcgtgtgagaaagctgagaccctgagacaaatattggcctgtgctgcaggctttcagttagacagggacagcatcagttctcattcccttgttagctctatgcctgatgtcttctcactgttttgctgcattataaagaattgattttttttttttttgagacagagtctcgctctgtcgcccaggctggagtgcagtggtgcgatctcgcctcactgcaagctccgcctcctgggttcaagtcattctcctgcctcagcctcccgaataggtgggactacaggcacccgccaccatgcccggctaattttttgtatttttagtagagacggggtttcaccatgttagccaggatggtctcgatctcctgacctcatgatccacccaccttggcctcccaaagtgctgggattacaggcgtgagccactgcacctggccagaaagttgattcttagttaagcctatgaatagttagaaaaaaaaaagagaagagagaaagttccccttagcatggcctattatcacagggtatgtttgtagcagagggagaacccagtccttatagagtgggttatggcttcttctacattccaagaaaatctcaagaagtagaaatcactctgagtgtcaaatattttagttgcctattgtcacatctattataaaatagatctggtatagataaaaatagagttaaacatactagttaatagatatatctggtgtggataaaaatagaatttagcatactagttaatatataaatatgatgtcgataaaaatagagttaaatgtacaagttcctaattggattgtagaacttaacattcaggagtaaggatgctgtcaagtctaaagctatgcccttatcctagtcagttgttatattcatggcagccttttctaaaatgtgctccatgaaatactagattcataaatggtcaaatcactgtgggactcttgctattatttccacccattgtggagattcttgatgcatccccaacaagtttaactctgagaagtcgaacaggcaaaagcaataagcacaactttcttttctcttatgttagattcaggttttgtccaatttattttataatggaaccattttgtggatgatttcccagacttgtgttctgtggaacattctttggatagcatgactttattgttaaaattcttaaggttcacatctgtcatcttataataatcttgtgtgaaatataaagtcatttgggctaaactgtagacctccatctgccctcccttccccacaggagaaattacaggtttatttaaggatcaaacagttttgaaatgaaatgttgttaggagggggaaataaaaacctttcagagcttaataattgtagaaagaagacagtgttataccggccaaaccaattttgtgaattagcactttaactcagagagttgttcctgaaaatagcttgtttttaagcaaaactttgttggcttctggtggtacactttttcaccatcaaaggcacaaatatgggtgattttaaactgtggcatactttttttgcattcaaaaccagggcttgtggaagaaacaacacccttttttaacttttcagaaacagttggcttgaccatcatggcttttttttttcccctatgtctttaggatattagcttttcgttaagctggaagggtcctcagagatcttgtccaagcccacccttgacagatgaagaaatagagggccagaaggctttagtaatctttccaagtctttttattagttactgacaaaatcagaactaaagtcaaggtctcttacttacctgtcatttacctgttcaatgcctcttttgtttgtacactctgttaaaaagaaagaggttaactgtttcttttggttataactgttatactacaaacacacacacactccacacacacacacacacacacacacacacacacacacagagagagagagagagagagagagagagaacagatgaaagccatgattaggaacattttatgctcaaggtgagaagaccctctataggacctcgaatgtcttcttttctaaagaacttcatctacctcgggtcagtcctttgatactattcactttgaaaactggtttacctgaaaggaagaggtgtgtgtgaaagagagggtcacccgccacattttatctctctgtcttatttcaggcagacagattcactacatcaagatggtgtttacagttatcgccatgagatgaactagctcatctccaagtgcttaagggatattgcctggttataaatcatcatgtgattctctctcctcccacccccatttacagcttctttcttctttctccactgcccatgtctaaacctggggaactatctcactgcatagacagaaaaggaaggtcagatccaaggtagatctttctttctgctaggtttaacctagtgatagcaacaaaaacagttcttatgcctctgagtttcttgttttaggcagaagcatttgataggttggggatcacaggaaagtttttttttttttaaattctccattaagaagatgctaatgtacttgtgaaggcaagtacattaagcttagtaatggaagatatgggttctaagctgcacctctctgccaactagtagtgagatcctggggaaatcaaacaatcgtttggaaccacatgtggcctagtcttttcattatgacttcaggagtcataattcttgtcttgtcaacctcctggggttgttgtgaggattaagtgagataatagatatgaaaaggcttgtaaactacaaagcatctcatacatatgtgtaaggcattgttattatcaataataatagcaaccacacactgctgcctttgagctaggtactgttttaagtgctttccgtcgataagctcacttaattctgacagcaactctagtgtaccaatgaccagtgctgggcgctgtgaatcagcaggactggcagctcaccctgattagctggtgatttcctgtgttcttgggcatgtcctttcccttccctaggcctgaattttactctttgtaaaagaatcacagactcaggttggatggaaggattcttctgttctgtcatttgtgattttgtcaggcagtcattggccccacaggctaagtcactgattatttctatttatttatttatctgagacagagtctctctctgttgcccaggctggagtgcagtggcaggatctcggctcactgcaacctccaccttccggattcaagcagttctctgcctcagcctcccgagtagctgggattacaggtgcctaccaccacacccagctaatttttgtatttttagtagagacggggttttaccgtcttggtatgactggtcttgaactcctgacctcttgattcacctgcctcggcctcccaaagtgttgggattacaggcgtgagtcaccacacctggccagtcactaattattaatcacagcccacatttaactgagtacagtcattagtttcattctacagctatacagagagctcatgtaaattcctgaaggctgcaccgcctacaagtggtggggctggagttcgcacgttgctcttgtgccctggagtgatggcagcaagatagatgtgggtaactctctagcgatcccaggtgtgttatgttgtcagcatcctcatctaatcaacatgatgattatcattgagccttttaggttttcagttgttgttatcatttaactcctcaattagattccgagcatctcgatggtaggttttctgtactgcaatgtgtattgccagtgttttatgcaagatatgatgcaggctagtgtctcacagtttacgcaatttgttttccgtccatcctttcgatcctttgagcctctcaaggaagcctgggttggcatctgcccaactgtgttgggcagaatggtttttttctcgttgcccgacatggggctgggaaagccatttgaggaggtcgctgtggcatgaatctggacaagtctttctataggggaaacctgtttcaagctgtggctctttcactttctacatggcatatggaccctgatttttctcacgcctgcgtaactctactggtgtctcttggctgtcgcagctttgttttgctttgccattgttttattttattttttctgaagacttggttttcttgggctctgcttatatacaacacaaaatttgtagaccatttgcttatgggaaagagtcacacccacggaaattgggagaaaattaactcttggagcccaaagaaactgacataaatcttataccacgaacatcttcaatttccgactttgccttccttctctgtatggtgctgtaccaagatctcttattgggaccaggtttcatggagggttactggtaactattaacccactcaatgtacttattttaccattaacctatcatgaatagcctgtccaatccccattaaatgacccactatgggggtcattaattcatttatttatatatgaattatctacattcatttatatatgaattattagatattatctacactgaaccaggcaaaattggggataccaaaatgaattagacacagttcctgctttcaaaaacctcatactctgaagagggggagatttgttaattctgtcaagtcatctttgatgcctaccatgaccaggtatcagacatgccactggaactgtggacatctggcaggtacaagcctattcatcacagggtttcaggtctagggaagaaaaacatcatattaataattttacaaataattatgtagttatagttgtgataggtgccacagaggaaagactgagtggtgggaaaatatatatatatatatatatatatattttttttttttttnnnnnnnnnnnnnnnnnnnnnnnnnnnnnnnnnnnnnnnnnnnnnnnnnnnnnnnnnnnnnnnnnnnnnnnnnnnnnnnnnnnnnnnnnnnnnnnnnnnnnnnnnnnnnnnnnnnnnnnnnnnnnnnnnnnnnnnnnnnnnnnnnnnnnnnnnnnnnnnnnnnnnnnnnnnnnnnnnnnnnnnnnnnnnnnnnnnnnnnnnnnnnnnnnnnnnnnnnnnnnnnnnnnnnnnnnnnnnnnnnnnnnnnnnnnnnnnnnnnnnnnnnnnnnnnnnnnnnnnnnnnnnnnnnnnnnnnnnnnnnnnnnnnnnnnnnnnnnnnnnnnnnnnnnnnnnnnnnnnnnnnnnnnnnnnnnnnnnnnnnnnnnnnnnnnnnnnnnnnnnnnnnnnnnnnnnnnnnnnnnnnnnnnnnnnnnnnnnnnnnnnnnnnnnnnnnnnnnnnnnnnnnnnnnnnnnnnnnnnnnnnnnnnnnnnnnnnnnnnnnnnnnnnnnnnnnnnnnnnnnnnnnnnnnnnnnnnnnnnnnnnnnnnnnnnnnnnnnnnnnnnnnnnnnnnnnnnnnnnnnnnnnnnnnnnnnnnnnnnnnnnnnnnnnnnnnnnnnnnnnnnnnnnnnnnnnnnnnnnnnnnnnnnnnnnnnnnnnnnnnnnnnnnnnnnnnnnnnnnnnnnnnnnnnnnnnnnnnnnnnnnnnnnnnnnnnnnnnnnnnnnnnnnnnnnnnnnnnnnnnnnnnnnnnnnnnnnnnnnnnnnnnnnnnnnnnnnnnnnnnnnnnnnnnnnnnnnnnnnnnnnnnnnnnnnnnnnnnnnnnnnnnnnnnnnnnnnnnnnnnnnnnnnnnnnnnnnnnnnnnnnnnnnnnnnnnnnnnnnnnnnnnnnnnnnnnnnnnnnnnnnnnnnnnnnnnnnnnnnnnnnnnnnnnnnnnnnnnnnnnnnnnnnnnnnnnnnnnnnnnnnnnnnnnnnnnnnnnnnnnnnnnnnnnnnnnnnnnnnnnnnnnnnnnnnnnnnnnnnnnnnnnnnnnnnnnnnnnnnnnnnnnnnnnnnnnnnnnnnnnnnnnnnnnnnnnnnnnnnnnnnnnnnnnnnnnnnnnnnnnnnnnnnnnnnnnnnnnnnnnnnnnnnnnnnnnnnnnnnnnnnnnnnnnnnnnnnnnnnnnnnnnnnnnnnnnnnaagttcattgtagattctggatattagccctttgtcagatgaagtaggttgcaaaaattttctcccattctgtaggttgcctgttcactctgaatggtagtttcttttgctgtgcagaagctctttagtttatttagatcccatttgtcaattatggcttttgttgccattgcttttggtgttttagacatgaagtccttgcccatgcctatgtcctgaatggtattgcctaggttttcttctagggtttttatggttttaggtctaacgtttaagtctttaatccatcttgaattaatttttgtataaggtgtaaggaagggatccaatttcagctttctatatatggctggccagttttcccagcaccatttattaaatagggaatcctttccccattatttgtttttgtcaggtttgtcaaagatcagatagttgtagatatgcggcattatttctgagggctctgttctgttccattggcctatatctctgttttggtacccgtaccatgctgctttggttactgtaaccttgtagtatagtttgaagtcaggtagcgtgatgcctctggctttgttcttttggcttaggattgacttggcgatgcaggctgttttttggttccagatgaactttaaagtagttttttccaattctgtgaagaaagtcattggtagcttgatggggatggcattgaatctataaattacctttggcagtatggccattttcatgatattgattcttcctacccgtgagcatggaatgttcttccatttgtttgtatcctcttttatttcattgagcagtggtttgtagttctccttgaagaggtccttcacatcccttgtaagttggattcctaggtattttattctctttgaagcaattgtgaacgggagttcactcatgatttggctctctgtttgtctgttattggtgtataagaatgcttgtgatttttgtacaatgattttgtatcctgagactgctgaagttgcttatcagcttgaggagattttgggctgagatgatggggttttctagatatacaatcatgtcatctgcaaacagggccaatttgacttccttttttcctaatttaataccctttatttccttctcctgcctgattgccctggccagaacttccaacactacgttgaataggagtggggagagagggcatccctgtcttgtgcccattttcaaagggaatgcttccagtttttgcccattcagtatgatattggctgtgggtttgtcatagatagctcttattattttgagatacgtcccatcaatacctaatttattgagagtttttagcatgaagcgttgttgaattttgtcaaaggccttttctgcatctattgagataatcatgtggtttttgtctttggttctgtttatatgctggattacatttattgatttgtgtatgttgaaccagccttgcatcccagggatgaaacccacttgatcatggtggataagcttcttgacgtgctgctggattcggtttgccagtattttattgaggatttttgcatcaatgttcatcaaggatattggtctaaaattctcttttttggttgtgtctctgccaggctttggtatcaggatgatgctggcctcataaaatgagttagggaggattccctctatttctgttgattgcaatagtttcagaaggaatggtaccagctcctctttgcacctctggtagaattcggctgtgaatccatctggtcctgaactttttttggtcagtaagctattgattattgcctcaatttcagagcctgttattggtctgttcagagattcagcttcttccttgtttaggcttgggaggatgtatgtgtcgaggaatttatccatttattctagattttctagtttattttagaagaggtgtttgtagtactctcctgatggtagtttgtatttctgtgggattggtggtgatatcccctttatcattttttattgcgtctatttgattcttctcttttcttctttattagtcttgctagtggtctatcggttttgtttatcttttaaaaaaaccagctcctggattcattaattttttgaagggtttttttgtgtctctatttccttcattctgctctgatcttagttatttcttgccttctgctagcttttgaatgtgtttgctcttgcttttctagttcttttaattgtgatgttagggtgtcaattttagatctttcctgcttctcttgtgggcatttagtgctataaatttccctctacacactgctttgaatgtgtcccagagattctggtatgttgtgtctttgttctcgttcgtttcaaagaacatctttatttctgccttcatttcattatttacccagtagtcattcaggagcaggttgttcagttttcacgtagttgagctgttttgagtgagtttcttaatcctgaattctagtttgattgcactgtggtctgagagacagtttgttataatttctgttcttttacatttgctgaggagtgctttacttccaactatgtggtcaatgttggagtaggtgtggtgtggtcctgaaaaaaatgtgtattctgtcgatttggggtggagagttctgtagatgtctattaggtccgcttggtgcagagctgagttcaattcctgggtatccttgttaactttctgtctcgttgatctgtctaatgttgacagtggggtgttaaagtctcccattattattgtgtgggagtctaagtctctttgtaggtcactaaggacttgctttatgaatctgggtgctcctatattgggtgcatatatatttaggatagttagctcttcttgttgaattgatccctttacaattatgtaatggccttctttgtctcttttgatcgttgttggtttaaagtctgttttatcagagactaggattgcaacccctgccttttgttgttttccatttgcttgatagatcttcctccatgcctttattttgagcctatgtgtgtctctgcacgtgagatgggtttcctgaatacagcacactgatgggtcttgactctttatccaatttgccagtctgtgtcttttagttggagcatttagtccatttacatttaagtttaatattgttatgtgtgaattcgatcctgtcattatgatgttagctggttattttgctcgctagttgatgcagtttcttcctagccttgatggtctttacaatttggcatgtttttgcagtggctggtactggttgttcctttccaggtttagtgctttcttcaggagctcttgtaaggcaggcctggtagtgacaaaatctctcagcatttgcttgtctgtaaagtattttatttctccttcacttatgaagcttagtttggctggatatgaaattctgggttgaaaattcttttctttaagaatgttgaatattggtccccgctctcttctggcttgtagagtttctgccgtgagatctgctgttagtctgatgtgcttccctttgtgggtaacctgacctttctctctggctgcccttaacattttttccttcatttcaactttggtgaatctgacaaatatatgtcttggagttgctcttctcgaggagtatctttgtggcattctctgtatttcctgaatttgaatgttggcctgccttgctagattggggaagttcttctggataatatcctgccgagtgttttccaacttggtttcattctccccgtcactttcaggtacaccaatcagacgtagatttggtcctttcacatagtcccatatttcttggaggctttgttcatttctttttattcctttttctctgaacttctcttctcacttcatttcattcattttgtcgtccatcacttataccctttcttccagttgatcgcatcagctactgaggcttctgcattcgtcacgtagctcttgtgccttggttttcagctccatcaggtcctttaaggacttctctgcattggttattctagttatccattcgtctaattttttttcaaagcttttaacttctttgccattggtttgaatttcctcctgtagcttggagtagtttgatcatctgaagccttcttctctcaacttgtcaaagtcattctccgtccagctttattccattgctggtgaggagctgtgttcctttggaggaggagtggcgctctgatttttagagtttccagtttttctgctctgtttttttcccatctttgtggttttatgtacctttggtctttgatgatggtgacatacaggtgggtttttggtgtggatgtcctgtctgtttgttagttttccttctaacagacaggaccctcagctgcaggtctgttggagtttgctagaggtacactccagtccctgtttgtctaagtatcagcagcggtggctgcagaacagcggatattggtgaaccgcaaatgctgctgcccgatcgttcctctggaagttttgtctcagaggagtacccggccgtgtgaggtgtccgtctgcccctactggggggtgcctcccagttaggctacttgcgggtcagggacccacttgaggaggcagtctgcccattctcagatctcaagctgcatgctgggagaacctctactctcttcaaagctgtcagagagggacatgtaagtctgcagaggttactgctgtctttttgtttgtctgtgccctgcccccagaggtggagcctacagaggcaggcaggcctccttgagctgtggtgggctccaccgagttcgagcttcctggccgctttgtttacctaatcaaacaactaactgggcaatggcaggcgcccctcccccagcctcactgccgccttgttgtttgatctcggaccgctgtgctagcaatgagtgagactccatgggcttaggaccctccgagccaggtgggggatataatctcctgatgtgccatttttaaagcccattggaaaagctcagtattagggtgggagtgacctgattttccaggtgccgtctgtcatccctttctttgactaggaaagggaattccctgaccccttgcaattcctgggtgaggtgatgcctcaccctgcttcggctcgtgcacggtgcactgcacccactctgctgcacctactctctggcactccccagtgagatgaacccggtacctcagttggaaatgcagaaatcacccatcttctgcgtcgctccctctgggagctgtagactggaggtgttcctattcggccatcttggctcctcctccctatgttccagacatatcattttcattccacatgtatttctttgtttattgagtgccttccatgtgttaattactttattggattcctgggggtgagaaggggaagggtgtgggcagggccactgcttacagctgctcaagttgtgccttgcttgagggcaggagcgcaagtggggctgaagtcctgccctccccactagccaggccaagataaggaccattttctttctttttttttttcttcctaatttgcacaaaagatactaatgattaacagagatcctggtatggaaacataagacacaagtttggttttgtctgaaagcactggtagtttagttggtgaggcagccacaaaactaaccaaaagtaattatattgccagccacaatgaaatatattaaccagagatacaaatgacattctgagggggcttggtggaagtagtttaaccctgatagggtggggagaatcaattcttacaactttcgaagagactagttggatgggcaagttttcttaatagctttattgagacataatttaattaattaactcaaagagtagaattcagtaatttttaatatattcatagagttacacagccgtcaccaagatcaattttagaatatgtccctcaccaaaaaacaaacaaacaaaaccaaaacaacaacaacaacaaaaacacatagtggtcgtttcttatttctcccaaatctcttgcatccggtactaagcaaccacgaatctactttataatctgtgaagttgcccattctggacattttatataaatgtccatacatttatataaacatcatacaacatcatacaatatgtagtcttttgttactttgtttctttcagttaggttttcaagattcatctatgttgcagcatgataagtaggcttttgattggtgaagaatagaagcaagtttaccccaaaatgatgcattagggagagctaagagattaacctttgtaagaaaccacggtctgtgtttgaaaggttgaaagtagactattgggtctgctgactagggcctgtagggaatgttacaggaattgaagttagaaatataagttgggagcagatcatggagattatgaatgcttggactttttctgagatgcagatgtttttgagaggggaatgatatgactagagatgtgtatttttctcccccataatgagaaaaattgatgaagctgtaaggtcccccaggttggtagtggagaaccaggtgtgaaatcatgaacaactccctcccaagtacttttccctcatattccactgcctcttactttttatgtttgttagctggagcaagtagaaaaagcacagatgatttgttttctgttataattattttttaaactactagaggcatggtggaaaattaaactcgatagattatagttataaatgttgttctttgggcacttgccatgaggcagcattttcatggcaaaccctactttgtatatttttgtcatattatgagaaagaggccctcttctgggtcacatgtttgcctctgcaggactctgacctgtcattttagatattgagtctatccttgttttgatttcctttggactcatggccttgagtatgtcccttatgttcatttgacagattcctgccaatcaaatggaagacaaagctatcccgagggtagttggcctgtgtttgcatctcttgtagccaagagaaatccctcattgcttgtttctgagctactcatgtcacagacttttgcaagaggaaggatttttgagattacatggttcaaatgttattaaattaaggtttagtggtccatgaacctcctgaaattgtttgcaaaattatctttaattgtgtggaggtgtatttttctcccccataaaattctcagatggattgcatccctgtaagggggaagaatcatttatccaccaacaatattgaacttttattgagtatttacactatgccttgtagaagacttgtgttatctcattcagtctttacagcccattctcatggattaggaaactgaatcatacagtagttaagttgacttgcccaaggtcacagagctagtaggtgacagaacctagattcagaccctggactctaaccccagagcctatgtcttcatccttctgcattttcaaccttcatgcctgctttgcactattctagtttaccttttataggctctggagttgatggagtctcctttaataaatgggtagtggaggcccagagagaagtgaaacatgtctaagatggtcctgtgattaaagacacatagctgttaacgtgtgacacgaatgcaaacaccaaagtcagattatgaggctttaacacataatttctaaatttaatttaaaatgctcctttttgacctttacttctgctattgattttcatcttttctcttttctccttcttaccccttctcttctttcctcttctgctctcctttcttcctgcttttcctttctttcttcagcaaccattactgagcatttaccttattggaattattggattaggtggaattattggtaattgtgtgttttcatgttactaaaatggactgtccagctcttctgtggccaacatctctttactctagaaggttctcaaaggagttaccacacatgaaagaaggttggggaaagcaaagtacccgaagccagtgctttacactggtacacaggagtaggtacccactttccgattcgggggactggattgtgtcattcattgaaatatgaaatagtgaaggaagcttcacttttatatcggttgggggtagcgtgagagttgtttgagcttttcacttttgagagcttttcaaatgaatcgccttatagttaaagctggagattagaagaaagatcaagactaggaaactctttatttaaatgtcaatatttaattgacaattaactgttgttgatttaaattaaatatatatatatgtatagagtcttgctctattgcccatgttccagactcaagctatcctctcacctcagcctccagagtagctctgactacaggtgtgacccgatacacccagctatttttttttttttagattttgtagagacaggggtcttgctatgttgctcaggctggtctccaattcctgagctcaagtgatcctcctgcctcagcctcccagtgtggtgggattacaggcataagccatcatgttcagccagggaatgtttgaagatagagaaaaaagccctgctttctccattccttctacggtttggcacccagttcatatcccatttgcccagatgctcccttttaatctttcctaatgcaggccatagacattggtctcagaattcttgtaagtctacttttgtcactcaattgtgtgaattgtgtgtttgtacaggtctcctgcatttactaaatatagtggaaatcatatttgcctagagatcagtagacctgtgcattgaatctaggctttgttatttgctatttgtgtgattcattgattgattttctttcagcatcaaattctaagttaataaaatgagattaataataatgtctaccctgtctctctcacagaattggtggtcactttttaactgtgaataatggatgtgatggctctttaaaaagagccttttaaaacaaaatgaatacttttttctacatttacatgtgtaattatgatgtttgtttgttttttcccactctctgggttaactctaaactcctttggattttaaacgcctttggacacttttctttttaaccctccttcatacctaagacagtgctatgtatattgacatttaaatgtacagggctaattatggtttcgtttcttcacttttttgttgttgttgttgttccttttgttacacatttattttgaagattttgttttcctggaaattagtgggatgttaacgtctccttaaagaactcattctttgtctttcctggttccccctcttatcctctgtaacctgtgacctcctcccaccatctgaggtggatgtctcctgaagttcttactctgtcccagcaatgatgaccttagtgtgtctactgactcttaaaacccgtagggacataggatccaactgcctcatagaaaagtaaggccgagagagggttactcctatatttggttcaagtcaatctgggtgctggtttataaacaatgcctattcagtgctctgcactaaggcatactggtgttatgcttctatttttgcctttattatttttaaagttttttggatgaaattactgacgttgatcacatattaaaaatttatgaggattctatttttgggttccattctatttaattctagctgaaatttgcttctcttttttatcctgttatggtacatttgttcctagacataatcaggaatgacaccagacacagactatattttggtgtgtattagtgagaaaatttagtatgtttcttttgtcatgttgaatgtagacactatggacaatgtttaattaattttaattgatttttgttgttgttattatctttctcaatttcctctgctttcttcttacttccttagcatggtatgccacagatagggacacatttcatctgaaagatgtatactatatatggatgtctttgcagtttcttcagtccttttaattacataaaaatcttaataatattaaaacaacaattatgtaaattttcaaaagaatttcaaaagcaatgaagaagaccactgttcagaacctcaatttctgaacctctccttacttttccttcttccttttcagccagtccttgctcaactctgaatatattttgacaatgtttcaattataatatatgcagaataatttacttctttcacttaacattatttttaaatgtcaatgttgctacatattccaaattactttggaattcattatatattattattcttttatttccactagatttatacttaagacagaatctcaagagtgggatatttgggtcaagtagcatttacattttggctcttgaaataactaccagcatgtcatttccaaagagacgttaatcattgacaccaccagcagcaaatgttctcattcatcagaccacatttgttttacacgttcctctccttagaaagagataagtatggtttcttttctttagttcttgctaataggatacccaacatattcaaaatggtactccattgttttaattctcatcctctctgaccattagaaatattttgctccatgtgtctttgacgaagtttatgtattgttttatgaagtgtaaattcttgcccttgcccatttgatctattgagtttatgccttctttctttatttgggatccaaaatatttattaactctctgcctgacctatttgttccaaacattttttccaagtctgtttgcctttttagttatggtattgtatgtttgtgcatgtgtgtgtgtgtgtgtgtgtgtgtgtgtgtgtatagatctacatacatgtgtacacaccatatatatatggcttataatggggacagaatcacttagcagatgggcaaccctgatgatccaggtatttacgaagggactcaaaccatcttcagttgtctaggtattcagaagaaaaaaattcagaaggctgggcgcagtggctcacgcctgtaatcccagcactttgggaggctgaggcgggcagatcatgaggtcaggagattgagagcatcctggccaacatggtgaaaccccgcctctactaaaaaatcaaaaatcagccaggcatggtggcacatgcctgtaatcccagttacttgggaggctgaggcaggagaatcgcttgaaccacgaagtcggaggttgcagtgagctgagattgcgtcactgcactccagcctggtgacagagcgagactttgtctaaaaaaatttcagaagtcccggagtcctttccatgatgcatttgaagggccagagagatagaggcatgccctatgtagtacatcttgctgctgtccctcgtgtgtttactctatgggtcaaatgagatggtgttggagcaatcaaaggatacagaccagtacccagcctttcttgtcaagactttgcctctccttgggatgttcacacacacctacccctattttctttagggatctagttgcttacttattttagacagtacatcctttatggccttgctgaaatgtaactccttgatggaatctcctctggtttctttctatctgtccacctcaattgagaactgatttccttcccctgaacccctcaccttcccatagtgctttagctgtagcttctttattcaatgtttcactttttactttggaccagagatatttatgaactttacaaaatctcttttaaggcagatatttcagttctctttgcattaacacaggacttgttggatgattgagtaagcgtgtgggggggtgtgaagagagggttcatttgttccttcctcgtgacagagctgagaggggaagggcccttgctggtggtggatgggccctgagggttaattgggctgagtgtggccacaaagcagaaagacttgctgtgctttctgaacttacgtaagttacaaacactattaaaatgtcacaaacaaataagagaatgaggactgtacttaggttccatacttgtggtatggaaagctatctaaaataaaattagctacatatctctgcagatttctctgattcactctacaaagaagcaagtgtttaatctaattctgcaaatatttgagactctttaccaggcgttgtggaacatgctttatgactggaaaagatgataaaggcatagtttctgccctaaggagctgtttgtgcatctgttggaggatatagatattttaacaggaagattctaacactaggtaggctgggtcctttgtgataaagtctgcattagaaatatgtgagaagaaaagattaacctgagtgcggtctctcatgaagttgctagtatactcttctttctttatgcatttaaccccaaaattatctctactgagatgattcttcttttgtatgtcaaattttacttggcttctccctcaccctgactcctagtcccaccattttaattttatcatgatttgaataatatcacaagggaatgaagaatttattctttttttcaataggtgaacaaaaaaaagtatgagaaatgattgatgtgtatttcaacattgagaaaacccaaggaattaggaagaaagttctctggcatatcaggaaataggaaatgatctcaccaattgctagaagtggttgctcagtctcttggaaagtgcaccttcagtagatagcacttaagtcatagcatgcacgcacacacacacacacacacacacacacacacacacacacacataatctctctgccttattagccatttattctctactgtctttcagtagatgatttcttttaccttgttcctttctaaatattacctccactgggacctaattacaacccctcaaaattcacattacattggaatagatgtgagctcccaatgttatctttaggcattacagaatattagaaactgactgtggttatccattgtgtatgcaggtatataaacctcttttgcccaaatcgttgtcagactgcagtgagaaaagtcaaggaaatatttcttactagcttctgaatgttgtatgaattttccccgaagaatgataataatgcaagctgagactttttatattctaaagtaaacatccaaagccagttttccccttctattaaatgaacctttaactgagctctgaaattgtgaggaaggacatactttgatgcccattattctgttcaatagccatattcagaagagaagtttaattcaaactccagcccatcaaagcattttgcagggttttcaaagcagttattgtaatagagagtaattaaatattactgttttcaactgcttatttataatgtacgaagacattataatgaccccaaagttggtttgcctttagaaaaataaggatacaaaatgctgtgtagaaaagaatatgctatcttaagtctagagagctgggttctagtcccatttctgcttgtgacttagtctgtggccttaggaaaaggcttttcttatcgttgagtctcattttcctgcctttaatgacaaagaaattacaaaccttatatctgtaaggcacttaataatttgtcccctcttcttaaacttgtacaagtgaagttacaacattctatcaagttcagaacatgtagactgtaaaattttacacctacagaacatgtaggtgtaaaatagagtcacccataaatctattacccagatacaggtacaatctatcatgatcatatttatgtattcctttcaagtctttagctattagcataaattacccatcatgctgtgtatctcttgacatcatacattaagcattttccatatcactgcatattcttgaatgattacaattttaataactttaatatttcattgagtgattgtgccatatcttaattgtttcattatttgaaaattttgcgatgattaacatttatgcataaatgtagcttacttcttcaataatcttatatatgatgtctgagggttgagacacacgggtcagaggttaattttttttttttttttgaggcagagtctcaccctgtcgcccatgctggagtgcagtggcatgatctcagctcactgcaacctccgcctcctgggttcaagcaattttcttgtgccagcctcccgagtagctgggattacaggtgtgcgccaccacacccggctaatttttgtatttttattagagacagggtttcatcatgttgataaggctggtcttgaactcctgatctggtaattcacctgccttggcctcccaaagtgctgggattacaggcatgagccaccctgcccggcccagaggtgaatatttttatggttatttctatctattgatgacttgttttgtgaaagggattttttttttttttagctttagtaggaatgtgtgagtgagtcagcatctcccctatcatgctagtattaaatatgttgtttttttggtattagcatttctctggttatttgtaaatttagatatgtttccacatgcctcatttccagttatttttttttattgcctttgaagatgagtactttccaatctttaggatcccattcacagcaaatcaaagaggaaacattttagtgagaattgtgcaattgtgcatgtcttataaaaggttctagaacattttttactcacatgaaggactgtttgaataagttgagacatgccttattcctaaatggaaacatagaggttgttaagtagttgttttccctacatttcgtgcaatcacagttagtacaactctcaggtcaattattcttgaattttaaccaaaaaattctaaattgtcttgacaataaacaggcaaaataggtaaaagaaatctgcaaaataagtgtaatgagcaactgggaccatcctagccagatgctgaggtgcatttataaggcaactctgattgaaggaggaggtggtgctggaatagatgggaggtcaaagcagtaacagaacccacccagacataaggcaactgcacgtggaattaattggcaataaaagaaccaccttgctacattccgaaaaggaaggattattctcatggcattgggataattggtcagcgttaatgaaaaacttacatcatgagtatgtttcacaataaaccctgatataaattagtggtcatgttaaaaaataaaacttgcaaaagtcttcaggcaaagaagaaatttgttatatctgtagtaactgaaagcagtaacttttaagtttacacctgaggtcctcaaactttttctgtaaagggccaagtagtaaatattttaggctttgtaggccagatggtctctgtcacaggtcctcaactctttgtgctgcaaaagcatcaatagacaatatgtaatatgtctcatatataaacaaatagagaatatgtaggtttataggaagagtcataatattgtgaatgttaatttcctgacaaatcgtgtcccatggtgaattttatgaatctttcatttttttggcaaactgtttgaaaaagcatttcatggctattttaatttatatttccctgattattatttaagttgtgtgtgtgtatgtatgtgtgtgcgtatgtgtgtgtgtgtgtttggtatatttgtgtgccactgatgtctctttttatgtgaattataggtagagttaatttatctcacttatttcacctctctgtcacctgatgtcccaataccctggagagctttgtgatatctacaccccagtacagactaataggtcactggtttgcttcagaactagaacttctcctgtgcctttgtgcccaagggcctgggacttgacttttggctcagttctacttgtctgctaacctgaccgcttgacagtggattgaggatggagggcactgagcagttttggctgtgcttgacctcctgcttagtttccctccatggtctcttagaaatctgagactgggcgtggtggctcacgtctgtaatcccagcactttgggaggccaaggtgggtggatcacctgaggtcaggagttcgagaccagcctggccaatgtggcgaaacgccatctgtactaaaaatactaaagttagccaggtgtggtggcaggagcctataatcctggctactcaggaggctgaggcaggagaatcacttgaacccgggaggcagaggttgcagtgagccaagattgtgccactgtactctagtctgggcaacagagtgggactccgtctcaaaaaaaaaaaaaaaaaaaaaatgggactccgtctcaaaaaaaaaaagaaaagaaaaaaagaaagaaatctgggtgagttgttgcctgaatcttgtctgaacctgcctatcccctctgggtcctgaaatctaactgtgggtgagatctgcctttgcatttctgttcatccaggtgagcaaacctggagtttggcctcactctgtccaattgtgttccttccaagagataaaactgagaaagtggtaaagtcacttgcataagccactttcagatccatagaggacccacagcatgagattctgactgttattattacagaggtagaagcgtcattttcttggagctgtgtctccgtgtctttggtgtgccacagtcacaggcctgctcctgcccctccctgcaatctttccattgttgtgtgtggtacaggaactgagacaattatgacagagccgagctggtttctcttctcttttggacatcattgtttgtcacaattctgatcaccatttcttcctctagatcacaaaattgtaaaatcactgctatatttacattttcttttgctgcctgggctttaaaaagtactatttatagctttcctttgaaattcctttattaatagtcttccttcacatgtatatcactctgctatttacaaaatgctcttacgtttagtatttcacttgatcagcataaacacccatgggataagctaggcaggattgttgtctccattttacaggtgaggaaattaaggctcagtgaggcctggaaggccctggcctgcagccactgctggaccgggtgccagaactgggtttagacgtcttactagatctctcttgctgtttttctttccgtctacaaaaactccttctcatttatgagtttcaaagattttcttgtctgacacataaggaaattagtggcttttcttgagagatctaagcattactgcatttgcctaatatttcttttactatacctattggtctgagtactttaagagaaaccagtgtctgtaaataatcttccttcttgtcagacatggaggcagaaattttccaagaagagagagaccctgaagacactgtttgttctctgctgttcttaacaagtactgcaaccacaattttggatttttctcctcgaggctttctagttgtaggctgccacagaatacttcggggtcacagattcctattcccttttaaactgtatcgggcatgtgtgttatgtgacctttgtgttctgaccttcagatttagggaactgaagatttaggaagtcttgttaggacttaaatccaagtaaattccctcatgagtacaaagactcatctgtggaggtgtggaatgttggagagaaagggactttcattcatctagccccctgggttagaaaacagggctggtgagtgatagagctgaggctagcatgcggagatcagactagattcggctttctgctggcttcctccatatcactcagtacttctggagttgtagcatgcctcttccccctggactgggagctttgagagggacggcactgggtgtgctctgtgcacggctcttctagaggtgatccaagtgctttgcataggcactcaggatttatttgcttgatgaatttgaacctgtctgttgttgataaaatatcattattgcccataaggatcttgagggagtttgtaaggatcttgagggagtttcagtcaggattcactataggaaacaaaccactttagatattttaagtggaaggtacttaatacagggtgtttcacagaagtaattagatggactgcatggagcagaatcgaggctgtctccagaaatgaatcacaaaactgcacaaaattattccattttctacaatcaagcaagacaaaaatggtgaagccaccatgggaattactgagttcagtgatacatcacaaaacttgtgaaacagagatcaaaagccatagtcagaatgatggtagctggacactgagacatgagtccagctacttactctttttgtcacggctgctttttgacagccaccaagctgaagactcaatatgagaacacagatgctgaaaaaccccatgtctgtgtcaccattcttctaacagaaaacagggcaaacagcagaaacatgtcttccatcttacttttgcctttcaaatatcaagccaattacatatattttggtagaatttcttttgcaatcaaaccttacctgcaagacagcctgtgcaatatgggaagtttgagtgtcgatctaccatatccaccacattaagggtgatggttttcatatttcgggcatgtcttccataaggctttgtgtgtagtagatattaagttggaaccagagtaacaattacgttctattacatctctacttgtcagtgtagttaattatataacagaatggactgcaacagttttactttagggaatccctaagggggaattcctatttatcagaaaaatgctgtaaggagggaagaccctgaggtgggagagtattctaaactgttttggtttcaaacatcttggaaagtactacatggagacatgcgatattataacatatcagtgcttaccatgtctggggggagttctgtcttaaaaaagcttgcctaccttctatgctgttgctccctcgctgcactgttttgaccccactttcctcctcaccagccaaatacaagttttgcaatgagaattaatgtaaaatggtttctttataacaaactaaataggcttattcttaaaaggaaacatagaggttgttaaaccgttgttttccctacatttcatgcaatcacagtacaactcacaggtcagttattcttgaattttaaccaaaaatttctaaattgtcttgacaataaacaggcaaaataggtaaaagaaatttccaaaacaagcagaatgagcaactgggaccatcctggccagatactgaggtgcatttataaggcaaccttgattgaaaaaggaggtggtcctggaatagatgggaggccactgcagtaacaaaacccacccagacacaaggcaactgcacgtggaattaataggccataaaagaaccaccttgaaacattccgaaatgttgagccttcactgaattcttctgacttttccctcaactctgtgtaaccccaatttagaaatgtgaaatagttgttagtaatcccttccacctttacattgtaccctagtgagtgcatttggatgtattttagacacattttttttttcctgctccaaattaagaatcaggcaacatattgtccttctagtacttgtaaccaagtatatattataaaatcactgataatctcgtatgtgtggggtcaggtgttaaagatataattgaagtaaacactcttgatttatttttatttttattttaagaaaaagtgacatttttgcttcaggagaaagaggctgagtgaataggttagttgataatagtttctgctaggtttctgctatatcttgcttttctcccgaagattcattttagtaccttctttccttcttaagagcacatgctcctaaagcagggaagcccccaaagcctcctctacttcccgttgctaattgctgtggcctcttatccacgccagtaatgaaccaaaagtatgggagggctttagccatatggaacttctgggagaggacttgactgtattcaggattcacttggactaaacgaccaaaacctcattaacacagtgttttcagtaggtgattatatgagttatcgtcaaaactgggacacttttgcaaaggggcactgttaataattacaccagaacagcaggtataaattggagatgtatggtcatcctaattatacagagccttcaagaacagtgtttgaaatgtgaattaaaacgattcgaaaccagagcttaagttctctagtatttttcatgggtttaagtttaccttctcttttatataacaatcacttgctgagatctgatgatgggatatactgtgtattaggtcctaggaatatatagataaagtagataccaattttgtttttttcttcactcacagtattgtaatattttagaccagtgggtttccagtctggcttatagcatactggagatactagggcaataatgcattttatgcttcccccaaattaaagtatgttttgccaaagtgtgatgatttaaatgcccctgtaatggttttattaatttttctatttatacttggggtttttgtttatgatttggcatgaagaaaccatttattttgctaaggaaaagtttgaaagctactggtttgagacttaaaaatttatctttaatatttggttataaagtcgtaaggctactttttaaagaggggaagaactagactgattaaagctgaaacacataaagatgtaaactgagtgggaaacaaataaattacctgaaatatataaaggtctgctatgtattagaggttttgtgattctagagggcacaggtaggaccaataggtggtacttatgggaatacaggcttcagctgcagaaaactttctagcagtcataacttttctgccatggaaggggctgtcttgtaaggtaatgagttccttgtcattggacatgtacaaatgaactcacagatggtgggtaagcttcatcttgagctccacattagataaaatgtcttcattaacaatttcacacttcaaggatgttaaacttctgtattggtgaatgttgggtcctttgctacttctttaaaaatatctaaagtgtgtgtgtgtgtgtgtgtgtgtgtgtgtgtgtgtgtgtatgtatttgtgttttatttccccagaacattagctgagtatatttttcatgtattttattttatatttttacacagtggtcaataattgataaaaatacagaagctactacaacagttctctcatcaagggaaacttaaaagggataatgtccatagatgtgattctgaaactgatttgaaaaagcctggttcatttttactgtgttgccattggttaatgcttaaccagattttgtctctgtttcaaaatcttgaaataaaagtggaacaacttccaacatgacttaagaaaaaaggtccccagttgaaaatgcttccaatcgttttgctattaaatgtgaaattgcaaaactagcctctcttacaaaaactagtgagaagcttgcctgtttttcataccatttcaaatactgagaaataatttctctaggctcttggaattagagttaaataaaaattatatttcagagtatataatgcatgaagttggatttctttgttttctaaaactgtatctcatggtccttgaaggttgataatttatatctctggtaccactttatttttctattatttgtggattaaaaattttaaatttagcaatatacttatattttgctttagaataaagttgatttttaaaaacttatttagagacagggtctcattctattgcccaggctggagtgcagtggcatgatcgtggctcactgtaaccttgaacccctggtctcaagtgatccttccacctcagcctcccgagtagctgggattagagaggcgagccaccattcccagctaatgttttttagaaattattattattttttttttccagagacacatcttgttgtgttgcgcaggctgatctcgaactccaggcctcaagcaatccagggtctcctcccaaagtgctaggattatatgtgtgagccactgctcccagctgagctttttcttaatagatatttaagatgatatgtaattagagaatcggagattaaactggaaactttaatttacaataacaataaaatattaattcaataatagtaatttaaattacaggccaggtgtgatgactttaatctcagcagtttgggaggccagggtgagagcaccgcttgagcccaggagttcgagactagtgagaccctgtctttacaaaaaaaattaaaaaatttgccagacattgtggcacacctatagtcccgactactttggagaggctgaggtgggagaaatacttgagtctaggagttgcaggcttcagtgagccatgatggtaccactgcactacagcttgggcaacagagtgagaccttgtctctaaataataataatgataataataataaaaataaacaaataaataaattataatgtccaaactcaattcaaaagctctaagctaatttatagtagttctgatgtaggatacaaacaacacagttgacagttttgtgaacaatatgatgttcaaaaggctgaagtataatctctaactccccatcttgttgctatgattactcttagcagattatgtggcctgaatcaacattggttcacagtcacaagcagtgttatcagatgtaaatatgtcttaacgttcatcaatagtagactcatattcattgaaggaaaaattaagaatttctactttttcaagttataactaaaattgcttttaaaatcttccttattttattgagatatcaaaataaatattcaaaaacagaaaaatacaaacagaatcattaaaaaattaagataattagaacatcctaaagtggtagcaaaatctcatggcctgactaatggtcatgacacacttgtaaatggatatctaaaatggagtgtttacatgttttaatacaagtttgaacaagctgtcagggaaacacagctaagtgagctgcagttaacttgcagacttacacagttattggtaggtttagaaatagaagatgctagataaccattaaagagattgctaggtctcattagagatcatattggtgatttttcctatcgtcactttttcctgggtgaggggcaaaatctttatgaattaggcacttagcgtctcacctttacaaatccagatttccacctttagaagcagatttactgaactcaaagaggtgcaggctattgttgcctgttttctcttggccttgaacagaaaagcagtctataagaatcaaggacttataagaaacctgctaaggagcccgtttttttgccagcactgcacactccacagactagccataacattgtggatcataagaagttgtgggaggagattttgaaggtcatcattagttgcttattattttaaatctgcagaaactgaggtccagagagaattcacattttcttggttactttgccacgtggaacaattgttatcaaatgtgacctggaatgcaaggttggggccatttatcttctgtgctaattttcagtgccatggttgcgaactttcttggcagagaaattgtttacttctgtgccctattccattgccttttacctaccccatctagttataatctagcaatagagttataagcttgtgtaatcaaactttcccactgcagatgctctttggagacagaatatttgggtttaaacccagcctctgatatgttctagctgctctattacattggataagtttctttagcttctctaaatctcggtatttgaatactcaaattagaagacgtaaattatttcctaagatttctcctagctggggctctctatgaccttttagctcttaagtagtctgtcctggctattgtcaaccatgtctttttttccttgactgatagaaactgtggcaaacaaaaggccacttagtcagtatttgttccgtccttaaccttctctcctgagagtcctgatctttcagtgctgttgtttccctgtcagggttgattgtttccttttcgagtgccgttctgaatctgaagtgaaagtgcagcgtggaggcatgtcactgttgtgtctcacttctttttcttttttttttttgagatggagtttcaccctgtctcccaggctggagtgcagtggcgcgatctcggctcactgcaacctctgcctcctgggttcaagtgattctcctgccttagcctcccaagtagctgggactacaggtgtgcacctctgtgctcggctaatttttgtatttgtagttgagaaggggtttcaacatgttggccatgctgatcttgaactcctgacctcaaacgatctgccttcctcggcctcccaaagtgctgggattacaggtctgagccactgggcccggccgtgtctcacttctttatctgagacaatgtttactggtctagacctgatgcttctctcccttgctgcttcgtagtttatttggatcctgaaatgccgctgagtttttcttgtcacctgcagcattgccaagaacaaggagtgcaccattagtgttaatttattttttctggtactctgtgcaaggcagatgggcatttaatgtgctgattccaaccctaccttccctcatctacactccctggtctcataggagttaaaacatagttttgtaagaaaccttagctccttgaacttgtggacttgtgggagaatcatggaaacatgagagttagagggaatggtagtggatatctaatctttagtgtacagataggaagggtcactgaggttcaaagaggttaagaacgaaagtcatagacccaattagtgactgagctagatagaaagtacgcccaagtcctctgcatctaagtctagtgccttttccagtttttccaaatgtctctcagatagcctatataaaggtttggcatttctgtagcgttgttctctcgttacctcttctgagcaatgccagctgtccatgcagagagtggggcacttagccagtgctgggccaaagctgtctgtaagaagaagttgagtgaatacattgacattttcagcccatggtagatcctgctttgcccttccggctctatgtgacctgatgcttcagaggaagagtgaatacatttgctgttcaactaacaattgtgtgtaattttcagcctgccttattcttcaatgctgtcttcccacgcctccaccacatgccacagcatatctgcttcgcaattacgctggtagggacttaccccgtttggaaaaggtttgcctaaatacttatttacttgtgcatgatacatcttgattgataccttgttaatctctgagatcaacccaagaatccttccttcaagggggaggatagaagagtcagggaaacgggtgacagaaaaagagaaaaagaggactgtgcttcctcactgatgagcaaagaggagaattacagatgatatcaaaacaatgaggagaatcacaggtgatatcgaatctgctttacttggcgttggctacttgtaaagtcaagatctttcatagactcataaaagcttgtgagcagagttgtcatttgtaccatctaattccatcactacatttttcgagaaggacacaagatttcagagataacggaagttacacagtgggctcatggcggagctaagactagaagctgggtctgaattctgaagatcaggcatctttccactaaatactgagatgtgaacaataatggagagccgtatagcccagaggggaaaccacattataccactttagtggatgattaggaaagcagttttgaaattccaggaaggtactgacttttgtataaagagaatgttttaaaaaaaaaaaccttcaaagttataggagagtgttatttaaattgtaacagcttgtttaaatgaagaaaatgttgctaagggacatgaatgctaaacgttagtctgccatcagctacttctgatgtttaagtcaaatagtccctcagttctgtggtgttaatctacgtcccttttctaatatcattcatttattcagtgcacactgaccaagagctaggccttgagttagttgccaggaagatatagggactaatacaatgtcatttaaagattaatagaaatgctctaagtcaattattctcaacccttgaatcagagtatatacataaagatccccatatgaggttagtgtgcagactgttttgataaacactactctaagtttattgcactggatgttggataatatgatgtaacggttgtttgtttttcagttttggtgatctatataaatctttttagaagagtagcatattgatttggacgaaaaaaaggaaaatatgaccaaacactacttctttctgtttttgtgggtgacagtgacttgacattcacatggtatcctgagagaggcttagtagctttgttagtattaattgtcagtttgcctatggcactaagttttcccacctatgtggggcgggtcctggtcatcacatagccttttgtagttatttgctttctgttgtgccttgattttttttttctgttgactattggcttcatcactttgtggtcctgtggcttattatgattagatttgagggtacagaatagagaaaacattatggcaagtagaattcaagagctggaatggaaataataagagcaaaaactactgttaagtgctgatttcctttgaattgtggtgttttcctttcttctccaaatagggaggtagtacagagtgaagaccggagatttggagttaaagatctgtgtcccagcttcagctttgctatttgttagctgtatatccttgagcaagttattcaacctcttacagtcttactttcttgatttgctagatgtgggtaatgatagtgctacctcatatggcagtcaggatgacagtgtggccattgaaaatttgctagacatataataaaccttcaataaacacttgtttattgtcagtctctagtcttcttaggaccgctgggggaacagacagaagagcagcagaggagttgataagtgaaacctcttaggttcttcttaattgcttgcatgtgacaatttctgaaagagcaatgctgaggaagcagcagctccccagctcccttcagcagtaggcatcttgcttagaggagggccactgctcttgctttcctgtctgctgatggtggttgtgtattctcagagcctctctggaaatcttccctttcacttcttgctttcatgatgattatgaacttcaagtgaaacctagctagaatgaggggaagtaagagcagtgtaaatcttggtccagcaacaccagttctcaccactgcttatttttgtgtttacatgggtctctcttagaagccaagagccccaatgatatgtgctagttcatctgttcattaaacttgtgaagtttcatcaaacccatttatcaaaatgaagggctgtaatgaagattttagagaaagaaagcactctaaaatattagagctgattgggactttacaggtattcattttgcaaatgagtgtcatctcttgttaaaggtcacacttatatagctgagactagaactggggccacagggactctatgtctatactattggatttatcactttccttggatccatcctacatgattcaatttttaatacctggagttttcactcttgttatcttcctattcaaggataaaagctctagcttcttatctttatataaaacctttaaaaggcagaactcatgttatcttttaaaactttcccctaactgttctccctgaatccctcattttggtgccgctggtctgatccctgtcctacagaaatgccttgcttcatacccaagctcacagtattatttctaatctttgccctggttactccagttttcttttatttactcagcattcaaagtcctggttaagggctacctctgccaagcttatgctagcttttctgacatcccccaagatttttcatgtgctttctgtgttgctctctttctcttttcacatttataaatatttcttcctcaaatagtctttgagctctttgagtaaagaataagaatctgattcatctatagctccagtgccaggcaaataaattcattcattcattaaattaacagacatttttattgagtacctatcatgtggtagcccctggaattataaaatgataaatatttccactctcaaggatttgcgagtttagtttggggaacaggaaagcagatgggcagagcaccatgtgacgaatatgtgacaacagtatgtagatgctgtgggattgtactataaggatgtataacttgaactgtagaatatagtgcaagatttgccttcaaggactagtagaaagtaatgcttatgatctaaattgatgcatagtatgttggaagtcatttttagacaagaagtagcttgtttcagagggagcagagatcaaacctaggaaaaaaatgtgaatttctatcagaaaagtactgcaaaatgacctcagaataaatagaaaactactactattatcatagaagttactggcaatatgattaatgtctgttaaaagaagatgtatttagatgactttatgctgaatttggataacctttaaaaaaccagataattccagtgtagttattaaatatcctagacagtagaggaggttggagaaaactcccctatcaaaacctaatcatgataagtaaaacaagcagaaaaaaatgctataaaatgatctttattatgattatatgtacacaaattatagataaaatagcctagttaattcattaatatatcaaaacacaagtgtaacaaaggatttattctaggcatgcaaagatggttcaatatgtagactttatcaacatatttcattacatcatcaaattaagggagggaaaaagagttgaatgtatcagtggttgctaaagagggcactgcagctgtaactagataggattttattccacaaatgccaagatagttcaatatctggaaatctatcagcatgcttcattacatcaccaaattaagggaagataaaagagatgattgtatcagtgaatgctatagcaattctagaaagatatgagtaactaagaaagagtaacgttcattcattctcccatttctatgtaacatacttgtttaaggggcttcctgcctaggcattgtgccggtatagtgagactagttggagtttccaacttgttgggacatgtaggcaggtaaataaatggctttcttgtggattgttataagtatgccgaaagtactaaagagcctagaaaaaggaattaggctactcttctttggagaagttagggaaatgttcacagagttagagacatttgagctgagacaatataaaaatatagggcttggtagaacgtgaagagagggaaacgacattgttgatggtgaacacagcatgagcaagggttcagaatcttgaaaacttattataaatcctgggaatggggtcactgggtcactgctgacatgcagaagaatggtaagagaagatactgaggaggacatctgcaaacaaatgattggtcagaagatgggcctctcaggaggagcagctggaggtgcttcttcatggagggcagcatgcgggtaatttatgatgctggggataactgaaatgactgtggagccaatgatttgcatattgatacttacattttatttatactctcccagaaattgcctgtttctttatatctgtgctatatccgaaaagccaagatgatacagtcagtcagtaacttgggattactatgaaaaatgtgaatctttgcttaagaaaatactgcatcctatattaaccaatttttcaaccttttattataaaatgactttagatttatagagaccttccaaggatagtattaagccattttaaaaattataattaacatttatactaccaatgtgcataatgcattaaaagttttaaacctttacttgatcccttttatttcacacttatattcactttagtcatactgaaagcaaaccagtcacttttatcccaatttagtagaagaccaagcctcaattaaaagcaaaagcaaaaccaaaattggcatttctcagccatgtgagatgggtttggttttggtatttagaaaaaaaaaatcatctgaagttattccaaatgaacagctaaatttaaaaaccacgagtaaaacagacattcattggtagtttttctatattggttttgtgctaggccttaatggtagtttataaatgtgtaaaatatggtccctacccttttaaggaactcaagtttagcaagtatgtatgtgtctttgtgtgtgtgtatatatatacatgtatgtatgtgtgtgtatatatgaatatgtaaaaggtacgggggaaagaaaaagaaaagaaaggccctgtaaccagagtgaaaagccagtaccatcactggcttcaatagcatgtgtcctgattaccagtttagagtctttgtcattgattcatgttatcctcgtcttttaagaaaactatacatcaagctgttcttccaagcaagatggtcataaaattgccattgactttctacaagaatagaggcttctttttttctcactttgcatagcactctatactataaaaagtactttaatatcatctcattggttgccataaaaattctgagagttaaggaagacagaggtttatatgtttgtttgttttttgagagaaggtctccctctgttgcccaagctggagtacagtggtgcaatcacagcttaccgcagcctcaatctcccaggctcaagtgatcctccaacctcagcctcttgagtagctggaacaacaggtgtgcgccattatatcctgctaattttttaattttttgtagagaccgagtctcattctattgcccaggctggtctcaaactcctggcctcaagtgatccttctgccttggcctccaaagtgctcggattagaggcgtgagccattgtgcttggctgagtcctctgagacagtgaaactatctgaggctctagaggcgatgccgttcaaagtcatgccacttgttggtggtgtggactgatgtgaatatccaggcaacactgtttcccagctctcccctccaccctgtctctctattactatgccatgtactgaggcctttgatttctgtgttctgatgctctttgtctttacagacatctggaggtaattgtgtagccctcttaattaattcagttcaattaataaattagtaggtggcttttgggctgggggcgcttacagggtgccttccgggcgtccctgtgctggagagctcttgcaatcaggcttggagagccctcctcggcagcagcctctgagtctcatccccagcaggcaggctgactggagaggtgattggcttaccctgacagaggagacatttcctctcttcaaatattatatgcaatctgatcagagcagcatctgggctgggctgattgttcccctcctagtttaagcaagcttttcatgaaggtccaacatggtatcagctcaacatacaagttgatgggcatttctttgttgtgcggggctgacctttgcattacatgtgttgaatattctatcctctggtcctaaattctaataattgtcccagacgttggggcaaccaatatgcccctcttccccttttccacataccccttggtggggaccagagctgctcctgcagatggatcatttaaaagtgtcctgccaggtatctgttaaaaccctgtttccaaaataaactttcagtggttccttaatgcctgaagaataaatttaaactcaactgtggctgctgagctgtctgtgctttggtttcaacccaccttttagttcttttgcttgctactttctgttattcgccctccaagcacactaaacgtaaatgctgtgtacttttctgcctgtataattttgccaacatttttcaggttcaaccctacttagcactcaaacccagtctgtatatcacctcatcaataaaatcttgttaattctgcccccaccaagaagtgagcctatctttttctgcatctcagcaacacttgttcttaacctcacttaggtaacttagcacttcatttaggcataaccatttaattggtgagataattaatttaatagattattaataaaattcaagctcttttccatcctcctaccataaaatctccttcaagttaggaaccatttcttattcatatctatttcccaagagtggctaggcactaaaataggtaactattggaagggagatattcaagtttgaggcagtgttctcttcctgctcctcctctttctctttctttctttctttctccttttcctctccttcctccttttcctcctcctctttctattcatgattcctctgcctcttcatttttctttcttccattttctttcacccttctttccagagaactttatcaggatgcatttagtatggattaaggtgaaatagcaatgaaatgaggagtattgtcttcgttttcatgcttccataaaaacagtgtttctttttcattgcagattccaacaatgtctcacccatcttggctgccacccaaaagcactggtgagcccctcggccatgtgcctgcacggatggagaccacccattcctttgggaaccccagcatttcagtgtctacacaacagccacccaaaaagtttgccccggtagttgctccaaaacctaagtacaacccatacaaacaacctggaggtgagggtaagtgctgggatttcagagttggttacttggagtaggaaaattcagttatataggtgatttgtagtacaaagttgtgtcagaaaaacgtagtttgtgaattcacagcgtgggtgtcataggctactaaaagtaaaggagcccccggaaatagtctagaccaaccccgtcttttaggaaaaagactttttatgggttatatggctatggttacataatgaaatagggttagagctcaaactagaaacctggactctttagtcacagctcaatgcctttctactgcgttatcttccacctccagctcattctcttgtagggttttagctaccagacagtcatccctccctcttgccgttggacaaatgtccacaaatgctgccaagcagtagtccaatcagaaacttatacaaagtgaacctaataaagtgcatggaattgtttacctcctctggctgtttttcttcccttaggctgctgaaggataagttgtctagagtgttctgtgagatctgcatttgttgaatctcccagacaaatatgagtgaagcctagttccaggggttttaataacaatgcattcagtttacatcaagtagagtttgaaggtctacgtgagctccagctctcatgtgtatgtatacactcacacacgaagcctcagaggcagtataaatggtaccatactctttggttgaaaaggttccatatttttaccagtgaatgttagcagcttattcaaactcaagaaaaaataacttaaaataaaaaaaaaaaaaactgaagaatattagacttctaggagctgagagagaagaggcagtgaaaggagatttaactccctttgttttctgtccctgtcccaccattaaaaaaattattaatatcttaccctcttcatgatgtttccagttgcttcttggatgacattaatgtttgttttgtcaatattgcacgcaagtgtttcacactctgtgatatagtccagtcctcctcttttctttcctgtcctctcctgcgcccaggaaacactttactagtctgttagtattttgggtctgatgccagaagcctagttcagatgtctagcttgtgtaaggtgaacacctaggttgggtggtagagaggatcaggcttcagcatgcatggctaagctgcagctgtggatctttggatatccttttcctcagaaagtacaagaacgagaccctcagaaagctgctcttgaaaaacaataaatgaagcctttggtgctgtactaatctctgtagcactccatgatgttttattgccttagaaagagactgcatctttgcagttaatcaagcacttagtggaactggctttctttgactcatccttctttagtgacttcagggcttgggaatgggatctggaagagaatctctcttcatagggacaggaggagccatatgttggcttcctcatttatggttttttgtttttttttttttttttttttttttttttttttgagatggagtttcactcttgttgcccaggctggagtgcaatggcattatttcggctcactgcaacctccgcttcccgggttcgagtgattctcagcctcagcctcccgtatagctggattacaggcatgcactaccatgcttgactaattttgtatttttagtagagatggcgtttctccacattggtcaggctggtcttgaactcctgacctcaggtgatctgccagcctcggcttcccaaagggctgggattacaggcgtgagccaccgcacctggccctcatttatgttttcaatgtttccctttgtcagcttactaggggcattgttattttgtctcctaacttttggggaaagcttcagtggacctctctctaatctgaacagaatacagacatggccagttatagagcagaaggcaaaggtgtgaggaagtctttgtaggtatgagagttcttataggcctgagcgttatggtgagggcaggtcctatattaagtgggctcataaatggcatatatgagataggtagaagagaagcatataatggcctcgctttagactcctttactgtgaatttgacatgccctccttgtactatgtgtggttcacccactgtcttactctctaggaacactgaagtgatttgtttgcgtgccctgcagcacagtccttggtcccctctcaacatgccaccccacacgtttttgttacctgaaaattctatttgtatcactttctccaaaatggctaggtgcagcctaggtcagaattaatcgctccctttcccgagtttccacatcttattctttgacttatccaaatttctaccacttttgttattgctcctgcttacattctgtcccatattgaacatgtagtatatgccaggctctatgctttctctttattattttattgccttcttatgtaaccctaaaaaatgtttttttttttttcttataaagaaatggaagcttaaaggaggtgacattctctatgatttgcttggagtatgtttctgaactaaggctgctgtccatatccagcatgcggtactgcctgtccttctattcacagcacatgtggcagcaaaccccatattacagtgatacatccctgcatcccttataagaatatatataagctttgcttcctcattgaagcaacaagacatggtttctcactcgtccttatgttcctcatagctcatattatgctactgtgtttttagtaggaatggttgcatatggtcaaatgtatgtctgtgtgttcttatgtatgcatatatatttggatggctggcggatggctggctgggtgagtgcactgctcagtgatgcttctccaaagcagtttggaatatggtataactcagtcttttgttttctgaaattttggctctctcttgcatttctgccaattctcactctttttctctctccccctctctctaaatataataacctttaccttttctgaatatgcaagagaagaaattttcctttaatatataagttaaagacaaatcttgggaacagtttatggacattcagactttttaaaatagaagctacatttctgcatctgctgtatgaaacaaagatgtatccatgtatttgttggaagtagatttgcttttctttatatttaatttaaatgttatcagtgcattctgttactctgaacatttttgtaacttacatctattgtgtttgtttacacatttaaacaatttataaccattccttttcgtttctttttttcatttagaatgttctatactctcagtgaaattcccaagatagtaggtagcacaggttttatttccaggatgcattggtgataccagcttatgctctgtattgcctcagctcatgctgtttttggcttttagagtgtacttgtcccccagtttcctgcttctacagtcttttaattcattgcttaaaagttgacctccacgaagctcaaccacaaatgcagaaagttagaactaatagaaatcacgcaatccatcttgttctgacgtaaatgtgaaaactgcagtctagagagtgtaagttatttgttcagagaagcacagcctgctctgagccgagttggcactcaagtcttttccctctaactctagagttacccaaaccttgtactatattctaatggcaaactgttctttactaccccataccctcatgcattgcctacaattcttatgacaatgtgttttttaatagatttgcttgtatatgcacctgtcttctctagcggagtctgaactttgagagtcaggggctgcctgactcatgccttttccctcaacagcacctagcaggatacctgacacatactaggaactcaatagtgtttgcagaactgaattaattgataaagcacagtaatataaacctacttctccagacacaggttctaggttctcagctacttattagacactgtggttctgcagtttcaacccacgtctttgcattacttttccttcctatgcccattctttgaacttacatttctcaccttggtgttacgtctgtaatctctggagtttgctttcccatgttttaattctgactgtgaaagtagaaaaatacccacatgttttccacatcaacttatctttctggggtacccatatttataatttcttttataagatattctgataataaccattttctaaagggctttggcacactgaaaagtggggcatgctttttttcccagttagtagctctttagatctcagggtccttttattttacttccattgttctcatttcttttcactgattttgtaacaagttgtgttttcatagctaacttagaatacccctacatttccaaatgctttctctgtgttcaatgctttgtgcttacgaactcatacttattttttaattaaatttagtcttcttagagattttttttagttcaatagcttttggggaacaggtggtttttgcttacatggagaagttctgtagtggtgatttctgagatttcggtgtgcccattgcccgagcagtgtacactgtagtcttttatccctcacatccttcccatccttcaccctgagtccccaaagtccattatatcattcttatgcctttgcatcctcatagcttagctcccacttataagtgagaacatacaatatttgattttccattcctgagttacgtttagaataatggtctccaactctatccaagttgctgcaaatgccattatttcattcctttttatggctgagtagtatcccatagtgtatatataccacaattttttatccatttgttggctgatgggtatttagaagatatacagacaataatcatatgaaaaaatgctcaactcactgtccgggaaatgcaaattaaaaccacattgagataccaccttactcctgcaagaatagtcataattaaaaaaataataaatgttggcatagatatggtgaaaaggggacacttttacactgttggtgggaatgtaaactagtacaactgctatgaaaaacaatatggagattcactaaagaacgaaagtagacataccatttgatacagcaatcccactactgggtatctacccaaaggaaaagaaatcattacatgaaaaagacacctgtgcacacatgtttatagcagcacaattcttaaagattttatagtgttaactatttcattttttgtgaaattattttggtatatatttatgatgttgttccatcactttctattctgtgtaactgatgacaacaagataagataatgcaatttttcttctggtcttcaaaatactagcctttagtgttgtttgtcctataatctgggttttcactctgctccaaatcaaaaaataaaaagatacaacaaacaacaaccaccccacccccaaaaataaaacaacaacagcaattaaactcagtcttagactttgatggcagaacagtatagttctttttctgtttttggtaaatagcaaagcaaatgaactttcctactgtactaatataattttttaaagatggtttttgaaattatcttactaatacactctggggattagtgttaggttgcctttaatggcaaaaaccacgattacttttgcaccaacttaataactctctctctctctttctctgtctctctctctctctctctctctctctaatttggctgaatgaaatttgataatactttttatccatcattaaaatagataatcatttggaaagatttgtaaagttcacgtttgtgaagctggagttgtcttgtggcctagaattcactttctttaatttctgaaattctttttaaaaaacatttttatgttagatttttgaaaaaacaaattggcatgacatgccagttctcactctttttctttctccctctctctctctaaatataataacctttaccttttctgagtatacaagaggagacattttcctttagtatataaattaaagacaaatattgggaacggtttgtggccattcagactttgggtctgcattaggtaccaattcaacgtgatcattttggtggaatccttttatattggtatactcttttatagtttatttagcagttgcatgttcattgtcttttcatttcagtagaaaattcttactgtcactctctgaggtaggtagaacagatgttattgtcattttgatgatttgtaagtagtagaagtggaagagcttaataaggaatcatgtagctagtaaaagagtagagggagaccctcacacctagggctcttacgaattttaaatgctttcgtttattaaagcgttggctacacagtctgatgtctcctttaacttcattattttattatttcatgattcttctttgaaattaatttcaaaatggtgaccctttttacaaaccagctttgtgaatattggttcacatagacttgtcaagatagatcaagataggtgaggtgaattatattaaatagggatcctaagcctggattatttttttatgacatctttctgtgctttctgctactgtgaggttacgaatgtattattccatggaggggaaacagttatagatgattgctaatctacccatgagtttggggctgaattgatccagaacccaggtttcctaaatgcactcattcagctgtaccactgtggtttatgggaaccaggcaagtttggagcttggttcctaggaactgatgagtcctggattattgatgcttggtggagaattagccattagtgatgtgaagccatgtatcctgggtaggcaggacacatttgttttcttagcagataactaacatgtgagggaaatggatgtccacttatggcattatatttaaaggaataatttagactggattttccccattatttttgctgcgaacgtatggtcctcatggtgtgcttttctgtctctggagtcttattgtccttttccccatgcaaagagaatcttgctctgactttggagatacaaatgggaaacatcttttttggaggttacaaatgggaaacatctttttgtaatcctgacagtcctgttaattgcaattagagactgcagttgtaacatcttggacgtttggtataagtatgcgtgttatgccatgaggatagccacaaattcacggaaacatcaggaactgtaatgaagctcgggtttgcctgtcatgccccttttctggatgagcgtaagcatctcgagcctcatccatcactgcacagtgcagtgcatgagttttaattttcaggtcctcagggggacaaaagaacaagctgtgtattcattaaaggatcaaatattaattgtattaatttgatctttacactgcatctttcagcagagaaattaacttgtaattcttggagtgacatcagatcttaccaaatattcttaggccttattgatgctcaaaagtgccaagatgcagccctggcttgatggtcagtgcagttacattcaagcttcagtttcatcacttggccttgggcatgatgcttttctaatccatatcctctttaattcataaaatattagctggtaataccaactgcctcacaagattgttttgaaagccaaatatgatgataaatgtgaaaatgtttttaaaccataaaataccttataactctaaggagttactattatatacttattcagcagtcatttacttaaaacagattttgtgccagatactcttctaggggctgaagtaatggcactgagtgaaacagagactagttcctgccctcttgggatgtattttcttgctataataaaaataacattattaataataatagtgataacatttgtgaaataaaatttatttaataaatgcattttataaccttacatataattaccaataactattcaaaattataaaaaatactttaatataggttaagtaactctaatccaaaaatctgaaatcttaaatgtgaaaaaatctgaaactttctgagtgctaacacaatgctcaaaggaaatgctcacaggaacattttggatttcagtattgtggattagggttgcttagctggtatgtgtaaatattccaaaaatccaaaaaatctgaaatttgaaacacttcatgtcccagatgttttgtatatgcgatacttagtctgtagtaatgaatatgtgataatataagtataataataatttagcatgttatccataagtactcatgtcattagcttctaacaacagtgatagagatcacaatgcctcaacactatataaactgtaaaattctagaaccagggtgaatcttaaaagttatctaatacaacccctttctttcctagatgagaatagttgagaatgtattcactaatacatttcagcgaagtacaggttctttgcccaggagtgctgtaaataaccaatgaaaattcttgaatgcaggcaacaatttaatcttcatttcagagactcagagaggcaggtggcttgttcagtattgcagattagtaagtggggaagccaagccatgatcctggggattccttctctggttgccatagacacgttttgggggacttgtttagaagttacagtgattgaactaatatacccgaacaaagtggattggatgttttagaacaaggagaagtccctgtattgttgacagaaatctcttttattttgtaacttgtcagcttaattaactactgaaatgagttccttaataaggtgatgggtgcctcctaattcttgtatggttcaaaaacaataattaatgctgatttgtgtggtgagatacatattaatcatctttatttttgaattatacaaatatacaatactattgtccctccgtattttacatctgaagagaatttaattgcttttttgataataaaaataaacagagagccacaaagagatatcaccacacatgtattagaaaagctaaaataaaaatttgtaccagatgctgctaaggatgtggagaaatgatctctcacaatgctggtaggcatgtgcaaaattttgtagccacgatggaaaactctttggtggtattttacaaaagtaaacatgtactaaccatatgactcagcaaatataccctttggcatttaatccagagaatcaaaatgttatgttcacgaaaaaacctgtacatggatgttcatagcaacttttttttttttatcataatgacaaaacactggaaacaacccaaatatcctttgatgggcagatgtttcagtgaagtctggtacagccatacaatggaataataccattcagcagtaaaaaagaatgaagtattgttggtatatgcaataatctggacatgcttaatgaaaaaactgtctcgaaaggttacatgtattatatgatttcattttaagacaaagctctagagttaaaggacatattcatgattgctaggggacagaaatgggtgggtcgggggggcaagtactggtcattcctacaaagaggacgcagcaagagtctttgtatgggtggaacagatctgtacctcaattggagtgatgattacatgaatctatacatgggataaagttacatagaactgtatgcacacacaaatcaatgcaggttataaaatggtaaaaactgagtaactcctagttaacaataaggtaacaatgtcagtttgctgggttttcgaatgtattacagctttatgagcattaccatttagggaacctgggtaaaatgtacatggaaactctgtactatttttgcaactttctatgagtccatatttaaaaaaaaattaataatagtaaaataaaggaatgcatatagatatcttaatgtattcttctcttactcaaagtgctatcttacatgccatctgaattgcttgcatgatactttgaaagatcactgctatatgtatccctgccaaaatgtatggcttaaacctgtggttttcaaagctggccagtcatcagaaagacttggagaacatttttcaaaagaaaaaaattaaagcaagtcctaggtcccatcacaattttacagaatcaaaatatctggccatggggcccaggaatctgcattaaaacaaagcaaaataaaaaataaaacagaacttcccgggaattgtgattgatgctcaaccaacgtttgggaaccactcatttatttcattaacttcagggaccagtgccttaatctcctttgaaccttctccaagtcctgagagtgtactcttcctcccgtagttaatgatggtagcttttgaagtcttgagagtctttatcttgtgaacattgtacagattcagagacctagagcatccttcatgttgctattcttttccctcagtgctttcattatagacaccaatcgtttgcatatgttgtcctgggtcattttatttgggatccaaaaccagaaaatttcaaacaacaacaaaaaaatggattcttcgagaatgccctagccatggccaagcttctgcattacagagctcttgctattgtgttgctttgggtagcaatgcctgaaatctcagccaattttgggtcacagtaggcctatgtaaattatctaaaaatggattcattatggacattataaaaataaatctgacacctgagcctttgggcaaatataccatataaagaaatcataccctagaataacgattaacctaaagaacttaaaaaaaatcagtatgatatttttatcatcctttcttaaaattactgcattcagagagacctgatggctgaggacagcacctggggcagaggagtataggtcattgggatgtggcatcctgagtcttctagcagtttgctcttccagcactctcccttattatatgttctttacattgttctgtatgtcgctgtcttcaaacagaatagataagtctactagtcaagatagacatataacaggcaccacatgtgcataaaaattgcattatgtaaatttagtgccgtaatataatatgaaggatgtcctctaggaggaactggggaaagcatcacagacgaggacacatctgatctgagtgttggagaatgagttagttgtttaccaagcagaaaagggtggtggacagcatggcatgccaagtaaagggaacagcatgtgcaaaagcagagaatggcccccatcctgacccttgtaattttggcagctctttgctgatgtcctcaggcaatgcatctgggctcctgggaatagctttgcaatgtgaacagagtgacttcactatgggtagacctaaatgttctagcgtgctctgaaacttacctctagaaatagctccaggaagttaggtagcttcagagaggaaggaccaagaaatatgatcttataccacaggcaagaagtactttcctggaggtactggccagaagtactattgctatctctctgcacttgtctgttatattttagaatgaaatgtgcctgtgcatacaaatgctaaggcaagaaagaaaaagcaaaaggcaattctctttaaatctcctgaaataatttcaggcagctttttttacctagtcaaacacacacgcttaagaatggagttgtaagctaacttaatcattttttgttttgttttgctctcttacttgttcacacgttggggtaatcctgagaaaacaggaagcaatgaaagaaggattttattgtgaaatgttcattacaacttgtaattttaaaatgtgtttgtatgagtgtgcacaaatgtgaataaattttagagcactttctcacataatatctagtttaatcaccagaatatcctgcaacgttattatagttcctacattattatggttcctaaagacaaatgaaaaatctgtgattcagagacccaaggttaggctaataaatgtagaagtcacatttgaccaaattttagtatcttcccttaagtattggtaatgtacgataaacactatttggtaataatgaattattacaattactaaaacaacttatctggcagaacagtatcttaactatttgaaaaatattgtagtggatttattagcttccatttcatctgaagtccactttgctttactgcttactttatctttctagctactctgtaaaaaagttattatcaccctcaatctgccaagtataatgtatgtaaagtgaaataactagcatattgcaaagctgggaattgaacccttgtctcctaaatccaagtctgtagctgttcctcagcagtacactgtatctcatgttaatgccattattacttgtattaaatgaaataatttttccatcattattttcccgaattattactatccagagcgatttgaaggttaaggtcatccaaataatgtgtgaaaattgcttaaaatcaatctcctgtgcatggatgtctatgatgtatacaaatataaaacagccaaagtagtctcaagaagttattaccaagtttctcaaatagtgtctcaaggcgacattatttgacaagacctttggaataaccatttggaattttccttagttcagttgaattgtgtcatcttgcttaaacttttcagatatcaggggtagttttattgacattacaatggaattaaaatgacattttattttattttttaccgttctatagaaatggcattttaatttgtcattatttttattattgatctgttaatgttgtaatgacttgggttttagtaagggcatcctctgtaaaaattacctcctgggaaagaaatctccaagttctatgaggtctcccagaaatatcaccacttgaggtgagagtaaagtgtcatgaatgccacccaatgtgattcctggtagataagatttcactgttttatatcttgacatctgcattaaattccgttcttttactgggtcctattcacttccatcttgtgccattgttacttaaccaggctctgtagtggacaggaaaaagtaaaaacacgtcttagcccttaaacagtttatattttcattagaaattcaacatatgaaaatgcccagttaactaacaatataaagctttactgtacagcttctatttgtgaagtgactccatggctaactctatcagaagaaagagtttgcttggagccaaggtagtattggaaggttacagagaagaaagactcagggaggcagtggttaagcttgtagactctggcatcagatagatctgggtttcgagttttgattttacctcttaattctctggaaacttggactcaccaggataagtggcaacctaagttctttcagttttaaaatagagatagttatgcactaggcgtggtggctcacgcctgtaatcccagcactttgggaggccaagggtggatcacctgagatcaggagttcaagaccagtctggccaacatggcaaaaccccgactttactaaaaatacaaaaattagccgggcgtggtggcacacacctgtaatcccagctacttgggagactgaggcaggcgaatcacttgaacacagaaggtggaggttgctgtaagccactgcattccattccagcctaggcgtcagagtaagactccatctcaaataaatgaataaataaaaataataaataaatatatgaataaatgaaatagagatatttgtatcttaaagagttgttttcaaagttaagtcatgacaaaataatgacaaaatcagtggaagctgcaatcattgttcttgctattattattgaaatgaaaatatgaacattagctctgagggttctatccatagttttttttaaaaaattctgattataaaattttaattataaaatcccatatagctcatgctgaccatttaaaaaataatcttagttgtatccttgtttctttttgtatttgctaatagagattttagaattggcttggtgtatgtttgtccttgctagaattatgattccttttttgaatttgcattacacctttgttagaagtagaattactttacttgaactttgtcaatgtggcaaaaaatgattcatgtttatattatctctttgaaaagtagtgtttttactattgaactataagtacagttaaaatgtaaatgaacatttcagaaagaaactattgatttttattaattaaagaaattaattttccaaaatgtcagttgctacagagagattttagggattattaactacacaatctcagaaaaattaatttaattagggattttattttgggttccattcgtttttgagattcatattttggattaagccagtctcctgaaattgtatttaaacttagtctgcgtgtatgtcttttttagggaaagcattcacaacaccatcagaccctcgaagagattcttaacttacccattaagaaaagtaacatctctgtctaggggtcaccagtctctcaagccagttatattgttgctgcttgaataaacaaaacaggtttttatttctgctcttaccaacattactaggctgtgtttgtagcaaaaactgagtatgtggtggtggtagtaactacagtagaaagtgtaacgtgtacacaattatatcatgatacatggtttttaaacacattttatatatgtatatatttaatttattcacacaacaaatatttgcacatgttgcctgagctgtgcatgtgtaaggcagggcatagaaatgaatagggcatgggttctttctgctgaattagatggtaccccctcaccccccattttactgttgaagagagggaagcttggtggtgaggtggcttgccccagaccatacaggtaaaaagtagtccagagtagattcaggcataacttgtttgaaccaaattgtgttctttagactgcaacatgctttctgttccttagcatgtaactattacccatgtatttttatttatttttcttttacgtgaatttaaaatgtcatatttgttctgcttctattactgcagtcttgaatgatgattcatcagtgcagtggcctattttagtgaaccacaatagcttgggtagaaagaaaaaagatccaacatacacaggaatggaaagcagccatctttttatagctaaaattgcaaacatctggcaattactctattctacctcccttcaaaaaagaagaatcatcccttcaactggagcctgccactgtgtttaatcaaggcagaaagcaagccttaaggagcaataggttttgattcaaggaggccattgcctaacctagttggccaaagtctcttcagaaaataccccatttagtgctccccataagctactgggttatataatgatagtaatggtaatatagcaattaataactgcagaaatccccttttgtttttctgctgtttcatttgtggtggctcttatggcagcttttatattgtgaaagttaattattttggtcagttttgcctgtctccatctgcttaagcttcttgtattccttaacaaaagattcaaccacatcgatacaaccaataattgccaacttgattttattataaacatgtccggtaaaatgctgaaggaacaaataaatttatttttaaagcctggccgtgatcttacagtcaaaaagtggtccaccaaggttatggctcctaagtaccccacccgtatttcttattgtgataattgtttgtgaaactagttcttccctcactggccaaagtcaacactgttggcaggggaagtgagaacagctggtggttcacagtatatgctgagaatcagaacttctgcatttttctcatggggctagtaccagcttttgctctggccttgaccaatgcacgtacctttctcttccccatttacctttctcttcctctaggtctctgaagagtagaggtggatctttcccttcccaggttgtgccaacattattaccaatgttcccttttgttgtagaatattttggtcagtaatcatcagtaatcgctaagtaacagaaaatcaaggttcgacagcacggttttcaaaaacaacctcaaatactataaatagtctgttttctagtgttagcagattatggtacatggaaatcataagcattcagtgggggcctttgagcttacattaaatgcctgccttttgcttttatgtctttgctagaactgtgttcaatacccaaagacacagctttttctttgatataataatttttctaggctgtctttcctgccagtcttcccaaaatcccagtgaagtttgcaaacacctcattaaactaaatgcagttttgggagagatgagattgtgactagggagttttctggtttttacaaaaagaatagaaaaagaaaaagaacaggaactcctaacaacctaaaatgcatgccttgtgcaatatagttatcccatgcagagctacatagtgtaacgatctctggaatctcaaatgaatgtgctcccttttctctgtcttcattcagttggatagttctggtcttcctccctcgtgtgcacatctttgaacttgaactactgtattacagccagtgttctaacctatatgcgtttctctttggtggccctgctaatatagaagaggttacgctaatgttccttaccatatttttctttttggtgtcttctttgtgtgtgtgtgtgtgtgtgtgtgtgtgtgtgtgtgtgtgtgtgtttttaattgtactttaacttctaggatacatgtgcagaacgtgcaggtttgttacataggtatacacatgccatggtggtttgctgcacccatcaacccgtcatctacattaggtatttctcctaatgctatccctcccctaggcccccaccccctgacaggacatagtgtgtgatgtacccctccctgtgtccatgtgttctcactgttcagctcccacttatgagtgagaacatgtggtgtttggttttctgttcctgtgttagtttgctgagaatgatggtttccagcttcatccatgtccctgcaaaggacatgaactcatttttatggctgcatagtattccatggtgtatctgtgccacattttctttatccagtctatcattgttgggcatttggattggttccaaatctttgctattgtgaatagtgctgcaataaatatacgtgtacatgtgtcttcatagtagaatgatttataatcctttgggtgtatacccagtaatgggatcgctgggtcaaatggtatttcttgttctagatccttgaggaatcgccacactctcgtccacaatggttgaactaatttacactcccaccaacagtgtaaaagcattcttatttctctacatcctctccagcatctgttgtttcctgactttttaatgatcaccattctaactggcatgagatggtatctcactgtggttttgatttgcattgttctaatgaccagtgatgatgaggtttttttcatatgtttgttggccacataaatctcttgttttgagaagtttgttggccacataaatatccttcacctactttttgatggcattgtttttttttttcttgaaaatttgtttaagttctttgtagaatctggatattagccctttgtcagatggatagattgcacgcttttttttcccattctgtaggtttcctgttcactctgatagatagttttttttgctgtgcagaagctctttagtttaattagatcccatttgtcaattttagcttttgttgccattgcttttggtgttttagtcataaagtctttgtccattcctatgtcctgaatggtattgcctaggttttcttctagggtttttatggttttaagtctcacatttaagtttttaattcatcttgagttgatttttgtataaggtgtaaggaaggggtccagtttcagttttctgcacatggctggccagttttccaaacagcatttattaaatagagaatctctccccattgcttgtttttgtcagatttgtcagagatcagatggttgtagatgtgcagtgttatttctgaggcctctgttctgtttcattggtctatatatctgttttggtaccagtaccatgctgttttggttactgtagccttgtagcatagtttgaagtcaggtagcatgatgcctccagctttgttctttttgcttaggattgttgggtctatatgggcttttttttggttccatgtgaaatttaaactagttttttctacttctgtgaagaatgtcaatgctagcttgatggggatagcattgaatctgtaaattactttgggcagtatggccattttcatgatattgattcttatccatgagcatggaatggttttccatttgtttgtgtcctctcttatttccttgagtagtggtttgtagttctccatgaaagggtcattcacatcccttgtaagtcgtattcctaggtattttattttctttatagcaattgtgaatgggagttcactcatgattcagctctctatcattggtttataggaatgcttgtgatttttgtacattgattttgtatcctgagactttgctgaagttgcttatcagcttaaggagattttgggttgagattttgggattttctaaatatgcaatcatgtcatctgcaaacagagacaatttgacttcccctcttcctatttgaatattctctatttctttttgttgcctgattgccctgaccagaacttccaatactatgttgaataggagtggtgagagagggcatccttgtcttgtgctggttttcaaagggaaagctttcagcttttgcccatttagtatgatattggctgtgggtttgtcataaatagctcttattattttgaggtatgttccatcaatacctagtttattgagagtttttagcatgaggtggtgttgaattttgttgaaggacttttctgcatctattgagataatagtgtgatttttgtcattggttctgtttatgtgatgcattatgtttattgatttgtgtatgttgaatcagccttgcatcccagggatgaagctgactttttcatagtggataagctttttgatgtgctgcaggattcggttttccagtatttttattgaggattttcacaatgatgttcatcagggatattggcctgaaattttcttttttttgttgtgtctctgccaggttttggtagcaggatgatgctggcctcataaaatgagttagggaggagtccctctttttctattgtttggaataatttcagaaggaatggtagcaagctcctctttgtacctctcttagaatttggctgttaatctttctggtcctgggctttttttggtcagtaggctattaattactgcatcaatttcagaacttgttattggtctattcagggatttgaattcttcctggtttagtcttgggagagtctatgtgtcgcagaatttatccatttcttctagattttctactttatttgcatataggtgtttatggtattatttattggtagtttgtatttctgtgggatcattggtgatatcccctttatcattttttattgtgtctatttgattcttctctcttttcttctttattagcctggctagtggtctatctattttgttaatcttttcaaaacaccagctcctggattcatcgattgttttgaagggtttttctcatgtctctatctcctccagttctgctcttatcttagttatttcttgtcttctgctagcttttgaatttgtttgctcttgcttctctagttcttttaattgcaacgttagggtgtcgatttgagatctttcccgctttctcttgtgggtatttagtgctataaattcccctctaaacactgctttagctgtgtcccagaaattgtgacatgttgtgtctttattctgattggtttcaaagaacttatttatttctgccttcattttgttatttacccagtagtcattcaggagcaggttgttcagtttccatgcagttgttcggttttgagtgagtttctgaatcctgagttctaatttgattgcactgtagactgagaaactgtttgttatgatttctgttcttttgcattttctgaggagtgttttacttccaattatgtggtcaattttaaaataaatgtgatgtggttcttagaagaatatatattttgttgatttggggtggagagttctgtagatgtctattaggtctgcttggtctagagctgagttgaagtccttgatatccttgttaaccttctgtctcgttgatctgtctaatattgacagtggggtgttaaagtctccaactattattatgtaggagtcttagtctctttgtaggtctctaagaacttgctttatggatctgggtgctcctgtattgggtgcatatatatttagggtagttagccctttttgttgcgttgctccctttaccattatataatggccttctttgtcttttttatctttgttggtttaatgtctgttttatcagagactaggattgcaacccctgcttttttttgctttccgtttgcttggtaaatattcctcgatccatttattttgagcctgtatgtgtctttgcatgtgagatggatctcttgaatacagcacactgatgggtcttgacgctttatccagtttgccagtctgtgtcttttaactggggcctttagcctgtttacattgaaggttaatattgttatgtgtgaattttttcctgtctatgatgctagctggttattttccctgttagttgatgcagtttcttcatggtgtcgatggtctttacaatgcgctatgtttttgcagtggctagtactgtactagttgttcctccatgtttagtgcttccttcaggagctcttgtaaagcaggccttgtgttgagaaaacctctcagtgtttacttatatgtaaaggattttatttcttcttcacttatgaagcttagtttggctggatatgaaattctgggttgaaaattcttttctttatcaatgttgaatattggcccccattctcttctggcttgtagagtttctgcagagagatccgctgttagtctgatgaggttccctttgtaggtaacctgacctttttctctggctgcccttaacattttttccttcatttcaaccttggtggggtaacccaatctttctctctggctgcccttaacattttttccttcatttcaaccttggtgaatctgacaattatgtatcttggggttgctcttctcgaggagtatctttttggtgttctctgtatttcctgaatttgaatgttggcctgtcttcctgggttgggaaagttctcctttctttcagagatgccctgcccagagaggaggaatctatagcggcagtctgtctacagtgcctttgtggcactgtggtgggctttgtcctgttctaacttcctgggggctttgtttacactgtgatgggaaaaccacctactgaagcctcagtaatggtggacgcccctccccccaccaagctggagcatcccaggtcaacttcagactgctgtgctggcagtgagaatctcaagccagtggatcttagcttgctgggctctgtgggggtggggtccactgagttagaacacttggctccctggcttcagtcccctttccaggggagtgaacggttctgtctccctggcattccaggagccactggggtatgaaaaaacaaagtcctgcagctagctcggtgtctgcccaaacggtcacccggttttgtgcttgaaacccagggccctggtggtgtaggcacccaagggaatctcctggtctgtgggttgcaaagaccatgggaaaagggtagtatctgggccagagtgcaccgtttgtcatggcacagtctctcatggcttctcttggctaggagagggaattccctgaccccttgtgcttccagagtgaggtgatgctccaccctgcttagactcaacctctgtgggctgcacccactgtctaaccagtcccagtgagataagctgagtacttcagttggaaatgcagaaatcacccaccttctgagttgatctctctgggagctgcagactggagctgttcctatttggccatcttcatcctaagtcccatatttttcttttactttgggacttggaatctacaaatgttccggaatacagacagtattgtattgcagtggactttacatgtttatagtggttctctatcctcttaacactggtaataatcacctggggaacttcaaaaaatttccagtcttgggtctcaccctcaagtattgtaatgtaattgctctgggatgggcactatatatatatatatattttttttttttttaacactatccatttttagaactgctaaggtaggccaatctctcactgatgcttgaattcatataatcactgtcaaggtgtttttcaggcttatattgagtatttctagtgcaggaaactgaaagaacgctttctgtcttaaggaagttctgattttttgagagatcagatttattattatttaaattctgccttcataacatgagattatcttttagtcttataaatttataatttctagccatggagtttagttagtacttaaaattgtaactacctgcccttcaaaaaaacaaaaacaaaacaagaacaacctgatcacgtctttataattgtgactcaatcctcatcagataggacctttctgttcttcacttttgagttataaatcctagggaaaggaacaatgaggaacaattagacaaagaaataaaataagtactttctatagtgagacagcactagagttaccttgttaactagactgagagctggaactctaagcctttcatcattatattgacaatgtgtaacgtatggttaagttacagaagaaacattacattattattattgaataagtaataattatgagttttattaagagggcccagttcaatttatatgtgcaaaactgatgcccttaattgtaacaatactttagaaatgatagtggaagtaagttccttttgcagagaaaatgcaccttaaaatgcctaggcacaaatttaatgagatacattgttctatatcccaataaaaacaaagacaaagccaaagtaatgtcctcaaactctctagaaggacacgaggcttaatggtaacagtccctgatgcaggtgggtcctcttaggcaatcttaggtttgcattggccttactatatggtgaaagtgagcatatgttttatttatgcatcatccattttactttagattgaaagtatttccccatgttttggtaaaacctgctgctcctgaaacctacctttgttcctagtcctgcccttataaattgcaaaaaacaaagccaattcatcttgcttatatgagcccgtcttccctttcataatagagatatgtccttcattctgactcgtcttcttttctttaagcggaatagttccactgcagagtctcttaattatttaatgtagtacatccggaaagacctcatttgtaaggaccaagaactgaaaatattgctattgaatgcagaaagggaatggtaaggttctctcagagaattccttttcctaaacaaaggtgcaattgccaggaagcaccttcacatttttctacaccatgtcaggcttccttatagcactgttatatgtggccgtattatggttgacattaaaaaatgtgtgtatttttgaaagaactacttcctttattttaaatagaaaagaacacagcatctctgagagtgagaagatcaaaaataagttaaaagcttttcttgtgattagattaaccagattgattaggacaaatagggtttatctatagcttaataaataagttattatttcctcaaaatttagacttactaggcctaaaggagcatagaggtctttagacttaataagtctaaattttgaggaaataagttggaaaaactagagttcagaatgagtaatagtaaaggcaaaactaagattattaagaaaattatcagaatttcctatgtgatttttttaacaactttccctggcttatattgtacatgggtttaagttatcttacagctctttaattatttttaaaagtaggatagcatgttatcttccttctctctgtctataccaagtgtttgttatttgagcattacagttacacaccaccactatctggttgtaccgtgactgaaatatcagttaattggaaaagtgaaaaaaactctttaaactcaacctatacaattaagatgatgaagtggcagcaatcattgcactcttttacttacctgtgtgatttgttataccatgtgtttgtttagaatgtaaataatgtgcagttagagtaatagatgcagatgactgaacatccttagacatctggagaagcagcactggcaagattatctctgaaaatttctgaaaatctttttgttgcaacctgagaaggcatagacataactgaaagcccaatagtaaggccaagttcagtaaagttgaaaatgctttacaccatcactgatgatgttgagtcttccccacccagctcaacattgagattttttttttatatgtagaagttatttgttccagaatttttcctttaattcattgaattattacataattaactttttttttctttaggatttcttggctctcaaatacttttactctttttagagtgctacagccacagttttcttaaatatagggatttttgaggtatcatattttgctaatggtaagtttatagtattcctaagcagcttatctcatacagttttctctatattgaatatgattcagatgaaaattaacctgcgtgaaatggttgtcatctggaatgactgccttttaccctagaaaacagccagcccaaggttgagaacacatctgagaaactgtgcctattttgagaactaccaagaaatttttattcactggaacagctgccaggaaacttgttggtcatagaccagtgccttagttgggcatttttttcagaagtagagaaaggcaaagctagagtcaccgagggattggaaggatgaaagacgtgtagttgaaagctgggcaccatggaagaccgaaacactcttcaaacattctgttttcaagaataaacccaaccctaggagcacgagacagagtataaagagccatgatttttagcgaagacctcgcatttatcttaaaatttgattttgttgtgaatataatctcagaattatgcagggatggtccatcaaaaaggtctgccagagtcaagctgagtttatcttagccatgctgaaaagtaggtggcagtcaatcaaaatggcaattactgtacaagacaagagttcactggagggaagggtgaatggaaaggacactccctgcattcttgaggcctatgtaaatcaacaaatgactctgggttagtttccacaattgtaaaacaatgtgattgaacaatattgtttcttcacttccttcctgctctaagattgtacaaaagtatgattcaactacagatattgcataaaattggttactcctgaagtgcatggagtaaaattgttcccatagaatatcgtgaatttagttaggttgtgacatgggtcatagtctccgcagtctgtacgccctcagtatattcctctgacaaccccatgtcctttcattctaagctaatatccttacacatctttttctctacacctgagcaaaatatacattcatgttcttaagtgcatgtagttaagaggaagctaacacttaatttgttcctgctgtatgccgggtatctggtatgtcatcttcatagcattatttgaagtttggtactaatatttccatttttcaagtgatgaaattaaggctcagagagatagtaagttgcccaaggcatcatgacttacaaagaatggatcttagatttgaacacaaatatctctaaatccaaacttcatgatttttctactgtatttcatttgctcacttccaaagtctatacaaaaatatttgttaaatgtgcatgtactgagctaccgatatctactatatctgtgtatacagcgatagctatcaaaaggagagacgtcctctaaatctttgataaaagtatgtcaaaatggaaccctcccagaaggacttcatttttaatagaaatcagagtattagctgaaggcacgaagttctaagataaaaatgtagctatgaatcagggtggattcagagaggtctttgtgtgtatgctataggtgatcatgtgtgaatttgacctacggcaagaagaattttttttttttttaaagctcttccaggttatccttgtgttggggaggaggatagaataaagaaatgaatgtcttgctggttcttccaagttgtatgaggataatatcacccagggatgatatgctagataaagacccaggatctttattactttttgacatttagttttgttgttgttgcttaaatttctagtctgttttgatggcattagaacctttaaaaggagcttgtaaccttttctttttacttttcctgaaatgtgtggatgggaggattggacaagagcctcaagggatgggaagaagagctcagtgcgaacacacatgcatttattcatttagcaaacatccattaagtgcctaggacctttaaggtattctgccaagagctgtgcaggataggaatgaacaagggatgacctttgctttggctatgtacaccagaaaaacgagcaggggctggaggactcttgccaagaagctatttagtggttctcttagagccttatctctatctaggctggagattaactcagaacatttttttagtctgtttacctctaaaatgaaaagaaatatatattaagaataaggaggtggcgtggagctttcactgaatgtatttcaactggagtattgaacgttatagtgatggatacagttaatccatcacaaccaccatttcaaaggaaagtggggaaaacctttgtccctgtgtgaaaaataacttaggaaattttggtctgacagttgtgagagggttaagaaagtcaatcattttgtaaccaggcacagcaatcttgtatgaaccatgtcaggatgttgtctgcatgccgtctttgctgatcacagtaatcgggtcataagagaaagggaagtaatagagtgtctcttagcaaccaaccccaggaaaaagaaaattactcaaacccagccatccagccagagaagtagaaagaaaaaaatattctgatagtttgctgaaagagctcagggatgagagagagagaaagagagagagacagaaagtgagagagagagagagagagagagagagagaggagaaaggagagagagaaggagggagagagaggaaagggagaaagaggagaaaataggaaggagagagagagatgatggagaagagaggccagagagaaagaggaaggtatggagagacaggagggagagagagagagaaggaaaagaaggaaggaaaaaagcagaaagaagtaaacaaaaaactgaaaccttttatttctttgttttcctttctcttggtgttatctttttttaaaatttttatttcagaaagagagaaagaggcaaagagtgggtgaggacaaaagaaaccctgtctcctaaaacaggaacttgatagtccacatcgtgagagaaagtggggagggtgaatggtagtataacttcatcgtgtcccatgtttctcatggtttccagttgcgatctggattactgttgagaagtaataggaagacgaagtctacagatgctgtgattagtgttctaagacctgtttttgaattctctgcttgttaatcgtgtagcagtcagttctacagcttactgcagtctttatagtaatgactttcgaactttgttttttctgacataaatagtggtaagaaacacatagtacattgacaagagcgtatatatgtacatgtcaatgtaatatatattgtcaatgtaatattatgctaagtgaaattttcatatatagatatatatattttttcatatataggctctttatgtgatgcatactaatgttttctattcaatttcattacaaaaattcttttggatacctgctgaattgattgtatgaccctaatgagttacattcttccatttgaaaacaccagtctaggatcagcacttgccttacattttgattttactagagtggtgccaggcagcaagttcagtcttggtgaagagtctttggccagcactgtgatgttcagaataacagctatttaagctaaatattttcttgtcatctgccaagtagatgtatcctaagagtctgtcctggtttggaatttaaggggataaacctgaggcaattccccctggactatcttcagtttagaaaagtgccacagtgtgttcaagaagcaccggactggactcaggagacttggttgcgcttgatggcatccttttctcactctgagcctggggtcaatgatggatcgaattagatgatgtcataaattccttctggctgtaacatcttggaatttatagctggatggggctccagaaaccatcctgtctaatgtctttgtttccaagatttagttcttgaaaaggaatgatagacttcctactttctttaaagatctgtgctaggaacaagtatacatgaaagactgaagcttagtacataacttcaaacatctcagtgtggtataggagtataccatgcgcacatataaacataattcgaagaaaatatataatttgttaaacactacaggtagggtagaagtaaaatataaaaactcagaaaaatgataatttaatcttactgggaagaatgtctgaatgctacactagtatataaggaggaaggctttgctgtggactttgagggaaggaaaatattgataataataggatgttccgggtagattaaatgttgtagggaatcaaagaatggagtcttaattgtctcctttgagttctgttttttgacctcattgaactcacaagggtttactttttaccactaaatattcctattattttatagctgttttttcttccaatttaacatgactttttaataatgatccattgcccacatttagtgataaggtgaggtttgattaaatagtatttgtacagtactacctcctacttggagacacacgtttatataaacacaaggtgttatataatttgtttctctgttggggggagggggaaagtaaataaggaaatataaattaatacctgttttcttttcaggataaataatatctgaatatgtttctttttctttcttttttcttaatgcaggctttatttagtttgattttacctttagaaatttataaaccatggaaataccccacatttttggggatattggaaataatctctgtgatgtcactttctgaatcagactaaggtttgtttattacatcagttacaggaaataagtgcataaacctgaattaatctgaggatgttgtgtttgtaatgttgcttccattttgtccctttccttgaagcttgaggcacttgcacatctcactcagtcttccttttctctacagctttcctgctgtcctaaagagacaaaaggcatatggctttctccagctgcatttcctgacctgtttccttgccatagatcgcttctaaagcaacattcccaccatttgaacttccattcttcctctgtcccaaacctaatattaacaataacaggagccaatgcaatttttcattataatatggtgttttacattcatagcacacacattactttatttgatccttggaactcgtggatatgtaaatggcaagagttactcttccattgtgtagattactaaaatgaaatatctagaggtaatgtcacctagtaccactgactatagtgttgtgataccaataccagaataacagggctcctgacttctgacccaagggagataaggtggatcatcttaaggttatggctgatatataattgacgttatcagttttagtaaattttattttacacgaagaaactgaggctaaaagaaacggagccactagtgcttagggtgtcaacatcagaatcagatctttgattcccagatttaacatttcctagattctgtgttctaatcatctcaatggacagtgcagatattacttgagaaacatgtttgcatttcgtgaacaactcctgtttattttcaacattttctatgtataaataatgtttgtgtaagcatatatttacttaggacccgatatctgttcagtactgttaattgccttgggagaaaacaaaagcaaaaatgtaaggcctgggatttctatgcaaaaggccaaaaagggcttttggtgagattttaaaaatagaaaaccaattagaaaataattaggtgtatagtggtaggcccagacttgaatttcagtatgaattttgaaaaagaatatatattttaaggcctacaagggcaaaagtagatgggctttaaagtttgtgtaggtaagattgtctgtgggtgaagatgggtagtgggatggtgagcaggcagagtggggttggggtgtggggtggcacggccagctttaatggagacaggcgacttcgatggggggtaggacatgaggtgcacagagcaacagttttcagaggtgcagtagggatgatccaggggatcagagaggaaaagagtaaagactctgccaacctttcagcctggagcctagagccacagtgtgagttaaagatgtaaattccttggaattaagaaccataccttatttagccatttatacagctgcttaccatggtaataattagaaattaagatgatgatcttttatgtgagcaactttcctaaataacacttgatgctgctgataaatgagacttaggtacagtgctttttctgtaggattcaggcctaaatggatctaggaggatactagagcttccgttccaaagtacgtgcatttgaatgatatgctaagtaatgccttgtgtatccttcaacaggaaaagttcctgctattaggataatttgatatgcacttgatgtttgctaatatgtttcaatcacataaatccttcttggatatttttgttctttgtggacttcaggtaagtttaaagatattccacacacttaaatatgtacacaaatgactttataacaagaaagcaaatttgtttaaaaaacaaacctacaattctgtctctctaacacatcaactccattttctctgtactcttttagtctttgccaatatatgtttatagttttcataatatgtaactaaagatagacataattttgcatttttttcacttaatactacagaataagaattccccaccatcatatttagcaatggcattatagttcttgaagtaagcatcccagaatttattgaactattgccatattactggtcgtttgtgttatttcactgctttaagtgtttttatgttagagaacataatgaaggtcttcatgggtatagctttttgagaagctagacatgttgaagaaattgggagcatgctattactagcttctatgaattggtatttactatgtatccctttaattaaattccattctgcagtaagtgtgatagctttgccgaagcacttgggggccaaaaggacatttgtaactggttaagttggaagatatttatttgtataaggtgggtagggacaggatggacaggctatttttcttggccacactcactgaatttaaataggcaatggagataaatcagttgtggcccaactagactgcctggatataatatccttttggactggatcatgtcgtttcattgcagtcaggatggctaagcatggtgatggatcataactgaccaaacagacaggttggttagaatgtatgaccagtcatagctgtgtaactgaggaactgattatattcctgtgactaatgaaaaagcccaatcttagagtagctgtggtaattataatgagaatactagtaaaacattttaaggtgttgtgttccagacactattccatgcatttcacacacacacacacacacacacacacacacacacacacacacacacagtctcatttaatcctcataatattatgaggtagtgctattattaatatccattttctggatgaggaaactgaggccccaaccagtgaaataacttgctttgagtcccatattaagtagtactacccaggcaacctggccccagagcttacttacacgtgtagtaactacactgttcttcccatttatgaggtgattaaactatggaggcaggcatggcatacctgcagaacaggactagaatctcataggtttttgaacttattaggcagacctaaggttttttacacttcctgaggctatagaacagaactaatctcttagccttaatgtcactataacgtaaaaaccacgtgaagagaattacgatggtgagcagaggataggacacttattatagttgttacctcatttatttaattctttgtttcttagagaataagattctggtacatagcaggttcccattaaatacctattgatttaaagtttaaaacaaggaataatggctaaatgaatcattgaatgcgtatgtctatttcttggaggtctaatcatgttttcaaaactttggctcaactgtagttagtgcagagtatgtatggtcattctgctagagcaaaatcttagtataggattaaagaactctgcaaattgttaaaacatgcaggtacactagtttcaaaatgtattagtttgatttattattgtcattttctgataaagaaaggggagtagtctcccctaaagtttggtgattaagtcaccagccaccttttctattttggttgttgtggtaattggtgtttcctggaaattttccctctgttctattaataatgttaaagggggttacagccgtgactcactccaggaagtcaaccatcattcgcttcctcaatctcaccaaccagtccccatgtacaaaatcagcgacttctgcaaatgagttactttacagctctcaagagagttctagaaaatacagcttttgtatttcgctgtgtgcttcctgccttggcagagagtaaaacaaaccttcatgttttgctccttggtagtctcgagataattgaccagttaggtaactagtgtagtctcactcaagagaaatcccacttgctgtctaacaaaagtcccttggcactcagatttgcaaagttaaacctggggacagttcatgaagtccagtggagtctatacttcttttatacctggctttatgtttctgtattcattattttgctcaatgtttaattaagtaatgaatattttaacttgttcaacatataactccgtatgtcttagcactgctgtgtagtagataccatcataggcactgaggatgcagtacagacatggtagctgcccttgggaaccttctatcctagttattgttcactatattaccaagttaaccacagggaaaacaagttcagagaatacataggctgtgggcctgtcctaaaggaatcaatctgtaaccgacatgtctaaagttgtgcaggataggattattccacttaattctgtaatttgttttgtctggaatttatctcatctatgcccccaccctcactcatacacataaacatggagatggaacttaactgtgcattctcgtggtacttaaatttttgtaccttggattatcaaaatttttgttcatgtcctagcttctctgcaagttctttggttaaaaccagtgtgtgacacatctctggatcagaaatgtcttcctttctacctttcaccttccccaaccttcctggtctcctagcacagtgccagatgaatgacagctgtttagtatgtttggtaaatgctaactgtgtgtgatcttagaaaagttagtgaactttgctgattttcagtgtcctctttcgtaaaaaagagaataataaccatttctacttcctaggttgttgtcaaggttaagtattatatttaaagtttttttttagtagtgactagcacttagtaagcacttactgaatgttatcattaataaatgatcttacaaagcagtagcatttccttctaggatttttttgtagtccttcatgattgatagagaagagacatgcagtctaggatttcacatcagctttttaaatataggaaaccagatgtaaatatgctgcttcggttatttacatctgacattcttgcatgattgctgacaaaacattaagtaaaaattatgctactctttcccttagatgtcaattcatggtcacattaaagtcacaagatttttcctgaaacttactgctggtaccaattttaccataggttatcttaattagtatcatcacacagtggtgcagtttgacctttggggtttgattccagtcctttgtttattctgactgtgaatggaggagtcaggcagaatgacctttacatatctttacctccttctcccatcttctgctggcatagaaaactttgcataaagaaaggcaacagagcaactgcaaaattgctgggattaaaaagaaaattgtatgataatgagaaatccagtgtactctctctcccttaatatgtgtgtgtgtgtgtgtgtgtgtgtgcgcctgtatacatcagatatatggattgatgcagtgtactctctctcccttaatatgtgtgtgtgtgtgtgttgtgtgcgtgcctgtatacatcagatatatggattgatttctttttgtttataaaaaatattcacttttcaaaatgtatttatactatgctatcattgaattcttacatatcaaccctttgtggttgacactgcagagatgatgagctccattttataaagatggggcagttttatctcaacaactagtgtgttctagatcaaggactgattccagattctcaaagtcctacaacagtaatcttcaccatgctgtgtgtatgcgtgcgtatgtgtttatcagaatatattagaagataatttgcaagcagggattggttaaagttgaatgtttatatattcttttgtagtgttgcttacattttaaataaaaataaaactgcagtggatgtgcatttgtcatcatttagaggccttcagaccccaattcgtagtttcttcacagttgcctctattttctgattactagtccctggaaggtacagtgtcagagttgaagggatgttctcaaatccccctaaagttttccattgcaatactcattacagtttctttttttcttttcttttctttttttttttttttttttttttttttttgagatggagtctcgctctgtcgcacaggctggagtgcagtggtgtgatctcggctcactgcaagctctgcctcccaggttcacgccattctcccacctcagcctcctgagtagttggtactacaggcgcccgccaccacgcccggctaattttgtttttgtatttttagtagagacggggtttcaccgtgttagccaggatgctctccatctcctgacctcatgatccgcccacctcggcctcccaagtgctgggattacaggcgtgagccaccgcgcccggccgcaatactcattacagtttctaattgcgtatgtgtgtaaaagaacatataacttcctcacagactcagctgtacactctacaggggcatcattgtatcttaggggtctagcctaatggctggtgggcactaggtgcttagcaataactattgaatgaatgaatgaaaaaatgaataagtgaattcaacacaacttttatttatttatttttattattatactttaagttctagggtacatgtgcacaacgtgcaggtttgttacataggtatacatgtgccatgttggtttgctgcacccatcaactcgtcatttacgttaggtatttctcctaacgctatccctcccccagccccacacaccccaagaggccctggtgtgtgatgttcccttccccgtgtccgtgtgttctcattgttcaactcccacttgtgagtgagaacatgcggtcaacataacttttaaaatccagaatgtcagtactaaaaggagccttttaagtattagaattcaacttaatgaaatgttgctacgtattttctctgttctcatcactgacgtagctgctttggagcatctatatctgatatttagatagtggatggcttcttgcaaacacttacattgctcacgtagtaatgtgaaccaacagattggtggcccgggcagcaacatattttctataatctgtagcatgaagccaactgaggtgtgaccgtggtatttcctgaagtggctttcttttgcttttctgttttgattattatgtggctgtggatttagttcacaccatcactgtgaagaattttcgaaacttaagaatcaagctctgtttatacattttcaacgtaagcccttaattacagtcactcctcgggcccagtgattttacagttacatgtcagattgaggggtttcgtcttgagaatgtcagctggctctgtgaagaagaagaagagcagatacgtgagttacccagaggagtgctgattgagtccaggagtctttctgtttaagagcacgttgaaagagtttgtgtgtctatttgtaaaaccattttggagatgataaaaagcattctgagacacacaaattttttttctgttttcaaaggcaagacagagacatgtggacaggttgatgaagggatcattgtgatcttttctctcagaacttgattttcattacttgaactttgtcttctatgcttttattaccaacacctgtacacaaaggtacacataatacttgcaaaaaagagaagaaactgttttcagactggggctctattaagtgttcattgaccacagtctacaacaacaaaaatgacaattcctgcttgccattgaaaataatgcaattgaaaagaaagggcggaagcaagttcttggctgcatagcttcagtctgatgccatattctagagtgaaaaggtattggcttggttttgaggcctgccttcatcacgtgaaggctctgtggcatggcagggttatcttacgctattgaacctcagtttctccatttatccaatagagatggaaagtattggcctgcatttatttctccttcaaatgacatattgtatagaagcgtattgtaagttgtaggtacttaacaaacatgaaggactgttatgatctcactttctgggctaaggagaaaatggtgggatgagtttcatgtccttttctttgtggttttgactccagcagcttccaaacgacttttgctgatgtttcctaattagcaatgctgaatctcgtgttgtatcaatcctccccattccttaagatggaaacaagtgttccagttatagctataccatgtgcctgacaggaaagaattgggttgccatcagaaccttaatttatcaatctcagtggcttaaaattttgaatttgcagcttaatattattcattaacaaagtatttttcatcccttagctttcctccagggaacaaaaggaaatggtacacactagctcttctaacaggctctcattcaataaaggatggtgtgcccttaattttgttagcatgtgtataaagaatgtacttttagtggacatgcttcactttgcaaatatagtgcataattttcaaatacatctttgactcttcctcaaacctgctcagaagctgtgtttttcctctcttcattaaaatgttccaacctggaaattttctctttacaattcagatatttttcacttcttgggaagggaataactaaataatttcaatactttaaactacaaggatgatgtatttttgttctacacagcattgatatggtggagctgtattctttttctaataatacaaataatatagggctgtaagggtttgtatcattgcatgtatatgttaagaggataagaggtatgtataaaagtaaattttgagaaattataagtataaaccaaaaagtcttatacctttagcaatgcctttaaatcttgaacttgaaagaaaaagttatgcccgactcgttgattgcatattaaataggaaaatacatttgttatacttgaactagattgttcttaggattttgtgaaagaaaatatataagcatgaatttattatagaaaataaaaatgaccctagaagaaaacctaggcaataccatttaggacataggcatgggcaaagacttcatgactaaaacaccaaaagcaatgccaacaaaagccaaaattgacaaatgggatctaattaaactaaagagcttctacacagcaaaagaaactatcatcagagtgaacaggcagcctacagaatgggagaaaatttttgcaatctgtccatctgagaaagggctaatatccagaatctacaaagaacttaaacaaatgtacaagaaaaaaacaaacaactccatcaaaaagtgggcaaaggatatgaacaggcacttctcagaagaagacatttatgtggccaaccaacatatggaaaaaaaacctcactatcactggtcattagagcaatgcaaatcaaaaccacaatgagataccatctcacgccagttaaagtgggtgatcattaaaatgtcaggaaacaacagatgctggagaaggatgtggagaaataagaatgcttttacactgttggtgggagtgtaaattagttcaaccattgtagaagacagtctggtcattcctcaaggatctacaaccagaaataccatttgacccaacaatcccattactggatgtatacccaaacaattataaatcattccactataaagacacatgcacacacatatgtttattgtggcactgttcacaatagcaaagaattggaaccaacccaaatgcccatcaatggtagactggataaagaaaatgtggcacatatgcaccatggaatactatgcagccataaaaaaggatgagttcatgtcctttgcagggacatggatgaagctggaaaccatcattctcagcaaactgacacaggaacagaaaaccaaacaccgtatgttctcactcataattgggagttgaagaatgagaacacatggacacagggagggtaacatcacacaccggggcctgttgggcagtgggagactagggagggatagcattaggagaaatacctaatgtagatgacaggttgacggatgcagcaaaccaccgtggcatatgtatacctatgtaacaaacctgcacgttctgcacatgtatcccagaacttaaagtataatttaaaaaaaaaaagtaaaaaagacattgattcattcattcatttattcaggcaatgtttggaactcatgatgtgccaggcactgttttaggaccaggaataagcaatgaccaaagtatttgctctcctgatagattataaacaaataaatatataatagctcaagctgtgaaagtcacaggcacacagagacacacacatctccaacatatgcagcaaggtaatgagataaagaattcctggccattttttgtgatacaggatagatgtaatggtttcctatcagttttatcatttttaaggtctctcttcttagaataaattattttatttgtttcttccgtatgccatttaacagggaggggaagttttctgccagttttgcacccactgtttttctttttcagtaagagccttctcatagtctgcttgaaggcagcggtcttgccacatgtgttctatgcataataatttcaggagagtcttgtccacaatgcttggttgattacggcttgtgggacaccacttaaatgactagaaacagctctctttaataaacacactggtgttgtccatcattttaagtgagcatgagagcccagcttcattttgccactccaatctcacacggcctagaagaactagtgaaagtagcaggtggtgtttgactttcagtttttctgaaatgtgtctctttctgccactctccagacgccgtgccagtcaggccctcaaggtcaaaacatcatgaaattgaccatagattatctcagccttttctttttaaaagtgtcattgtaacctgttggttactgtgtatgtcatttaacttctctgtctttagtttctgaagtaactggttttacattgccatcaaaaggcttctgtgggtttttatttttctttgtttttatttgtttgtaaacaatctccttttctaaactcatttccccaaatttccttaatttttcacggactgatgaaaatgttttgctgcttccagagcttgtcagcttctctttgtggcattgctttcattgttgttctccaagttcccactcagctcctgctttcttcaaaaaaccctttggtttctaacatctatgttttcaacatggcaatggagtgagttgcccagggaatgattggaccgtgattgttttcatggctttcttttgccttttctccatgtcctttttagctctaagcctcatttgtaagctttctagaaatgtggattctattatagaacttctgtttttctcatttttgtagttgctttctcaagagcaggtgctggtgaccacaggacgagtgagagacgagatggtgtctctcctttagcagttggcttaattaaggaggttttttgaagtgtatgggcttcaaaaagtctgacatgtgagttgtggcctgtgtggtctaactctgattcctttggatacagaaccttagaaagccttgagaaaaacctcagagatcatctatgcaatcaattctggctttacctggagggagttttataaaacacaaatgccagggcttcaacttgagagactctgatttcattgttttgcagtgggtctgcacatcagtagtttatagaaatttcccacatgattttgtgaaaccagggttgagaatcacttgattttacagggcatatataaggtccaaagcaaaagtgactcttggctgggcgtggtggctcacgcctgtaatcccagcactttgggaggccgaggtgggaggatcatgaggtcaggagatcgagaccagcctgcccaacatggtgaaaccccgtctctactaaaaatacaaaaattagtcaggcatggtggcaggtgcctgtaatcccaactactcaagaagctgaggcaggagaattacttgaatccaggaggcagaggttgcagtgagcagagattgcaccatagcagtccagcctgggcgacagagtgagactgtctcaaaaaaaaaaaaaaaaaaaattaacctgtcatggtggcatgtaatcccagctactccagaggctgatgcaggagaatcacttaaaacccgggaagtggaggttgcagtgagccgagatcgcgccattgcactccagcctgggcgacacagcaagactccatcttagaagaaaaaaaaaaggtgactctccgggattctatagcagtatggccatagagtagggacaagaacatatgcctcctcatttaccatcagtgctatttctattttgtttactaccatttactctcatttgattgtgtcaaattatctactgttgtactggggggccagagtggattcccaagcctcaaccacatagaagagtagattggaggttgttttcaaactattcaacattatcagtgggttgaatttgtaagctatcaactcaaaatataaagataatttttataacagggtctatattggattgtaaaaagagggtcataggatttggatctttagggctctgtaattcaaaatttgggatgttcattaggactatttgtgttatgttgtaaaacaattgtacttgttggcagacgtcttgggttcaagttatgattttgcatttaggaggtttgggaacgtggacaaactcccttttgagttttccttcaccccgtctttgtaatggagataatattctcatttccctgggtttttaggaaggttacctgagatgactcgtgcaaaagctaacacataatagataataatatctatctaaatagatattatttagatatctatctatattgagatatctatatttagataaagatatctatatttagataaagatatctatatttagatatctatatttagataaagatctatatttagatatctttatctaaatatctatctaaataaatgttaatttattctgaagtgtggtaagtttatctaacatttactgtagcaaccaaggtggggctaaatatggggaccaatcagaaagatgatctctgtcagttttgcctaggacgttcagtgggacttgggtaggagactgtggactaatctcacctatggaaatttgtgtggcctgtgctataactgagaggaaccaagtaagcctgtgtatatggcaaatggtagtcctctcccaaacaacatttgtaaagaaaatgcattttgcactatttcttagtgtgtctgaggctttttatgttcataaaaatcttagtgagttgttgaaacgtgcttttctgaaaaaccttggaatttacctggtttagaattagaatcagaaatgtgtctttttaaactgtattctaccttcttaaatcttttgccttctgcagcaacatggagcaactctgatacttttttctacttgagggcctttcgtagtcagagattatactaagatagcaaaaaatagaaagtgacacactagtcaaggttggtttattgtgtggtaggaaatccaaaagacgttggaagcaacaacaatagctctgaggtccttggaaccaggagttttgaaacttttactttattgcacgtctgttgacatgattccatgaatatttctgctctttctcccttatgtataccagatccactgggctgagttaaatataagaccccaagcatggtcaattcttattaatagtccttgaagaggctctctcttgtttttgattgactttctttttctttcttttcttttcctcatcctttctccttcttccattctcccttccacctcatagaagcctaatgggcttggaatagcacttataaatgcatgaatttttagaaatatatactattgttttcatttccacaataatcatgcctaacatttatcagccacttcccatatgctaggctctctttcaagtcctttaaatgtaataactataataatctcacaacaaactccatgagacagggactgttatctagtgtgttttatagattagaaaactgagacacaaagaaagtaactttctaagctcacatacctggtgagtcagtagctgaggcaagatttaaaatcaggcaatctgactgtacatctcactcttcgctactttgtccttgtgcctttagatcatggttctgtgctatcgatctgatcttatttcttactctttttactactgttgttgctcagcatagtcttcccccctcaaaaataagtaacatttatattgctattattattattattattttgagacagagtctcgttctgtcacccaggctggagtgcagtggcacaatctcagctcactgcaacctctgcctcccaggttcaagcaattcttctgcctcagcctcctgagtagctgggattacaggcgtgcaccaccacgcctggctaatttttgtatttttagtagagacagggttttaccatgttggtcaggctggtcttcagctcctgacctcgtgatccgcccacctcggactcccaaaatgctgggattacaggtgtgagccaccacgcccaacctgtattatgaattataatacatagataacgtgtaaatatttaatgtcacatattattcgtgnnnnnnnnnnnnnnnnnnnntgtaaatttgattagcgctgagacattggtattagttttttctacagatgagaaaacaattacatacttttacaaatgatacaaatatgtgtgaaatatatttaatcacatacatgaataatgctcagtgagcaggcatagaattgtcaggacctttgcagtatctccaatatataccctgcccatagattaggaactattgctgtactattgctcatcagtttaaataattatgttaattcacatttatctatatgatcagcataatctttcaaaaatcgatttacaggcctggtgcggtggctcacgcctgtaatcctagcactttgggaggccgaggcaggtggatcatctgaggtcatgagttcgagaccagcctgaccaacatggtgaaactccttctctactaaaaatacaaaaattagctgggcatggtggcaagcgcctgtaatcccagctacttgggaggctgaggcaggagaattgcttgaacctgggaagcagaggttgcagtgagccgagatcacgccactgcactccagcttgggtgacaaagtgagactctgtctcaaaaaaaaaaaaaaatctatttacattgcagctcctttaggaggtttactacttgtaatactgtagagtcttccagagtgtgcatccattgtatttcactgattgatttcgttagtgatacacctcaaagtgaggtagtcatatacctccaactcttggctgccacaaatgtactgtcgtgagcattttgtatatgtgttcttaatgattggcagaagttagctcaggatttgtggctgtggggagggtgcttgatcatagtgcattttaatattgagtttcactaggctctgtgttttttgttttttgtttttgtttttttttaaacataaaggcttcactagggttactttcccccagtaaagcattaggattcttgttttcttcatgccatcaccagcacggggtattgcatgactttatattttttgctaatatgatgggtatggaactactagtacctcctggtttctgcttcttttccatacatagtaaacagattcagtctctcaaaattactgggaagaaaagtgatttgtttcataagtgttaagtgtctgtttctggtcatggctatctctgggactgtggtcatagagaggcatactggctattcagcagggtttctgagtgggaaaaaaatctcttgaaaatgtggtgttgtcaaggaaggccattttactgatgttacttcagggcccttctttcattccttcatatttttcaatatttattgtatggcaattgcattgtagaaacttttctaggtacttgggaacaaaattgtgaacaaaatagacatgtcctgtggtttctctggaacctttagtgtggtcaaggggacaggcattaatcaaaatactcaagcaaacatttaattacaaactatcatgagtgctacaaagggaaaggagaagagctctggtatataacggggtagatgatctgtgtgtgcttacttgatgcaggtgtcttttggggatgctataagatagaaaatttagaggataaggtaaagcagtaggaggaatattcagacagagagaataatgtgtgcagagatccacaggcaagagggaatgtggcatcctcgagggatagtgaaaccagagttgttttgaggacttttattcatttattcaacatatttttatggagtgcttactatgctctagaatatgacagtgaacaagacagaacactaggagatgtttgagatgaggccgaaaaaataggtaaggggctcgccctattgtacactcatctcccttggtttgtttttttgtgtgttttcagagagaaacagccgtacttaacaatctggtttcagattcttttaaccttctgtttgcctttctctgaaggtgctacagtttgtttgacaccctcttcaagaggggccagtagaactaaggataaaatttttaagtcttcccatcaagaaatgtgtcgttaacattaattaagtttcctcactgttatcaatgaatatccctccgtatccttctctttcactagctgagcattatattatgtgttgttcaagggcagatagtctgtgaagaagtgctttaaaaactgatagcgtgtgggctctgagcatgttgtgcggctgactggcccccacctcctcttgtttcctttctccccagaaaggcctcacttgctgcatgacaagtcaggctattgtttgctcattcgatattgtcagctaagatgcttcacaattccttaagaatttattattgttgttgttgagggatgatagagtcctcttcttctcatttaagtgacgtgtatcgaaaaggaaaaatgacaaataagaaaggacttgggaaaatttcctccactcctgacttccagacctttagaacttaatgctttccgttcagtacttctgccccctaaccttaaagtcttgagagaagaatgactggtgttgacaggatgcttgtttactggcttctgcctaatttttgaggcatgaagtggccatctcatataaagcaagtagttcacatcctgggactgagactacaacctggtttctccttgtcttgtttcgatggagttattctgtatcctgtgaagaatctctgttttgtcatattgtattccctctttaaatcttttatatctctttctcgtactattttgcccctgatgctgtttctttctttattttaagctttagattcacctcttaagttgtcagcccacatggccatacatgaccatggttcttactggtgtgaagaaagcagattgtagctggttgtttgagatgccttcttaggtggaccaacctctctcgggttctttggttttatctcttgctcttcctcttgaatgtttatgatacttcctggtcacgtcatttctctttgactctttctttcttccttccttaggttccggattcatacaggtatgaatctacttccccatctttgccaaccctggcatcgtgcccccttgattccttggcttttcacaggctagatgcttaatggactctggaagcctttatctctaggacgcctttatctgtaggactgggcttttttgtttgtttgagacagggtctcactccgatcacccaggctggagtgtagacctggggtttctaaacactcttcaccttgtgctcagctccttgtatgataccgaccggatcctatccatggacaataacaatcttgaatgtgttcacaatgcctgggggaataagtcccaatccggccaggaaatgctgatctccttccgacgggatctgcttgtctcacctcagcgccagttgcttccctttacaatctctttgctggccaggttagaacatgtgctaattctctgaaaacacaccatgctttccttcctctgtgtctttgcttgaatggttctctcagtccagaatacattttaaatatttctacttccacaaatctattctatagtatttatcaaaatagtaccttccctattaagtctcccctgattctttagctgaaagttattttgatttcctctgagttcctgttaattttgtgggtacttctgttaggcttcttagcattctacagataaggagatgggacttcgtttaaacagctctgggccacaaatatagcatgtagaactgtggagattctaactcacattttaacctaaaatgccatactctttttatcctattacattcttctcattccatatatgtctatcttatgtagtatgattgaaggcagggtgcttgaataaggtgtaatgtttttgactacttagcatatcctaggcactgtgtgacatattttgcatttatttaatttggctgtcataaaatttctgcaaggcaggtacagttactattcccactttacatatgaggaagtgaggtatggaaagattatgtaacttgtccaaggttaggcagctagcaggtgacaggcaggacaccagcttaggcagtgtggcatcacagcctatgcttgtaactgccgtgcaatgctgtaggtaagcaagagctaacaatataagcctgaaactactggctttctcagttgatggtatttgagaagtgtggtctatgatattcctcagtaactttcatccatggaaaaccaacatatctcatttctataggttttaggatttaaatatttttaaggatttttctgttgtagactttaaatttacgatttgagataaactgaatgctaaatctttcctgcttgggaagaattcagatgtaaaattgtaatttgtattattggaaaacaactccagttttatgcattctatgcaaggatgagctatgtattagttcattttcacgctgctgataaagacatacccgagactgggaagaagaagagggttaattggacttacaattccacatggctgggggaggcttcagaatcatggtgggaggtgaaaggcacatcttacatggcggaagcaagagaaaatgaggaggaagcaaaagcgggaacccctgataaacccatcagatctcatgaaacttattcactaccatgagaacagtatggggggaccatctccatgattcacatgatctcccacggcatccctcccacaacacgtgggaattattggagtataattcaagatgtgatttgggtggggacacaaagccatgactagaataaaccacatcaagttacctgcttatctaaagttttagaaggtgttcacaatgttattcgaaagccaacttagtgtagtgagcatttggagaagcatcctttatacaagtgagatgacatacattgttaatatgtgcttttatgtttgtctttgcaagatctgagctagaatagaatcatagctctagggccaattagagtgggagatagtttaatagataacacaggtgctattttgtcaagttgcatggtttctggacagtttacagagaaaaaatttttagctgagagcctgatgaagtcttaaggctattattaatagtaatatttggggactagcaaagtgctcacataaaaagcaccaacaaggattaaaaaaagagaaggtactgaccagattcactgccttctattcccaaaaagattattaaaaggttcatgtaaatagaatatgcgcacacccaggagaaagtgatttatttttaagctgaagccgaggttttacacatccctgataatagggtttaattaatgtttggagtgaataaaacacactcagaagaagtgtagtcatatccttaatttccttgattggcaaagtaattgatatcatgtgtgacatttgagtcagtgctattttatcagtcacttgctctctgcgagacagagactgtgattgaaaacagtaggtatgggtacttgattttaaaatgaactctatcataatatactgattacagaatcagaagggcaatgttggtgaatatttttgggcaaaaaatgactgtaacctattctagatatggtaaaaccagctctcagtacttaccctataaagagaatattggtttttttcagaattttgcagagggtctttttacttagggaacaaagagaactgtaattgtcaaatgtggttgtaaaacggtaaatctatttttgttcatggctcattcattcacttggcatttaaaaaaaaatttttttatttgtttattttagagacaggattttgctgtcacccaggcttgagtgcactagtgcagtcatagcttactgcacgctcaaactcctgatcttaaacaatcctcctgtcacagcttctcgagtagctgggactattggtgtgccccaccacacctggctaattttctattttttgtagagatgggatcttgctatgttgtccatgttggcactgggctcaaatgattctttgctttcgcctccccaaccactgcgattacaggcgtgagccaatgggcctgacctcatttggcgtttattgacaccatattagaaaccctgtactacgtataaagattattgggggaaacttctcagctatgcatgtgtgtacatgcatatgtgctcattagatcttggtgtaagtacagtttttcttctagtcatggtttaaaatatctgaaaaggtgctatggggacacagcagtttacaccaacagggaccttataattaagtagatatgactgtaacatagagagcgataacgttataaaagaaacacaggtatgttactataagaatgtgatgaacaaatcatttgataaagatatcagcagaggcttagtgtgggagatgccttttggctggacttgggcagttggttaattctgaatggggtttggggtaggggagtcaggtgaggattggtgtgtgtaggtatgcctaaaggcgtgaaaatatttccaagaaggattgcgtttctttttgccactgatggcagagtcaacctcggcttctgagtttaagaagagtgtgagcacctcgagcaaataagtcagctaaacaaatggagctgaggcattagaaaacgcctgtcgatttttaagaaaaggagctcaactctaagagtgcaaggaaaaataaatgcgtggagtgacaggataatagtctataattacttttaagattgctatattgaggctgtgacagtcacttagttcctgagtcttttcaggaaagggtaagaggtaactagccagagctggagtcactccttgtagaagttaggtggctttgatagtgacattaactcttcagaaactccatgactattatttggtatccaaagcagaaatttatgaaagagtcacagaattttacatctgtaagataatcttttgaaaataattagaaagaattcaggtttagaatatacatgggtgatagacagagtagtgaaaacatccccagaatctggtcctgctcaaaaatggagcagagtttcttagaatgcactgacgtcttcacattgaccctgcacagtaccatccctgggagatctggcaaaggagacatttcagaaatgtgtgagttaggtgccatggcattaagatcttttcctactgtacaacttcccgtttttaaactcaccatcttgatgtacagctaactaatgtaattttccaaagtttctagagaagacaacaaccttattgagatactgggacatctgggtgccagtctagttccagttacatcttacttttgaaagaaaggaaaatccattaaaattagaatttgtctaggaagcatctccctcccaggagcggagtactagctcttcactatcattggtctaagcgcttgaaatgctcccatgtttggaatcccattgtttatgtatcagttctcccaacacttccactcgttaggggtatgatttaagagttaaggccaggtgcggtggctcacacctgtaatccaagtactttgggaggccaaggggagcagatcacgaggtcaggagatcgagatcatcctggctaacatgatgaaacactgtctctactaaaaaaaaaaaatatatatatatatataaaattagccaggcgtggtggcacacacctatattcccagctacctgggaggctgaggcaggagaatcgcttgaacccaggaggtggaggttgcagtgatccgagatcacgcccctgcactccagcctgggtgacagagtgagactccgtctcaaaaaatatcctttgaggtcacaggattgatgctatacaaatagtaattgtattattaatgatagaaatatgaagcatattggtattaaactatgagctgatacatggagcagcagatattgtatttttagttcatttccttaggcaaactcaaatattgtactcgcacagttacctcaggcattcacaagttagagttccagtgcaaacagtttgcagcaaatatgaaccacagtggtactattagttttgcatccactaggcacattttccagcttctgaagagataattgaaggagaacttggatatgggctaaattgtgtatatggataaaagattcagcagggatttaagcactttcgacccacatgaaacattaaatattagctgagactcacttgaagatggacttcttgattttgaagagttgtctgcatttttataaaactacatgagcatagtgcattttaactaataaaggaagtgaacacagttgagatgcattatctttcttagccttagggtactgggtgttactattataatttttaaaaatgtatgcttttcaatttttaaacagtttattatggaaatgtttaaacatatacaaagggatgagattactataatgtaccgccaggaatatattatccagcttcagcaataattgactgatggccagtcttgcttcacctatacacctattcctttccctcaccctggattattttgaagatagtctcagatattacgtcagttagtcacttctgcaaattttagtctttagtaggtatgtctaaaacatctctcaaccataaataacatgtcaggagagctcttttgcaagatgtttattgatcttgtgccttttgcatgagtatgggaatggctactgttttatggaaaaggagattaaagaatgcagtgtgggttttttttcatggccgatttctttctttccttctttttttttttctggaagtaggattggtttggggcatgatgtaggaatgttattgggtaagggtttaaactctatgtggcttctgtggtttggagagaccccaggttgatctgatctactatagttaacaagtcagataaactagattttatttgtaatccttttgtactgaagcccaaacaactggcattcttaaattagctagaatatcacttagtattccatttatagaagagttgtggttttaatttaaaaaatactgtaagtggagctactgaaataggcccaagtttattatagctaatacttcattacagagacttccgccattccctaaatctaaggagggggttgtttgtataccaaacatagtagatgtttctgtttgactagattacctagaaaatggcacctagggtaacaacttatgtgcttaatttgaatgaacacgcccagaaaaacaggagagaggaaaaaaagaaaagtaagagaaaagaggagagagagcacatagagagaggtacattatcaagctgtccacagcttcctgacaagagcagctgagttcttggtatcacagcacatcttcacaaaggcctcataaactagcgtgtctcagaatagttcattaataggagggaggaagaagaatttacgtagcagttcctgattcccatcgttcaaagtacatatttcctttttagtattgacttttccaggaaacttgttttattagtactcctactttccaaaataattctctatgtatggttttattttttaaaatgaaaacgataggaaagaaaattcttcgaattcattgtcatggggactcatactcagagaattggatatgacaatactcaacaccaaacctagttctgaaccccaatatctgattattatcaatagaatcagatcaagggaatacttattttcctcttagcaatctatattgattattcatgggggggggttctttgttctgagatcaggagaatgccctggttatatgtccatgtgtggccttagtcagtttctcatgtttcttatgttcatgtatcttttgcttaaaattggaaatatctaccttcaaggaaatactgtcgaagacatggttgacaatttcatagcagcagtttgatgaaatcattttgcacactgagtaaattagtcaattatgtaaaaattttatctgtagttttgtccaccttatgacaaaaattttggagaaaaacaacagccttattgatttacagacatctttctatttatcagtactagcatcagctttctgggacatgtcaactttcctgtttttgagtctgaatggatccataaacctaaacttgctgcaattggagtgcagatatcaagactattgcagaggtcttctcacacattatctgtgtgccttgagaatgggacctctactttggattctatttcatccatcctatacaaagagatcaagcaagataatcacgtattctctctgctttggcctttgaagactttaaatgacttagcttggtattaaatatttcatccaggagaagttgggacttgaaaatcaggctttgtcccttgcagaaaacttgactggttccaggcgcagttactgttggaacagaattctctttaatcttttgcggccattatcaacattgattttattccttgtgcagggcagtagagttccagcttctgtgttattacttttaaaacatggtataattttaggaaaccattttctttgtttctgaagtgtatgtataggctatgttcttcacattagatttttattttgaaagaacatggcaaagtgtggaaaacaaggaacatagttaacatgatcaagatatctgaaattgtgtaattagtgatagcttggataaagttgatatgaataagtaatatagagcagggagtgtccatgaatggagtggagttagcctcatgtcaaagtttactgtcccccagccagacctcagcttgtagacttagtattcaatttggttactctactgtgaaagagatactctcatctggagaagaccagccaagatagagagagaactaggctatgtcttgggaggaactgttgaaagagattgtaaggtgactttaagaaggtgataatcagggataccagaggaagacttagaggactccagaggatagaaatatgccagaatacagaacttaaacagaggcaaattttcattcagtacagaaaaagagtttctgacaaagtgatctgaaggtagaatgggctgtcctgggggatggtgagctccttcccactggaggattttcaagccttagcctagtgacccctaaggatatcaagatgtacaagggtcagtttgtggtttaactaggtgaccttcccctccaacctaaagacatttttgttgtctggctagacatcttacttcccatagtcttttaaaaaataaaattaaaaggcaataaataacttctgacaaaagaaaatagaagccatgttcttatcacccagtaatgaatatattgatatggttctttcaagtaacttttaaccttttacaatatacgtatcaaatgcatgtatcataggtgatatgttcaataatttttgcaaattgtgcatttttgtttaaaaaacacccagatcaagaaatagaacctcactagtcactcagactacttcatctccccatgaaaaacaccattatgatgtctaacagcatagattagttttgcttatttttgtatcatatgtaaaaggaaccacacagaatttattaagtatttttaattgtggttttcgttttttgactcaggcttaaatagctctctttttattgtccacagatttttatatatgcctagtcttgcaaagttattgtaggcagcaccttaatgaggttttaagggaattttgctattctaacattggaaaatttaggctgttttcagtttttatctgttaaaatctttgggcttgtagctttcctatcccctccacacccatttcttcactcatatttctcacaatatttcaaattgatttccatatgtggaattattagatcaaatggtacaatgaagttttaaagtttgatatttaccaaattttaatccaaaagttaccaaattatacttgcattagtaatatttaatagtgcctattgctttgttttaaaaaatgtgctaattttatgagaatggcttttcttcaattattaatagggcaacactttctttcacgtttgtaaactagttatagatttggtacatgtagtcagtcactgtgctaaattctccttaagaattacgtctcttttttgaaaaactaacttttaaaatagacattactattattattattattctcattttgaagatggggtaactgagaaacagagatactaactaatgtagctaatgaagtgaagctaattagtgtcacatttggagtttactcaaaatatgatactcttcagtttgatatgctactgcccttcatgttatcctttttaaaaaatatttttaaattgattgtatattattgcattagcatatttagccaatttatatgagcttcatatatagcatatgtgtgtgttaccttcctggtaacacaccaaatggctcatataaatttagccaatttatatgagctttatatatatatatatatatatatatatatatatatatatatatatgcgtgtgtgtgtgtgtgtgtgtgtgtgtgtgtgtgtgtgtgtgtacttttttgggtgtttatttttaattttgttccaatttagaagcatataaaagtttgtttcaatgtgttttttaaattattcaagttgtaatcaaactgaaactaattttggtcaaaggtgaggctctacattgatttttaaataatttacccgtttttccaatttcatttaataaataatcttttctagccgagcacggtgggtcacacctgtaattccagcactttgggaggccgaggctggcagatcacctgaggtcaggaatttgtgaccaacctggccaacatggtgaaacactgtctctactaaaaatacaaaattagccaggcatggtggggggcacttgtaatcccagcttcttgggaggctgaggcaggagaattgcttgaaccaggaggcagaggctgcaatgagctgagattgtgccattgcactcctgcctgggaggcagagcaagactgtctccaaaaacaacaacaacaaaaataatctttcctttactgattcatttgtggtgtctcttttactgcatatgtatgaacgtgtggggtgtatgtgtatgtgtgttttagacataggatctcactctgttgcccatgtaggagtgagtggcacaatcatggctcactctgaccttgaactcttgggtgcaagtgatcttcctgtctcaacctccagagtaactaggactataggtgtgtgtcatcatgcctgactaatttaaaaaaaaaaaaagtttagaaatggggtcctgcaatgttgcccaggctggtcttcaactcctggcctcaggttgatcctcaagtgattaacctaggcctcccatagtgctacaatatatttggcaattatatctgcgtgcacggtttcttcattaatgtcgtcttattcctgtgtaaataacttccactcccatttcattttagattttcttacccatctttgcaatatcttcaaaaagaaagaagacttacaggagtccaatgctgcataatattaataaacttaattttcttaaattttcttctctggcagagaccataagcagtatgatatttagtcatgctaggataagacctgagtagaaattgtactagctatccagctcgtttgttaatttacttttgatgagacagagaacggtcatttaaccagcttttgttcggtgtctgttcggtactaggatctcctgagaaacccttgcatcctttatgtacttggtcctcataacattcacactaagcattcatggcagagccagcactggcacctgtggcttctatgttgctttttaccttgcattataccaattcatactaagaaaattgaagtgtgccctaatcacagtctttcatttgtaagtcgactcaatacagtattggatttggagttttgaaagaaagtaaaacctaatttccttccccaaagctattattattctatttagataaatggaaaagcaggtatgtgttgaggtttctagcttttaatctacagtgtttaataggttttaagttatttgttattgaaatcttgaagaaaacacataagttagatttcttgcttttatagcaaaaaattttttggatggcttagggagtcaagtgaaccattttaaatacagtatgactaaatctgaaaggcctgatatggtagctgctagccccatgtgaccatttgaagttgaatttaaatctacattaattaaacttaaataaaacatttgtaaaaattagtctctcagccactagtcacattttgagtgctcagtagccatcccttgcaagtattaggacagtatggaacattcccaccactgcagaaagttctgtggtgcagtgtccatctagatgattctacaaatggaagatttaggggaagaggagaagtaagtagtgaggtgtacctaattgcttctataagttttagtacaaagaacccttcctttaaaatattgatatttggtgaaacattcagatatcacgttttaaagtgatttcatggacactaatcaacagagcaacaacatagatatatcattgactacaaggatggatcaatacttgttctacctgtttcataacttagaggattatagggcactctataacacagcaccttaagtatcagaaaaataaaggctgcaggtgtttgaatgaattgttggatgttctgtttttataaacatgtggtcttctcatatttacaccccatttggtttgggatgaatctccattctgagtcccttaaatgttagggaagcttaagatgagaccctttggattccacacaccaatctaatttcggacccaatttgaagctgaaaaaggcttactatggaaaaaaaaaaaaaaaaaagcccaagccccaaaacatacacacacaaaacaaagtagaacaaaaggggataccatgatctttttatcaaattaggataataggatgacatggaattcagaagacagtgtgatattctctgggaatttgttattttatgaatgttcctgactgaaatttaaataaaaataaaatccagagtatacttccccctttagtaacagatagaagtgacaccttgttgaattccatttctggattactctgtttttattttcatctattggcacccaggacctggtgtttggtttgtaactatgattagtgggttggggttaatatgagaaattccgcaatgagtaagtcggaactattcggtgttatgtccaagaaagctcacatgtcctagttaaggctgtgtgaagtgaattggaccatcctgatgtggtggccccaaacactgggcttaatcctctggtgtgactgctttcacaggtcttttcaagagcctaagtaccataaaatattctcacaaaagccttcattccaaagaatgtgtgtgtcggctcatgtcaagagcttttagtgtagaacaatgtgtcgaaaaccacaatctaataaacaaacagataatctagttcagttttgtctaagtaatataatgtctttattaaactatttcctgcacctttagctctattcagaaggagaaagttctgcgtgggaatgtgtgtatatttactcttaataggaggccgtgtagctcctgtgactggatgtcttgtttttctcttctgagtagctcttgttttccatggtgggaattttccgtcttggtaatttggtattttacttggttttcattgtgaagtgtggaagtgtgtacaccttagttttagaaatgttgttttatcacctgcatctcagttatcaagggccaagtcagaaagttctcacgtgtttttaagcctttctaccagaccttgaactatccattaagtcaaaggggataggctatttccatgaagaaggtttagggattcctggcagggcaggaagaaggggcaagatttgcgaggatcagaatcctaggtactctcctttagactgcctggtgactactcatttgtcatatggaaaatcatggctcaatagttcagtagaatataactttgtggaaatttctgaatattaaaggcttcattttcaacacggcagtgagatgggagagtcagggtcattcattggtattgtccacgttactggttgctttttgtctgatcttgcctggagaattatttttaagtaatgtgcctggaaagtgcctacttacagttaggttaacggccatcttatggcatcaggaggagctttctggctatacctattaaaggaagccttagtctcttattgccattaattgacccttgcattttgagtcatagaatcataaaccatcagtgtcgagagggctactaagcagtttccttggattaataaagcttgtatcttctttataatattcatgtcaagtggccttcctgcctctacttgaatacttccagttatttgtcaatctcacatcctcaaaccaggtaatttctatttaatttttgcccttaatcttcagggtttataaatacctattgataataccttcgttaatatggtgctttgaaactcttcatttttttccctaaataaacttgtaatttttctttctatatcatgacagtagaggctcatatttttatgccttttagtctcagttatatttttgtctgaagagctaaatatacttgaaaaaagtggtttctgtcatctcagaacatatatatatatatatatatatatatatatatatgctgggtaaactccacctgtttgctaatcataacattcatttttctcaatgtgatggattttgtcaccacctccccccgcccccccgcctttatggcattgctatgtgaatcattgcaaaaactctgcactaacatttttcattctgtttataaggttcaaatagatagaacaattttctctaggctttagctctggtgtgtataattctggtcaggctcctaatctttttgagggatagtttccttatccataaaatggacctaagaaaagcaatcctatggggacaatataaaacttgtttagctgcaatcttaactcagacttgcttcctgaaattcctcaatctaatattaaataggggttttttgtttaaatgtggtagcaagattatagttacaaaaagaatagaacaatgcattaaaaaatagaagtatcttaaataatatgtttaaattttttaaaaatatgctgaaattataaagaaattcttagaaaatcatgaggaactctggaaaataggtaccatgaatacaagaacttttgctcttgtctatacttgtccttgcactgatgttcctactctgagtctagcactatgtgcagacttcccttcttatggtatgttgtggtgagcagaataatagccctcaaagttgtccacgtcttaatctctggaacatgtgaatatgttagggtacatgccacagggaaattaatgatgcacatggaactaaggttgttaatcagctaacctaagataatgaaattatcctggagtataaggatgggcccaacgctattacaagtgtgatagcaaatggaagaagaggacagaggaggtctttgaagtgatgtgatgtgagaaaaacttaacgtgtctttgctggctttgaagatggaggaaggggccacaagccaaagaatgaggagtagctttgagaagctggaaaagacaaagaagtggattctctggagagactccagaaaggaatgctgccctgccaacaccttgattttagtgcattgatatgcataactgatttctgatttatagaacagtaagataaatatatttctgttcttctaaaaaaccaagcttgtggtactttgttgtagtaacaacagaaaacgaatacacacaatatcatgttaaaatgatctgtttatatgtttttctcctttctaggcaatgaattcctcaagggtaacaatgctatctttgaaaaatcattttagtccatttccatatgaaaagaatacgaaatgtcctgtcaaacaccagaggtggtatttactcagtgtgtatgcaccatatgcctggcactgccctgggtattttgctttgaaaattttatttcctgtctgtttaaccctactaaatcttaactttcttatctgtaatgtgagtctatggactagatcaggtttggcaaacttttctgtaaatctggtaactaaatattttaggttttataggccatatggtatttgtcacaactattcatttctgccactggaatgcaaaagcagccatagacaataagtaaatgaatgaccttggctatgttccaaaagaactttatctacaaaaacaggaggtggtctggatttggccatttggctgttgcttgttgacctgtagactagcggacctctttattctgttctaattcctgtctaatatgattattctgtcagtttataacattgtgccgtgtcagttaagccaaggaagtgccagtaagacctgaagaaggaactcaagtgattggatgggtctgtttataagaagaagcataatattggagactcaagtgccaggaaggggactgtcaccatgtccttggcaaatggacctgggacaaattctctttaggatgagacataaggagatccttgaatgccaaagctgagctcgctgaacttgaaactcagtgaactggaactactgctggaggaataaaagggagcaataaatcctttgcactccagaatgaaagaccttctgaggcagctggccaaatgaagcaggaggagggaacaagttcctcactcagctaaattatgtctttgggctggccgacctggtctgctaaaataacaaggtggctgaacttctgctcagaacacgtcaccaaattttgcaatttgggactgtcttctatcccatgacttcctaatctgaggaagtgaagaaagcagagtgaatgaaacccaaggattgacttttttatggagggcctccttagagacaaaagttgatttttcaagagaaccctttatattgtgaactctgtattctaattcaaaaaccgttaagttcttggatgaagaacatccaatagattttggaggtcttgtaaactttgctattgatctgggacttaacctttgcagatgtgggactgtgtgtttatacatcaaagtgggtaaagaagagcccatccagagctaggcagacggaattgggatatgtttgtttgtctgattgcccggttgtggtggtggcggttgttttgacttggttacatcatcgcatttttgaggacaaaactaccctctttgattggtatgttacaatagcttgtttatgtcttgcaaattgttcgagaacagtttgtccattaaagaaaaaagtgacctagtaatactcccctacccaggggaatgtcgggttaatcagttgcacaagggcttgatatgccaagtcagtactaccccgaggctccgtatgcagttcctttccaagatttttaaacattctggggagaacacaatatttgtttatttggcttctaggactttgttttgttatcgttttagttacggtcttatgcttttctctcactccctgtctttcttttacccctaactctttggagccctggtgtgctaagagccatgttaacagtaaagcatctattcaataaacacttaactatattttatatttgagcttctaaatgtttgtgaagaatgtgtttctgggcaagtcacataaagaataatctcacagtaaaaataacttatatttatgtaggacattatagtttttatggtatttctaaattcagtaaaaggcgaaagatttataccatctgaagaaaaaccagggtgttgtatttttaaatttaaatactttggtctacacaaccctgggtagtataaaaggtaagtgctgttgctctcatttacaaacaaaaatattgagaatcaaaagtttcatgatttccctaggttcacacacatctagtaaatggttccaagtggacaaaaacttacacattttaatgtcgcagagctatttttttatatatgtaagttacctaactgcagcagtgattgccgagatcatccctatggtgatgttcaattgagtctccctatttcaatctttcaacctctcttttcttctctctctctctcatacacacacacacacacacacacacacacacacacacacgcacacataaaccacatacacacacattttgaaattggtagtcactcagtttctcaatcttcctttaaagactaatttattgggctagaatttatgggtgtagttgtcaaaaattcctgcatatacccactcaggaaatattttcccaaatcttctccatctcaactctgtgaggcattggaagaggtgcttttaggatagactgatgactcatatatgatgtctgccctcagggagcacacagtttagtgaggtaaatgtctcatgaatattccacaagatccaccttgataatgctctaaagttactatagagggctgaaggtgggaagatgctttcgtctggtggcaaaggatagtagtgtagggtgacatgggcctccaagaatagcttgggctcagatagtggagaggaaactcttaacggagacagaggtgtgagcaaagtcttggtgtccaggaagccagaggaagcattctggcagattaccgggtatgtggcttagcaaaagtcattattctgaaatataaaatgtccagtgctgctgtctgcagtattagtctcaaaggatacatactcaccagtacattccagagtttgttgacaaactttgacaacaaagcttatcaagtttctctccattgcctcataagaggcccatccagttagaggattcctccttttcagaatgagatcttgtcaaatcttgggaggctcagaacagacgtttaccaagcttccaataatactctcaaaccataattctctaaaacttcagcataattgccataaaatcaattgaccatatattagagagtttatttctgggctctgtattctattccatttgtctctatgtctgtccttatgctaggaccacactgttttgatcactgtagctttgtgataagctgtgaaatcaggaagtgagtgtcctccaacttggtccttttttcaagattgctttggctattcaaagagagccatgatatttttaatctagcaacagttgtatcaaatacattggaaaaacctgggtcaggaagaatgttgactatctgggctatttgtttagtctagatatgaggtaactatgcattaggtattttggtggcaaaggagatgcagagcagtaaatgaattagaaaaatttggtgtaatttaatatagcttgtttgtattcagagtgggtggttaagataaaaaggaaaagggttttccacctttgtgatagggagaattgtgataaggtaaatagaaaaatagagcacacaagaggaggttagcaggtctgtgggttatcctatctaaattcagatttgagcactgagctagaggttcatttgatgatgctcattcagcaatcagaaattcagaggtgaaatcaatgagtaccacaattattctgggtcttattttacttataaatggtgtatttatttagaattgcttttttaatgtaatgcatttatggttaccatggcacaagagccagatactgggaagcagttggggacagcagcaaaaatcaagatctggataaaggcagcttcatgaggcttctgtgccttacctcagctaagagtaaacagagtgctagatggctgttgacatgtgttttattttgaagtgactattattactaggatctgaaatccttagccttgatctcttggagcctaatgttcctgttctccagctgagagagactaattcaccatcttgtgttgtgaacactcactcattttaactgattacacctccaatgattctcaaatcactaaaattactaattgctattccttacacatcaaagagtgaatcctgaataattaaccccaaataaaattagatgaattggcccttttaattagagtccctgctgctgtttgttctgagcttccttttcttactgttaagagacttttagaatgattaaaactgtttaagacttaaacagccagtgaccttttaatacaatataaatccatgaaagcaatatttcagctagcaggtggtgaagtaaatttttagagcaagtacctgtcagctccagtattcctttggaaaaaaaaaatacatgccaaaaaacaaccaccttgaaatgaaatgagtgtctctatttgattatttttaaagcattcatgcatttgctaagcttcagacttgatgaaataaatgtcagggttgaaggagagtgagtaatggttggcatcattttatataaatagtaacaagaatttctcagtgagaagaatttgaagtcatttgtgcataaaagatgaatactggataaatcacagaaggcccctggcctcatgtagccatccttgtcttcggggattctcttgaagcaagagaatgagccccaacattggggaaaaggaagttttatggggtttaattgctgctgatcatcgaggcaggattaccagcctagccatgctgcattcagcctggattttgttggagatattttacatgttcctgctcgtctattccaagtctcctaaatagtaagaacctcttctcttcttcatagtcttctgaatttgtaggggtgtagcgggttttctcaccattcccaagaagtctcagtttctcacactaagtctgccatgtgctgtggtcagtgtgtccttagctagaagttaagatatttggggtcacagtgggctgcctggtgtggttctacactctttgactgtttctctattttttttccatggtggaaaatgtattcatctataaaaaaagttattggactagttcaatgacttactttttccttaaaatttaaaacataaattttaactttttattctgaaataatttgagaccctagagaacggttgaaaatagtataaaggattctcatttagtcatcacccagttttcccaagtattgacatcttacataaccacggtagagttaccaaagccaggtaaacactgacataatacttccttctaatacataaaccttatttagatttcattgattgtcctagtgatgtctcttttctggtctagaattatatccagaatcacatattgcattttattgccttgtcaccttagtcatctttaatttcagagagagagttgttcaatctttgtttttccagaaggtcaatgattcttaaccagcgctatacgccagaatcattgaaggagctttgcaaggtccttgtctgggtcccgaccccaaagattctgaattaaggattctaaagtcaagtctgggtgtatgtagtgtgagcaagtgccccaggagattccgatacacaccactggttaaaagtcagatgagtttcaatacctcaagctaagtattttcaaattctgtctatgacatgtatccttccccttccctcatttctctgctctttcttcatctccatctctcttttatgggattaaaaagcaaatttaaatgtctctttatactcttaagggatatacatatactgggtaaggcttatcaacagatcttttattggagaagatcaatacagtacagatggttgcaatatttctgaaggctagggtgcccccataaccaggtggtgacttgaggatgaagactctgttcctatactttgaagacataccctcagtaagataatgtgaaaacaaacaaacaaaaaacctagctagatggctacattaagacaggttattaactgtctagctgttggtatcatgaaggacctatgacccaccgtagtacattgttgaccttatgtcaatatttgaaaagtggcaaagttgaccatgggaaaagttcatgtgttcattgtctcaagagttctattcaatttaatatatgtagttttgtaccaataataatttatagcaataatatcattactgtttactgagtatctcatatgtgttctatatgctttatgtagagattataaaacagagagtctgccctcaaggagctgttaatcaggtaggggaaaccaatagttatccaattaagctaacaaagagcagaatattggctgtaatagagcttcagcaggaaggaagcctgcattatcattgacatgtcattgacaatgcattgacatgcattgacatgcattgacatgagaatggttccctctatagccaaagacagcagtggtgaaataaattaaatgccctatttaaagtgtttttattatgaaaccacactccctcaggcaccatcattgtctttggaggggttgtaagcttctggccttaatgaccaccacagggtaatgtcccaatcctaaggggaaaggatgtttttggactattctgtcagcactctgatatttgtttgcaagcttctttgtttttactggtaaattaagactttttgttgttgttttcctgggatgttgcctcattttctgtccatcacatgaatttttagatttttgtttcatttttaaaccgaggtaattttactttttcgcattggagctaaagatatctcactagctgatagaagactgatgcattaagctcaactcattgtcctatttattttgaatgctcatctttggaagtcaaaaatatatggtgtggtttgttgtctggatagcaattactatgtttttgtaaaacaaatgatacttggtggattcaaaagtgctatttggttctagtcgatgtgcagagctagactattgtcttaatttcatacgatttgaaatccatttaatgttttctactgagaaattgaatttgttatccaaccactgcatgacagagaattatagtatgcttgtatctcatgtaatacactgaggtgtctcacatttgtacagggtacttatttgtgattataaaagaggacttttaaagtctcagatatattctgtattagctaaatatggagtgaaactgtccaatttaaaatcagggagacgtcatctactttaaagataattcttcttgctttttaatttgagaatctcaaagagcatttcaagctaagttatttagaaagatgacagggacattaaattttggcttgagtacatatactgatgcattaaaattaaacgctgggtttgagtagattctgcgattcattttaaagtatcttatttttggttttttaaaaaaatgcatgcctataattcacttattgtataataattaagccaaaaggataaaaaattgaaaacaatgcttagcatctcatgagctgtagacaacccctgttaacataccggcctatataaaattgggaccatattataagcactattcaataacctcccttgtttcttacctgataagatatgaaaagcaggccgggcgtggtggctcacgcctataatcccagcactttgggaggccgaggcgggcggatcacgaggtgaggagatggagaccatcctggctaaaacagtgaaaccccttctctgctaaaaatccaaaaaaattagccgggcgtggtggcgggcgcctgtagtcccagctactcgggaggctgaggcaggagaatggcctgaacccgggaggcggagcttgcagtgagccgagattgcgccactgcagtccagcctgggcgacagagcaaaactctgtctcaaaaacaaacaaacaaacaaaaaagatatgaaaaacaattttttatgttcttcccccggatatgccaatacttactcccttactagatttaagtctttccccaaatatcaccttggtgaggccattttcatttttttttctttaaaattgcaactcccaccaccaccctaacagtcccaacccccttacttgccctacatttcatcatagcccttctcaccatgtgatattccgtttgatttactttttaagcattattcttctttggagtataagttccatggggcttcgtggagaagcacactttgttagttctatttgtttgtttttccctggggtctagagtaatgtatgatatatagatggcactcgatgaataaatagttgtaagatgtagatcaacatcattattttggtgaccacacaatttcccactgtatgattgcaatttatttttcaaccagtaccctgttaatgaacattctgagtttttgcattacattgctttgtgatgaagtttccttaacatgctcctctgcatgttaagttacttctttggtaggataatttattaaaagtgatattgctgaattaaagtttataaatatctttaaggcttttgattcctcttgccaaattttcttgagaaaagtttagtagcagtagcatatgagaatgctggtttccctatactattatcaattctgtgttttatcaatatttttaatcttagtccttccttttaattaatttgttagcaacttgagtattatcaaaattaatagtaatgttttctagttaaatagcagaaaatacaaatggaagaaaaatagaaaggttaatttttctaatgtataaaaggaacctgaagtttaaggatatctagcatgataactaaaaaattaatgttcctcggtcaaggtcacatatcttatttacagaggaagatgtgtcactgaagggagatatattgtgctattttgatgacaatgaggacagagaacatggaatggccaagccttgccctgataattatccctctcccagagagttctcaaaggagtttcacgctgtagaaacgggagcaaaatgagaatccaggtgccgctttattaatagcttcataagtgcttgctctccctctgggacagaggtctgtgatcccactgacatagtgcagaggctttggctctaggaataagtagaatttgtatccggtatcttcctcacaccactgtatcttggaagtcaacatactcagtgagctgcagctcctgaagacctggcttgacattctgatcctttgctttagagtcaagaagtacaacattccagctggtctgtcctgggagccagatgctcagaggtctgaagcaggaagtttaagaaggagatttcctgggtattgctttctaaaactgagactttaacagtagtagctggatcagtcaaattaataaccccttccttgtcagagagaagggcagagtgggacaggaaaagagcttgaaaaggtttcgtctctaatagaaatagcatgttgagcaagtcagtgcaattgctttcatattgttagttccaaccagtgcactgtaaataggttgagaaggccgagaagtgatgcattaaatgggatgtatcctcaatttttctcttggcctttgctgtaatgcatttcctggtggtttttaaaaccttactcagctgaacaattggagatgacacattttcaggtactgaaaatttctgttttgtgcatatgtgttatttaaaaattataaatgggtaaaataatgacaggttaagaatttgtataatggagagtatttcccttctactttcattcctcagttgcaaaatttagcttcatagaggcaacttgctgttatcaatagtttgggactccatttaaaagatagtccgtgataatacatacatatatgtgtatacattattaaataaatgataacgttatacatgctgtcctaggccttgaatgctgcatttaaaaatatttcacccaaggtgctttctggtacagttttcttggtggcacacatattttgatgcagattgaggatggagttgaagttgaaattggaagtgaagtcttcctttatttagtttcataataaattgcctgtagtctgtggagtgtacattatagctgtggcataattcattgccttatggagatcatcattgctgttacctttgttttatcctctcactttttctctttaagggaccttgttcagggagcttggtctcctcctctgagtgatcaagtttagattcagttgccctcttgtgcataaggaaaaagaaagcattgtcatgtataatgtagacattgtactaatcacttgcacgtaatttagctcagttatgttcaaaatgtaaattgagacctatttctgggccacagtcaatttagtgggtcagaaccaattttttttcaaataacagagcatttcaatgtgtgttttatttatatagtaggtatggtttcatgaaaccctttttttctagtatacatgtacgtgtacatatctagatagcaatattaccacattatataaaatatatttttttaatctaggttgtggtcaaaaagtttcagacttactgtgttagctgctttgatccacagattgacactgtgaagtagctgtggttttcctcatttcataggtgaggaaaactgggtctgggactatagaattgccttgcctgaaataaagggtagagctggggtttgtgttttaagtttttggacttaaaatttcgtactattttcctttcaaacatatatttttttctgtattagttactatatagttttttgtttttttgttttcttcttgttttgagatggagtcttgctctgtcgcctaggctggagtacagtggctccatctcggctcactgcaacctccgcctcccggttcaagcaattctctgcctcagcatcctgagtagctgggattacaggctcctgctaccacgcctggctaatttttgtaattttagcagagactgggtttcactctgttgcccaggctggtcttgaactcctgacctcctgatccgcttgcctcgacctcccaaagtgctggggttacaggtgtgagccatgcacccagccactagttactattaatggaaatgaataaccgtctttacttgaaacttatgctttgctaaccatgattaaaaaagtgttcaccttgtgtgtgtgcgtgtgtgtgtaggtattccaatccagtctcttttgacttcataatttagaaagttaacttgtggagtatctacatgcttttatgcttaccttaatagttagattttcctccaacaaccaaaaattctcccctcaacaaagtgggagaagcaatagctgccagctagcagaagctagagacatgtcactgccagtgcagcccatgggtctatgtcagcaacacctgagagcatgttggaaatgcagaatctctggctccagtgtggacctgaatcagagtctgcgtttgatctaggttccccgatgattggaacattgacatctgagatgtacgagtcaaagacaccaggtcatttattaaaacatcagttaaggaattgaatgggtttttatttttcagtcatgcgacctacagttactgaggatgttctggcccaaacctgtgactagagatgggcatataaagataaatcatgagtggactctacttgtaagaagctgcagttctaaccaggagggagtgatcataacacacaaatacaatcaagtattacagatgctctgatagaactgtatatgagacgcaaaaagggctgctatctaaatccttggatgtgtgtgtaggttttatatggatatttagatgaagaagagcatgatgctttctttgttttctttttgtaccacagtaaatgaatccaaactttgttgatagtcagagttgaattgttcccatgtgtttttctaccacaattacccataactagtaatttacttactttgcaggtaaattcttgttatcttcaccctctgatgggggcctttgtttcataaagggctaagcaagctctgcgttaggtagatgcctttcgtatctgactgacgcaagtgttagggtaaccacagtggggaatagctcagctggtcccagctaaccatccctgcttctcaaggccgcatcctttttacccctagattaaaagggagagcttgagaaaatatgcatagctaggtcctccggagtctttcctcactccctttttgagttaacaatatgcctaacaggctgttttctgaagtaaattggcagtaagtagtgtttgggaatcagagatggaatacttgatttgtccaactcctcatttaactgtttcttgctgctacctcttgcacccagcaaaaaccttttgaatattagctgaatgatttgggttcacatggagcaaatcaagcaagatatgtctcagcatctctccaagagtgagaatccatttcctgctctgtatttcaccagctatgtaactttgaataaaccattttacatgaaaattgaggcataaatatattttgtatgtaggtaggatttggaggatgagtggaggagtatggagggaccaggtctgaaggcacgtgtctatgaccactctactgcttctaaaactggacatttccattttagatttgatacatcgctgccaattgccggatggcattttgttttgttttgtttaaaagcttgcctgtacgtctcagagtctgagaggtgagttgcaatttccctgtaggtcagagaatctgggaggtgagttgcaatttccctgtaggtcacagaatctgggaggcaaggcagagaggacagggcatgcactaatatgaaggtctacagcttagctgtgctggctggaaggtactgcatttcatttcatccaggggctttcctccagaaggatcaccacctaggaatgaaagccgcatgctctttcattctttcattgttttcagaaatctattagaatggagaagacctccttcccccttcttctaatcatatataaatacagttcttttcattttcccatttttcttaaacatgataattctgccttgtctctaaagctgaacttattttcactgcaacttagaggcattttcctttatttacttgtctatgaaaatgatgagctctgagttagaattctcttaaacttttagtctgatttaggatagttattagcagtttttcattgaaactctcccggttagtttatgcctctctccaagggaaccatttcctctccttttatcagatttgtatctgtttttgagacatttgcccgttcctctacatcttttgaaaacgtgagcacctctctaaggaatgcagtaaggaccctttgatggttaagcttaaagaactgaaaactttggtctgacttaataattgatctaaataaagcagataattatgtgtttatcacgagggcttttaaacatctgccttttcatgcttagaatatagaatccatcttttcaagttgtttcttaaaaaaaccaaaaacattccacttttcttttttgttcgttttgaccctcccaggattgtcagcagcctgtgcctcactgtgtctgagttctattagagaaacagagtaaagaaggatatatttggaagggacagacagttgtactttttaagacttacttgttgtgacattttggacttttcatgtagcttctttatgacatagtttattgaacctttccaattttgtgggtctaaagtaggaataacatgttgtggttctcaaagtgcgatctcagacccagtcacatcaatcacccagggcctctgtttgataatatgatctccaagattttgttcagttctgatactgtctgatgctctgaaaatttcccatgatgtaacagaatctgatgaagtataagaggggacccaggaatccttttataaaatgggtatgaagaagacatagtaatatggtttagctctgtgtccccacccaaatttcgtcttgaattgtaatccccatgtgtcaagggagggatctggtgggaggggattggatcatgggggtggttcctccatgctgttctcatgatagtgagtgtgttctcacaagatctgatggtttaaacttatatggcagttcccccttcatgctctctctttcctgccactatgtgagatgtgcttgcttccccttcaccttctgccgtgattgtaactttcctgaggccctctagctatgcttcctgtcaaggctgcagaactgtgagtcaattaaacctcttcttctttataaattgcccattctcaggcagttatttatagcagtgagagaacagactcatacaacatagattcagatagaacatttgaacttggaaattaggttgtgaacagcaacctaaaccttttttgcctcattgcctaagctctcattgtgagcactgttttcatacatatgacctttaaaggcagtaaaaaacttcttgacagttctttttaattaacagatatgaaatattttttcatgcagtctgtggccaaatgaaagtttctcaatcctggctgcaggttcgaatcccttaggttttataggtgtcctggtgcctgaccccctcactccctgtcttctatccccaagattctgattgaattgctgtgagatggaatttggacatcagcattttcgaatgtgtttctttggtgattctggtatttaaccaatgtttaaaactactgaatggaatgcatacagatttatgggatttataattgtcataaggatatgtacaaattatttccacagatttgtgcacccagagaataagaggagtagaaattttctttatgttgtaagttattgaacatttcttatcctgtgggtctaaagtagtaacaacatacagtggttattaaagtgtgctgtcagacccaaaggcatcgatcacacagggatttattagaaatgaagatggttggagttctccccagacctactgaatcagaatctctggatccaggacccaaaaatctgtattttaaaaagacattccagagatattgatgaactctaaagtttgagaaccatcagctttaagggttgttgtatgattcggtggcagtgtatgaaaatcttagcacactgcctggcatggtgtgagtctagtaagcggagtactcgagagatagtgcttttgattgcttagcagtctgaatttggcttggggctagacctgacagttcttggcttagctacactttgaattctaagactgttatttataaggcaaatagaggcaaactgaaccatttcaaaggtgtatcagaacaacaaaacctactcacagtcattctaatgtgctcactcttccattcttatacttctatttctcagggcctaaactgtgatgttttgataatatccaaaagcaactcacttaatgatggagactgctgccctaacccacaaagtgttgagcaactaaaatgcaaggaaaagctactcctccataaatagaaaagatctcttctccaacacatcaaaaacattatttttaataggaaaataacaaataaagaacaggttaaaaggtagaagtttctgtttccccaatacaattttttgcagactatttaaaaaggtttcattccaggaaccataaagctcttggatatatgtgtataacttagatcacagagatcaggttcactccctcaataactctgacagcagtgtgcttctcttgttggtaagagatgctaggtttttctcggtatcccaaagtctcattacttcttgcctggattatgtatagatttctaaattgggtgtttcttattcatttctcctaatctgtcctgcatggacttttacattagtctttagtaaatcgtattgtaaccaagtgtttctttctcagaaatccttggtggatctctgctgcatgcatgataaaattcaaaccctttttttgatgtgcaacatgtaaaaaccttaattttatcgcatatctaatctttataactcactggcattattttacattcctgtgtcccatgtttttcctatgtcatgacttgctttttattctctatgctctgaactttctgatcgccatgcctacattctcctgtctctctaccaaggatggacgtaccttctacatcatgtttcaggaaaattatatgatccactgagacttccatgatcctccactttatcttaatttccagaggttattcatgcatctttataaattacaccttgtgttatctttagttttgtacaatttttcttcctcctctatttgattgaaaatgtattgagggcaagcaccaaggtgtataaaattcagtaactctatctcccacccaagctcattcttcgctttgcttaatatattgacccctctagactagcttttataccatttctaaatatcaaatccgatactctttcttctgaaagttaagactactaattaaggctactaattaaactaagatggggaataattgctatacaacacaaaattatgtgtcaaagccaattataaaaaagtaaaatgccagcaaatatatcacgagtactataacgttgcatccttattaacttcatgttgtttacttcttttctgtaggtgattttcttccacccccacctccacctctagatgattccagtgcccttccatctatctctggaaactttcctcctccaccacctcttgatgaagaggctttcaaagtacaggtaagagctgaagttaaagtcatgttaggtaagagctgaagttaaagtcatgtttattagccatcctagggagctcatgaatttcatgattgtttctgtgctggataaacatttatccagagcctattgagagctttacaacttatgaagatctaaggtactttaatgcaacatacccaactcaagcttcccagagttctgctggcttaccctctgaagccctcaaaatacttttgcctactaattttgtttcagatcccaaagccattttttttttaggaatactatttgagaaggcaacatttccttgttattttggaggacatacagccatgtctttttattgctatgttctctatcttcaaacattgcattcaagtgagtaaggctgacattttaaggctgtagttggttaatgtggatccttttggtcagcaacatttttctagcaaaagcaacatcaaatatccttaggattttctcttctgggtaagttcaagggtgcacatcatacttatcaattatatagaactcttgggttccagcgagtggtaattgcaaagtaactcggggctgggatcagatgtgacattagaagtggttctcagactgtgatcatcggtaactgccgaaagctgccaccatttaagctgaagaagtgctttatgtcaagaagaaaatctaataaagtgatagaattattgttatagttttaggtgtgactatgttcgcatagatacattgaagaaaaaaatgagtcttctttgtctttcagagaaacattggaaatgtttgtagataaaatggaatgggccgggcgcggtggctcacgcctgtaatcccagcacttcgggaggccgaggcgggcggatcacgaggtcaggagatcgagaccatcccggctaaaacggtgaaaccccgtctctactaaaaatacaaaaaattagccgggcgtagtggcgggcgcctgtagtcccagctacttgggaggctgaggcaggagaatggcgtgaacccgggaggcagagcttgcagtgagccgagatcgcaccactgcactccagcctgggcgacagagcgagactccgtctcaaaaaaaaaaaaaaaaaaaaaggaatggtgtctggtaattattttcaaaataataagggttggaaactactgagtgagaacatgggtgaaatagggttggttatgatttgataactgttgggtgcatggaagtttattctgttattccgtctaccttttaaaaaatacctaatatcatttgtggaacataaaatatattgaattattgctcattaattttatcatttgttttacagtattattttttcattttaatttttgtagctacaagtaggatatgtatttatggcatacatgagatattttgatataggcatacagtcttttaaacatatacctttgtatatgtttaaaatatcctataataagaagtgtaaaagagaaaaagtcttagggaacaactgcttaaatggtttgttctattatttgcctttctttctcctaaatttgaggttgaaggagacaaagaaagaaatgattcattcgctcaacaaatattctgtattcctatgtgggcattattcaagcactaggaatgttatagcaaaaaagacagacaccactctgtcctcagggaacgtaaaagttagtgggactagtggaaataaacaagatacgcacattacaaagtacattagagtggataagtggggaaacagggagggggtcaaggcttacctactaggatgggcattatcaatatggccccactgagaaggcgacgcttaaatgaggacttgaagaaggagaggagggaatgagctctagagatttcttggggagtgtattttcatatagtagatattaagaagtagaaaaggcttttgatattatctatcatttgaaatcagtaaattgcagttgtaaccagtaagtaccaattcagtttctggagtctagatcttttaaggctattgaaaaatatgtgtattgcaaatataggccatgaatttcttgcattttattttggtgtatactaataaaatcaactatcagatgccagtgatgaatgagagtcctataaagtttgtatttattttatgtaacagatagaacctttggcaaataaaaccaatatgagtgatttttcttaattttagtcattttttaataaaatgaggaaatccttagctttggctttaatatacctttggtcttactttgctgaagttggttttttgcatattgtttaatatgtacaatttttaaagtcactgactctgtttcctctcttagattgtcatagaaactattttgttgcattttaaatctttagttctcacaatgttatttgaagtagtgacagaagactcgtgattgaaaactagttacatagattattctagttgtgtgatcttgcgcaatgcatgctgagtcccggtttcctcttcattagaaacaaaacaaatatatatacctcttacaattaaatgaaatacagatggatttgaaagtattaaactgaaagggctatacaaatattttgatgttatattaataatcactattaatatgtaagaagactagtaaggattttccagtgggttccattaaaaaattcaaccatggggctttcaaaagataatgaagaatttttttcaggtggaccttgttctgttagatgtactcaagccatggctttgtttttgaagaggaaggaaataaacaaaatgcctgttgtcatgttggcttaagttctctgtaaaacagaagggaggaggataaaaaataaaatacggtttgccaaatggaaaaggacaaatctggtagggagaggcctgttatttttgagacgcttcatatggaagattgttgatacattcaaaagaaaacgaacatgccctccccttgtgcagaagtgacttagatgtgatagcggcttggtcctgctctggcccaggtttgtaccagctatagaaatgagccatggtagagcctaaagtagcatgatcactggagaaaattctgcgcagtttcctctcggctatggttaaaacctcatgttcccaagtccaaattatagctggtaaatgtgtgtttttatgcagaagactgtttatgtttccagccagattttcaggtcagagccaaaagaacgtctactaagagtgattataagagttgtaagattttgagagcagaaagggaccttagagatcatttagtccaactctggcgccaggcatctagttacagtcctttcaagtatttgctaaattaatttccttttttttttttttttggaaatggggaaactgagacccaagaagggatggatcctctggtttctgacagaggtcttattgaatttgaaaaatcttgactcctggccttgaccttcttcctgctgtcccagatggcccatgaacttggttttgctttagtcctctagcagacttcaaggctctgagattcattgcagagggttacacgtttttatttggaaggagcaggtgatgccggagttttgcttggctgtctgaatttttgatatatgctataagcttttatttcttcaaaaaaggcaaataaatatttagccttaaggattcttggtttaacagttctcattttcatgtgggaagatgcaacttggaaaacaggggaaggatttggtttgcttttctgtcaggatcaacgtgacctccatgcctgtgatgtttgtagtgacacttcagcaatcactttattaattcatttgttcttcattcattcagtgtaaattgaatgcttcttgtaagtagacatatatgctagtgattatagccttaaaacttggcatcataggtttaatgctctgagtctcagccttgggacggtcagttagttttatttatttatttatttatttatttattttgatacagagtctcactctgtcacccaggctggagtgcagtggcgggatcttggctcactgcaacctccacctcccaggttcaagcgattctcctgcctcagcctcctgagtagctgggactacaggcacccaccaccacgcctggctaatttttttgtattttcggtagagatggggtttcactatattggccaggttggtctcaaactcctgaccttgtgatccacccgccttggcctcccaaagtgctgggattacaggcatgatccaccgcgcccggccagttagttttattcttatctgaccccacagttggtaatttcttcctcttttcagccaggccataggcaagtattagtattatataacattgcttaaggtagttacaaagaagtcacgtgtctcagaattttggacttgcaagagaattagagttaatacattcaagttcctttctattgtttgaatcttgtaattttttcctacataacaaaatgtttatgggtaattatgataggtgaggcagtgctgcaggataaggagatggatcagtacagtactcagaatcacattcggaagatgcatatacacagtcatttaagtcattttatggtaaattatgctttggtcatcatacattgatcagaagcataatctaagtcctaggttagtggtggagagtgagggaagtaaattaactgtgactggagagaggcaagaaggattcatagaaacaatttaaattgaactgaactttgatggctgggtgggaccttaattttcagataggtgagtggatttttcagcaataaaataaaagaattaaaacacagaggaaggagagctcaaagtaagtgtggtaggccttgtgtttctaactgtggaacctactctttgttctgaaaccattgacaatttattgtaggggcttgttattattttaaatataagggtgatatccccagaactgttgttggatgccaagtgatactgttaacataaattaaggcaaaacatgttgcacttgcaggaaaccccatgcaaacaattctgagttgtctggtagacttccttcagatccatggggacttacctgctgacatctgatggctttgaattcaggggctcaatatttaacttcctctttttatgatatctttgttcgtcttttcttggtgacttccagttgacaacttctaactctgcttctctgtttgtttcccagtcctgtggcttgctttcatttgcctactattcagtatttgcatacctctggttttcatctttccttttctgtttggtcctgcaaaatggccaggcttgctaatgtaactccaggccctccacattagaaaacagaggggttttgtccattggtgattacttcaaatgttaaacatttctctttgttattgagtagaaatgtgtccctttatgatgtcctcatattggttttctttccccttttaaaaagtgatgcaaagtcagaggaatgaccaggccaggagagagataggtgctgtatgtctcaaggagttgatgagtaaagctactgaaagatgttacttttcaaaggagtgagtaagcacagagtaacatgagctatgcccagaattagtggaaaagtagagaaatgtctgaaattgtttattttaaagtcagcctccaaaagctcttgagcatctattcttgtgaaaacaattcaaagctcatatatgtgtatgatgaatagtggcttataatcttttttctttttttttgagacagagtcttgctctgttgaccagcctctgcctcctgggttcaagcgattctcctgtctcagcccaccgagtagctgggactttataagcacgccccaccaagaccggctaattttttgtatttttagtagagatggggtttcgccacacaggccagtctggtcttgaactcctgacttcgggtgatccgcccacctcggccccacgaagtgctaggattacaggtatgagccaccatgcccggcctcattttcctacttactaattttatgtgtttagtttaacaatgataatttgaaaatcaattcaagttttagcaaaactggcactggaatttttttttttttttttttttgggacagagtctcgctctgttgtccaggctggagtgcagtggtgtgatcttggctcactgcaagctctacctcctgggttcatgccattctcctgccttagcctcccaagtagctgggaccacaggcacccaccaccacacctggctaatttttttagttttttatttttagtagagacgaggtttcaccgtgttagccaggatggtctcgatctcctgacctcgtgatccgcctgcctcagcctcccaagtgctgggattacaggcgtgagccaccgcgcctggccggcactggaatttttgtcttgtgattccatgtaggactatcatggtctcaggtacagaacaacaggattttatttttagacataaggaactcaaacctacagtatggccacattcattcatgaactcacagaaataggcagctgaactggctttacgtgggttggaccaccttatcataaaagtctgtctttctgctgccggttagtgtgataaaggaggaggaggctgggtatgaaaagagatgtcggctgtggagattaagagtagaggtagtggacagtgttgccagggcaaaaacaacatggtcagcaagagctttaatgtattctaaaatgcttgttttcaaaagggtgagaatacaaggatatcttgatccatgaaaacataccaaagagatgattgagatgcttatttcttcctggccctttgcctagttccttttgggtcagcaaaccccagttgatttgtagcttgtttgtgaccctgacagcaacagtagcagcagcagcagcagaagcagcaatagcaggagcagcttgctttgcaattatctcctatttttatggtccacatatgtaggtcattgtgtgtttattaaggctgggtaggctcttagcatgtcactggctctggtcattgtgactttctagaagcgaatgtcacagttttcctggttgctttttgctcttaatcatcatctgattggttattcagataagaagatggacatttttgttgtctggacttgtaaaaacccttttgacagtagccgacctagagtccaggggagtattccaatatttcatttagcattaggaaacttttaatggaatatcatagtttctcttctttactttttaagaacttaaagaggtaaaactttcccctgggattgatagtggagtatgtgtacatatacacatacccacctactcacctatatcaacctgattaccactgccaccactaccttgaaataatttgtgacacatttatactctctgcagtgaaagattggttaactgctcgacaaaaaaaagtcttgtggggaattgatggtggttagttctgttgaatgtagggataaccaatgaggttagctttgccttagctcctgagtttctgtatagggagtaatatactatgcttgcatatttcagaacatttcctttgctcaaagttaagtgagactatagttggttctttttgagtcagtgaaagttttatcccaatttgtctctcccatcaagagtcttagtggtttcttcaaaggtgaaatgtacttattgttttttttattttaacttacaaaaaagtagtgggtctttttctacttataagaaagtaatgtcagccgggtgtggtggctcacacctgtaataccagtactttgggaggctgaggcaggtggattacctgaggtcaaggagttcgagaccagcctggccaacatgatgaaaccccattgttactaaaaatacaaaaatttgctctgtgtggtcgtgtgtgcctgtaatcccagctactccagaggctgatgcaggagaattgcttgaacccagtagacagaggctgcagtgagccgagattgcaccattgccctccagcctgggtgacaaaagcgaaactccgtctcaaagaaacaaacaaacaaaaacagtaacgtaaaaaaatcaaacgatgtagattagatattttcaaatttatttctctatgagggaaaaattatgatctgcttatatgtcctgctcccaataaacacgccaaatgatgcttgaacattcttttcttccctgctccatcccacattctattaaaataatttggagaatatgttgtaacatttttaactttatagcaaatctcttttgagaattgtttcttgcattaaattttataaccacatcagtaataaactgtaacttttacctgtttgctgtgctattttctatttactatctttttcttgtattcatcatcttgattcttctcttttttgttctttttttctgccatagtacttcattaagtaattttatgggaaggctacatgcttgatgtatttcctgagtctttgtatatctaaaatgagttgttattgccttcatatttgagtaaaagcttggctataagtagaattctcgggtcaaatttgctttacttcagtattgtaccaagatttgcacactatcatttagtatcatttagtattcagtgcagcagatgagaaatctgatgccagtctgattccttttccagtttagtaaatttttcttgtttggtctataggctttatttgtgggattcagcaattttactaaactgtgtctagacacagctcgctttttacctattctgctatttctactcaagtcaaggttttctttatgtaaatgggattttcttctttcttttcttcttttcttttcctttctttcttttctttctttcttgaactcctgagctcaggtgatcctcctgcctcaacctcctaagtagctgggactaaaggtgtgtaccaccatgcccagctaatttatttatttattattattttatttttgtagagacagggtcttgctattttggccaggctgatcttgaactcctggcctcaagcagttctcctgtcctgatgcctctcaaagtgctgggtttacaggtgtgagccactgctcccagtcaagattttcttataatatgttgaaaatatattttaatctttcattcacctttttcttctttatgaactcctactatatggaattggatttcttctctattcttcatattagttttctttttccaatagttctactacatggagggatttctgttgcttacttcccttttatattcttaatttttgtggtgatagtctgcttttgacttataaatgctctataaaactgaatttggggagagtatttggtaggagtggctctggatatctgttgttcagggtagctagcttgcacttaaacctttatcttttatctgaaatgggaatatatagttatttaaatgcagggtggccatagggtatatacgttcagtcttcaaccatatatgtaattaggggatgcaggccagcagaagaattgcccttagatgcacaggtcaagagcagaccagcaaggttaatctgggtcctcaaggctaatggtttggggattcataggcaggtagcaaagcccctcccttacatgccatacatgtatgccaggtgagggctgcaggagctgtggccagcgcttatgtatattggtctctagttgaattctcaagcccctttgatttcctccctcattgtgttttcatcggtgactttgcttctcaatgacacactgtcaccagcggtgctgggaattgtggcagagtcctttttgttagaaagcataaactcattaaatcacttcagtcaaatcacttttgactgactttcattaaatacccctaacgtccattctaaagagccttgccccacccctcaccctttttgttatgacagttcctggtgtcctgctcaggtcctggtgtcttttgctatgtatctcaaactcactttgctgcctgtgaggagttcatcacagaaaacgtgctctctgatagcattatctaagccaaagaaagcttcagagacagcataatgcgatggttaacactgcaagtgctcttccaggcttcctgggtacacatctggcttcctgcttactggctgcatgactgtaacgtgctgctcaacctttctgtggcccacttaaatcctctgtaaaatgggtgattgattgttgtgaggtttcaaagacataatgcacataaagaatattttatgtaattgacatgtcctaaaacttagtaaatattttcactgttgtgatattttgggctagcaggtctctgtgctgggttttgccatagttgtcactgacatttgatttgcaccatgcctcctcagagttaacccgtgatcccatcccttgctattataaggttcaggattttatatatatatatatatattttatttatattttattatatatttttatatatttatatttatattttattatatatttatattatatttatatttatttatatatatttataaatatataatatatatatttataaatatatatatatttttttttgcagaagaaatactcccacaaacttcctctataaaatgaatgattgaattaaataatcatgtagctctcttacagctctaaaattcagtgccttggtaataaaatatcacttctttgtaatttcatggtgatttataatttgcaaaatacattataacagcacaagtataatttaactaatgaaataaaaatgaggatccaagagttgaaggaacttgtttagatctcataattgtcatgaaagcagttacttatttttaaatagacaataacaaaatcatttcggtgactttttacaaatgagagaatgtggatactcttaaatcctcaaaaagcagccattgtcgtcaataatatatgttgatgtttagtaaccatgaacctccgaggtagttttctttgtaattttttagtggaagattagcacatcttccatcctggcctctagcatattttctgacaaaccccttgttgattgtatcacataccttttatccatggatttggtacgaaagccctattgggcccacaaatctttcggttcttttgtaatttacataatccaatcaacaggggcacagaaacaccttgttctgaaagaaggagtgaaagggagtagaggatgctgacaccaaaaacctagggcactaactcatattttatctctgaatatagtactttgaaaccctagtgtcttaggaaggttttctgttcatagctgatttcacttgatccattcaaaagtcaagcatttttgtactcttactatataacttaaaatatattatagcatggggtgtttataccaatccttgaggggttaagctattattatcattattttatcattaacttctgtgagtttgacttgtacagggcctcctagcctgcaaatttcaaaattgacgtcttttttttttgagacagggtcttcttgctctgttgcccagtctggagtgcagtggcatgatctccactcactgcagactccacctccagggttcaagccattctcccgcctcagcctcctgagtagctgggattacaggcacgtgccatcacacctggctaatttttgtattttttttagtagagacaaggtttcaccatgttggccaggctggtctcgaacacctgacctcgtgatctgcccacctcagcctcccaaagtgctgggattacaggcgtgagccactgcacccagcaaacattgctttttttaataaaagactttcatatactttatctcacttgaacctttagacaacttctgcaaagggaaaggtagggaggattctccatcttgtatcagtgaaggctctggggctctgaggttaagcagcattccaggtttccatggcattaactgtcccaggcagggatgaagctctctgagacgtgccagtccatttctctctccattgccatcgctgctgtattgttactctccctttatattcatttttagtgaaggaaacaaaacagcagttgtcactttcctttcccagtagtttcattatttgctgtcaccagttctgttgcaggatcctctattgtaatattgtcttcagattttaaaaaatgtatctctacatattggaagaaagcactgtggtggaaaatacaggaaaactgtgtacagacctgttaaatggaaatgttttcataatttttagttagttttatttgtattttactaatgaaatttagtaaagatgtcaatgtcaatctttcttactacggaaataagttaaattttgccaactagtggaaaaaaagtttctgtggcattttttttttttaaggaatacaggattgatacaagaatgagagcattcatattataagaaatataagttttgtggttttttttgaaataaaaatttggtttatgagaggcttaaaaaatgaataaattcccttctttcctgatagtttctgtcgttcccttggggattaaaggagtgtgaatctatcctacagccacttcctctctgaactgtagatgacacatcaggatgtgatttggggtagatcaagcctcagagtcgaatctcagtgtctagccgtagaggtggtatgatagtatgataattccacatgtcctgccttctgggctttttgacattcatagcatttctaaacaagtgaaggatttatcttaaaaaataaaattttagtattttcttcattattcgtgagctttaattctttccattagaaattatgtcatccccatatttagagcaatgaataattgcataacttttaaattgtgtatttgatggtatggtgtatattgaaaagagaatgagaaactatcccctgaatagagatttagtgattcaagccatcactttctaaaatatacgcacttcagagtgaaagttcagtgtcagaacttcatagagtgtctggccagctagagttaggtatttcatggagagatgatcaaacaattgaacagaaaatacagcaaccagaagagtttttcactgtgcatgttcagaagacttcatcatttttattatcattttatatcaagccattttataagtagagatgtgtctagaggattgttttcatttccttttagctcattgaaagtcatacagtgtcactttagtaattctcttcttgcccagtggggatagaaaccagttttgggccacggcaactatatagaagtattttcatagagttacagattcattaaatgagaccctctctcctccccttaacacccactgtgtttctgctataatgaggatttaagcaacagtcccaacatgaactagctcatttcagtactagggaaatggctgttgcatgggtttaccacctctgattctgcaacaattgttctttttctgacagcgtcttctacctcctccaggcaggcacaactcttgatgacttgaacctcctatgttcttttttttcccccccagcttgtaaaattatggtaaaatacacataatataaaatttactatcttcaccgtttaatgttctgttcagtagcaatatgatgaagtacattcatattgttgcaactgtcaccagtatccatcttcagaactcatttcatcttgcaaaactgaacctctataccgcttcaccaataaccccccattccactctcagccagcccctgaaaccaccattctactctctgtctctaagattttaacttcacgagcacatggtaaaattgtaatcagattgtatttgtcttcgcaactggcttattttacttaacataatgtcctcaaagtttatccatgttgtagcatatgtcatgctatatatatgtcatgttctgcttatccgttcttgttaatagacatttgggttctttccccattttacctactgtgggaataatgctgctataagtatgggtgtagaaatcactcttttggaccctgctttcagttattttgagtatatacccagaagtgaattgctagataacatggtagttctatttttaatattttgaggaacattcataccattttccacagcagctgtactgtttccattcctcacaacagcacacgagttctgatttctccacgtccttgccgacactgttttttgtctcgataatagccatcctaatgggtgcagagtgatagctcattgtagttttgatttgcatttctctaatgattactgattttgagcatctattcatgtatgtattagccatttgtatatatatatcttctttggagaaatgtctattcaagttctttattcatttttgaatttgacttttttttctttttgagttttgtaaggtctctatatattctgaatattaatcccttatcaggtatgatttgataatactttctcccattttgaagattgcctttttactccattgatactgtcttttgatttttaatttttatgaaattcaatttgtctcttgtgttatttgtgccttttgtgtcatattaagacattcgttgccaaattcaatgtcatgatgcttttgcatatgttttattctaatctacaattttagatgttacctttaggtcatggatccatttcgagttaacttttataattatgctaggaaagagtccacccttactcttttgtgtgtggatattaaattttcccagcaccatttgttgaaaagactgtccttcctgtattaaatgatcttggtgcccttgtaggcagtgacttgaacatatatctgagggtttatttctggactgtctcttatgtgttattatgccaatagcacactgttttgcttactttagctttgtattaatttttgaaatcaggaagtgtcggtcctccacctttgttcctttttactcaggattgttctgcctattttaggtcatttcatattccatatgaattttaggataggtttttctactttttaaaaaatgtcactgggattttgatcgggaccgcattaagtctggatatcatattggttgatattgacatcttagttatattaagtcttgcattctatgaacatgagatgtctaccatttatttatgtcttctttaattcctttctgaaatgtattcaagttttcattgttcaaggcttttaactatttattcacgttaatttctaagtattttgtcttttattttttgatgctattgtatatggaatgatttgcttaatttcctttttgaattgttcattgttgatacaaatgtaagtgatttttgtgtagtaactttatatgctctacttggctaaattcactatttagttctaatagtctttgtgtccaatctttagggttttctacatataagattatgtcatctacaagaagagatgatttaattctttctttttaattttgacacctttatttttttttcttccctgattactctgatgaggacttccagtattacactaaattgttatggcaaaagctggtattcctaatcttagaggaaaagctttcagtcttttatcattgagtatgattttctctgtgggtttccatctgtggcttttgctatgttgagatagttttcttctattcccagtttgttgaatatttttcttatgaaaggatattgaattttgtcaaatgcttttctgtgtcaattgagaagataactttttttccattctgttaatataatatataaccttgatttgtttgttgagtatccgttcgttacaataataaatttcacttggccatgatatatcaaacttgtaatatgctattaaatttgacttggggtatttgattgaggattttgcatcaatgtttattagggatattgttctgtacttttcatgtagtatctttgtcggactttgatgtcacagaatgagttaggaagtgtttccttctttttaattttttggaaagatttgaggataattgttgttagttcatgtatcaatgtttggtagaatttactagtgaagccatggttccagattttttcttactcagattttggatactgattcaatcttcttagtattcatagcatattcagattttttatttgtggtttagtcttggtgcattttgtgtttcttgaaaatttccctgtcatctgggttatcgaattttttgccacacacttgctcatagtactctcttaaatcttttttatttctgtagaattgttagtaatgcccctacttttatttttgtcttttgtagtttgagtcttctctctctgtctctctctcacttcatctagctaaaggtttgtcaattttgttgatcttttttaagaactgttggattttgttagtattctctattatttttctattctccattctacttatttctactcttatctttattatttcttcccttctggtagatttgggtatggttttttctttctttttttccaagtttcacaatctgtagatttaggttgttggtttgacgtctttcttatctttaaatttaatggtgtatagctataaattgcctcgtttgcactgttttcactgtttcccatacgtttggtatgttttctttcatgttcattcatttttaagtatttttctatttcccttgtgatttctcctttgatccattgtttgttaaagagcatattattggctggatgcagtggctcacacctgtaatctcagcactttgggaggccgaggtgggaggatcacgaggacaggagtttaagactagcctggccaacatagtgaaaccccatctctactaaaaattacaaaatattggccgggcgtggtggctcacgcctgtaatcccagcactttgagaggccgaggcgggtggatcacgaggtcaggagatcgagaccatcctggctaacacggtgaaaccctgtctctactaaaattacaaaaaattagccgggcgtggtggcgggcacctgtagtcccagctaatcgggaggctgaggcaggagaatggcctgaaccctggaggcggaggttgcagtgagccgagatcactccagcctgggtgacagaggaagactccatctcaaaaaaaacaaaaaccaaaaaacaaaatattagccgggcgtggtggtgggcacctgtaatcccagctactcgggaggctgaggcaggagaatcgcttgaacccaggaagcagaggtttcagtgagctgaggtcgtgccattgcactccagcctgggcaacagtgtgagactccattaaaaaaaaaaacaaacaagtatattatttaattactgcaaatttgtgaattttgcagttttacttatgtctatttatttctatttttatcccattgtactcagagaagatactttgtatgacatctactttttcaaatctattgacccttatttagtttatgggcttattcatgttctatcctggaacatgtcccatgtgcacatgagaagaaggtgtattcaattgttgttcaagtcctctatttcctgacttacctattgtttggctgttctatccactgttaaaagttggacgttgaaatctctattattatacaactgtctatttcttccttcaattctggtaatttttggtttatatattttgatgatcttttattaggtgtgtatacatttacaattgttacatattcttgatgtattgagcctcttattaatataatgttcttcatctcttttttgtcttttagccttttttgacttaaaatctattttctctgatattttgctagtctgctttttgtgggttactatttgcatgaaatggtgttttctgtcctttcattttaaactgtttgtgtctttggatataaagtctcttgtagacaacatatatttgggttatgtgttttaatttattctgccaacccgtcttttgaccagagaatttaattcatttacatttaaagtaattattgataagtagagaattacttcttattttcctacagatgctccttaagttgtgatggggttatgtcccactaaaactgtcttaagttgaaataattgtaaatttaaaatgcatttaatatacctaacataccaaacatcatggtttagcctaacctactctaaacatactcagaacacttgcattagcagacagttggaaaaaaatcacctaatataaagcttattttataataaagctttaattatcttatgtattttattgtatgttctactgaaagtgaaagacagaatagatgcttcaagtatcgtgtttaatgaatgtgtatcacttttacaccatcatatggtaaaaaaattgtaagtcaaacccttataaaatttataagattataaaaccatttatatttattttctatatgctttatagtttctttgtcctttatttcctatataattttttttgtgtattcaattgattttttgtagtaaaatatttaaattcctacctgatttcttttgtgtatattctgtagctattttctttatggttacaatgggggttacatttaacatcctaacgttataacactctaatttgaagtcataccagcttgacttagataacatacaaaattctgttcctttttcagttgttgatgtaacaaaattacatctttatacattgtgtacacaacaacataagctaataatttaatacactcatttcttaaattgtagaaaacaaaattgggcttaccaatcaaattacaataatatgagattttaaatttgtaatttaaaaaaatattagtttcttaaatcatgtagaaaacaaaaagtaaagtcacacatcatgattacaatgatgttagctcttataagcgtctgcctatttgccttttctgacatctgtatttctttgtatgatttttgagttactctgtagtatcatttcttctcaacctgcaggcttcctgttagcatttcttgcaggagaaatctaacagtaataaagaactctctcacctctttttttttttttcatgactggcattttgattttctttctcacttttaaaataaaattttgccagatgtaggattcgtggttgataattttttttccttttagcactttgaatatattggccctctgttttctggcatctaaggctgctgctaagaaaaccggataattttattgaggatcccttgtatgtgatgagtcacctctcttgcaactttcaaaattctccggttgtctttgtcttttgacagtttaattagaaggtgcctcactatttgtctgtttgagttcatcttacttgtacttttttgagcttcttggatgtttatactcttggctttgatcaaatttgggggagtttttggtgattatttcttcaagtattgtccctgccttttctctctgtctcatacttctgggaattccatgctgcatactttggtatagttgattgtgtcccacaggtctcttaggctcagttcacctgtcttcaatcttttttctttctgattcttagactaattaatttactttgacctctcttcaagttttctgattctttcttttgctgttaaatctgtctttgagttcctctagtgaattttttatttcagttattgtaattttcatttccacaattgcttttttttctttttctgtattgatattcccattttattcatgcattgttttcttaactttctccttgcttcctttagttctttcagcatgtttaagacagtagttttaaagtcttcgtcaggtagatcccccatcaggtcttttttagagacagtttctgttggtttatatttttgttttgaatagaccgtgctatcctgtttctttgtatgtcttttgattttttgttgttgttgaaaattgcatatttgaaactaataatgtagagccctggaaatcagaccttttctcttccccaaggtttactgttaccgtttgtattttgtggggttattgttgccagtctctgtgctaagtattagctttttttgttaacttgtggtcttaagtattttctgagcctgcatgtttccctggttatgtgccatgactttctcatttcctctgttgttttcaaatgccctggttatcaaggtctgtctcccaaaatgagaaaaagtaaaaaataaaggaagaaaaaaaaaaaaaggactggccttttgagtcccatggaagtcacttcagctggagtgagaggggcaacactaatgatagttgcccctttttctttatgtgtgtgattaaaagcagcaattaatgttcagtccacagatccttgatatatggaagacaggtcctttttgcccagcttggatcatgtaagctgtatgcaagctgcttcaagtacatgtgcacagatgcctgccaaggatctaagaggtggggtataggtagttgctattgtgctgagatgtaaactttacctaaattaaccacaacttaccatctaaagcttccctccagaaagtagactcctttaatagactctggacttccaaaataagttgttgatatagatggtggcagtgcaatggttgtctaggtggaaagacagatttgtggtgcctcctgctttgccatattctcagaatccctttcacttccttcgatttttactaagcagaactaacttccttaattcctctgccatgcctgcaactattccttttctcccttctttaccaccccctcctcctttctccctgtctctaaatttaggttcccactcagagttctcactttgaccttccgttttctctcagtagatgtcactactctaataagatcaactttgatctttctttatctaattatttgaactgcttgtgacttggtactgtgttttcctttgacaagttttgtttcatttatccatgagatcttttcatagataacacctgccttttcactttcaatgtatccctaattctactcatcatcttactcaaaggcttacattctgttagacataccattatattttctagtcttgccaactaaatcgtgttcattgatgatatatcttgctttctttgtatatctatcaccaaggcttacaggattatttcaatctctttattttcttgcccatcatcctagttcatatcttctgggttacaacctactcattgccttcattctatctttttcacattccaactgcatatctgtaaccacttagtggtttaaaaaatattattttcttcctctggcttttccacattaaatttctcctcttggtttatttttcagagtactctatgacctacctcatcctatgtagcacactgtatctcccactgtgctttttatacagtccttgctcttttgaagctcatatcgtcattgtcagcttcatatgccaagccaatttttcttgtgtctttctcaatacctgatgaaccctcatatcctcatttttagaagcctaactctactattttactcatacgtgtctgacaactggatcatcttgatctctctcttctctgcatcctcagtcttttgattgagtcatgtgatgtggtggcatgagcccagggtttagggctaagaaaccctgctctgttgcttatcactgcatttcccatctttacatgcaaaaatgaggatattaataacaatttttagaaggttattttgaggactaattaagataatgtagagtatccaacaactgctggttcagagtaaaggctactatgagtcagttaataaatagatttattaatgctgtttgattttttctgccacttaatatatacccttttgtggggtaatgtaatcattgcatgtacattaatcttgccaccaaactttattttataagccagaatcataaaataacatgggagacttgtagaaattatttaaaatcacaaatcgtagagcaccagatttgacatggtcctaacccctctgccctttcttgtgatgaggaaactggagcctaaatttcttaagtgaactgttcatggtgacacagttactaggagagctggtcctaaccacaactagagatttctggactcccaggcctctgctctttccattaccttcttgttcatttattttagcaattgcctgaaggcaggatcacaacccatatttctgtatcacccataacctttattttcatttcattttattttttttgagatggagtcttgctctgttgcccaggctggagtgcagtggcgcgatctcggctcactgcaagctccgcctcccgggttcacgccattctcctgcctcagcctcccgagtagctgggactacaggcgcccaccaccacacctggctaattttttgtatttttagtagagacggggtttcactgtgttagtcaggatggtcttgatctcctggcctcgtgatccacctacctcggcctcccaaagtgctgggattacaggcatgagccaccacgcccggcccataacctttattttattgcgagaagatagaatagctacttgattgatatttgtggcttgattgatctattctttcttcgactgtgcaataggaattctctgggaaaggactatgaagtctgtatacttatcacccttttgatgcttttggggttgttgtaagcatgcaaagggttcattgtgcactgcttctgtatactgactcagggtggtggggagaggaaatgggagaggaagttatatacatcttgagcaaatcaagcttttctatttttagtccttgctactgtttggaaagtacagcctctgttcatggcagtctggcatgtgtttccttagtgccatttcgaaagggggaaaaaataaatatgggaattttttttttttgtagtgaaaatagttactcagtgaaatcacataagtttcccgtttttctcttgatgaaacctcaaacccactaggcacagattcctcaacctcaactatgcatgtgaaaggctcatgcagaacaggagaccagagtcagcaaaaccttgtatagcaagataagctgtggtgccgcagagaagcgcggatgggtggcggaggtggggaaggcagggaagggaatggtgatgttctttcatatttagtggggaacttggccaactaccagatcgttgccccctggaaaaggctgaaacctgaactaagataaagagacacatagctttgcagctttttgcttaagctgttccttttgcttcagtttctgtccttggtaaaagtttccctgactgctttatagctactcccccaattcaaataaataatttttctttaatagttgtgatggcatttgggagatttttccaatctaaggctatatcattaggacacgataaagagccttttatgctagtaaataaaatgatttgatctgtatttagatggattgctataacatagtggtactcaagtgatcagaaatggtgatgacagagtgtcttggagtcaccttcaggggtccattgaggcagacaaggaccttaaccaaggtggtggccatgaccatggagaaggggaacaagaatcaaaagcaatttggaaagagggggcttatgggaaagagaagagtccaggatgcttggcaggattgtgactttcttcagggagaatacatatccttcctgtcctagtatgtggcaaatggaagaatcctttggaaaaaaatgaggactttgaagcaggtgtgatgtgaatgttactagaggaaatgttgataccaatgagcaaatattgccctttgttaatgaaagggactatacagtctccagacataaacagctctgcctagacaaaattgtagcagtagggtgagaataatgcattgctataattaatgctaatttgtggatattgctgtattgttgtcattgttttttaattgaatatgtattaagctccaacagggtgctatgaataatgccaacttatagttgatttatgagaacactcagaagactttattaacaccagtaaatggaaactcgcactccttcgaggtggtaaacgtctttgccatttcgacagatgaggagaagtgaagtagattgtgttttctctgttggcactgcgggtgagaacacagaaactgtcgaatgagagaaaagtattttccttgtcccctggaattgggttagaatacattagtaaagaattctttaatgtgttcagagttgtgggattttaattaaattgttccagttattgttagcacttggattagcaactggcaaccaaattctaggccagcagatttcaaatttagcatggacaagaattggggtgaggccgatgggtttgttaaatgccaattattaggccctgccttcaaaggtttagatttggtaaatctaggagggggcttaggaaaatcttatgttcatggatatcgaaggtgcttctgtcctcaaaggttgctagcttcctttcaaaactccagtattttcttattttaggacgtatctttggccaccaaaatctagcttcacctgagaccaagggctttttatttaatagctgcaaattctcttataacacaccaagtataatcctgtaatcctcttttatacacaacataccaccagaaaacatgtgcagaagacttaccgtatgcttagcattctagtggacacatgatttctactaccttatttcacctggtctccaaaatatccctgtggggttggtattattgctcccttatttcataagaagacactaaaactaagagtatacgacttggtcaaacatcacatccagtttaatcctttctatcttaacctggttaggcatatattttactttaagtttgaacaacaggtgggattctttttggcactgacagagtttgcagttgacagtagagactgtaaactcggcttaagtggacccgtcccataaagaaaaacattcacattggaacaagggagaggtgaaaaggaaagttggaagtgagtaattcaacttttcatttttttttgtccccttccttccttccttccttccttccttccttccttccttccttccttccttccttccttcctctctctctctcttttctttttttttttttgagtctcactctgtcgcccaggctggagtgcaatggcatgatctcggctcactgcaaactccgcctcctgggttcaagcgattctcctgtttcagcttcccaagtagctgggattacagttgtgtgccaccatgcctggctaattttttttttgttgttttttttttttttttttgcatctttagtagagatggggtttcaccatgttggccaggctggtctcaaacttctgaccttgtgatccgcctgccttggcctcccaaagtgctgggattagaggcgtgagccactgcaccgggcctgtctcatttctttaatacgaggtactaaactgtcactgagtaaatagtagacatttgattattatttgactctgaatattttttgaaaaaaggaacatttcataagaaagcctgaaatgagacatgagcagaattctggggtatagaaatgatttttaagttgagacaagaatagtgaagcttgagacgacattattccttgcctcctttagactttcttcagcctccacctagcaaagtaaaagtcttgtcatagcagtctgttgcattgtattccctgggtctaaggcagaaatgtgtacgtgctccaataacccttgtttgttgtgctgtggaatcacgttcatttctgattaaggtgaaatcagtagctttctgatacggtctctcactcactttttatcaatggcaacctttttcctaaaaataggaatttctgctgggagtgttttaatataaattgtctgtgctcagcctgaaatatgtgtgattcataccatgtgtttgttcccacatcaacactaagtcccaagatacaattacccctgcccactctctccttcgtcatggggaatgtgtttatcctttagatatcagcaccttgggtaagagccaatctccttatatgccttggtttgcacacctgcattgtctgaccacagctgaccctttgagtctgctcttactctatttttaccttaaagaacactcgtgtttgccaagtacacttgcacattgcagagttccttctatatctttatgctcatgttgtaaatatgttaaatacttgttctccatttaaggccttctcaattctgtcgccatatagctctctctgatttctctattcagctactttctctctttcctctctctcattttgcttttttctcgaacatcttgtgtgtcttacctacatgtagtctgccttctaatatggacatttgtggataaactagtttcttcaatgcaactgtaagctcttggcagagaacccctgatccattctctttccctccctccccttccttctccctctccctcctttcctttctttcttccctccctgcccccctccctccctccctccttcctccttccttcctacctgcttccctcctttcttcctacctgcctccctccctccctccttcctttctacctgactctctccctccctccttccctcccttcctcccttccttcctcccttcctccctccctcactcccttccctcccttccctcctttctttccctcccttcccttccttccttgccttcctgccttactcccttccctttcttcctccctcccttccttgcccctcttgcctgcacctcatatcaccgcgacctgactattcgccaaccaccttacacgaaagtccccgacacctatccttaccgccgaaccccctggcacaaagggcgtgccccctcggcttttccgctgaggtttaagccccgcccagttcccgcagcctcacagggcccctacccctctccatgacgataaaaggtacgaccccttcccctttccgccattcctttcccagcctcctcccccgctccccctttcgtaatacccgctccctttcgaagatcaatcccaccctgcccttctcccccccccccataatgacccgtttgattccggccgccccgcaatccctcctcgtcccgcgcccacacacactctatacctcagcaacccgctacgacccccccaccaaacacacgtcctccccgcgatcttcgcctccgccccccccgttggggccggcccggccgcgacggccccaccccaccccccccccgtcacatccccnnnnnnnnnnnnnnnnnnnnttggtaatctaataggcccatataatctctgcttggtgttagaagggaagacctttcaccttttgtgttttcttcctaatgtcatgcaaagtgctagagctttggagcaaaacgtttgatttccaaattccaattcttccgtttactgcccgagtaaccctagaaagttctctttttctctctgatccttgggctatcctcttttgaaaacaggaataataacatctactaatctctaggattgctggaatagctcgatgagatcgtatatatgaaaatgcttttctaaacctgagcacttctctgtgataatggccgtacagagggagctatgatattttccctcttgttttcccagtagtgactatgtcccaggctgtgtgcagtggactgggtagctgcctagtaatattgctggcttgtaggatatttcctgttttatatgttcttaagaagatcagttgaaatgtacgagatgtcgttttggaaaagatgtttcacagtgggaggtgttaaagttttagtcctacttcagccccttcactatacaaactaccttacctttttgggggaattgtattatctttaaatgaaaatgatggaatagcgacgtaaattccccttctagttctaatattttatgagccttatttccattttctatgcttatcaactataaatgattctcttgcagttgttcaaacatcttttatctgcacatcctcatcaatggtatttaacatatagaatcagaaccacaaatgtttgaagaaaattctcggccagacatggtggctcacacctgtaatcccagcactttgggaggcctaggcgggtggatcgcctgaggtcaggagttcgagaccggcctggctaacatgatgaaaccccatctaaaaatacaaaattagccaggcgtgttggcacgcacttgtaatcctagctactcgggaggcttaggcaggagaattgcttgaacctgggagacggaggtggttcaatgagccaaggttgcagtgagtgccattgcgctctagtctgggcaacaagagcaaaacccggtctataaataaataaataaataaataaataaataaataaataaagttcccaccctctgtacgtttccatggcatgacgctttgctttatatctctgagtacatgatatggaatatgggacatgggaattgaatacttttttatggtttccaattttggtaacatttaaggggtcaaacaagagttcaagaaaaaaaatacttgaaaatgatgagctaatgtataaagttaacatcacatttctaactatttgaattttggggaatgtgagaaagtggcttttgaaatgtatcatgcctgagcttattaagcctgtgttaccaaaatgaaaaataagaaacatgtcttccttgaggttttaaaaaacaaaatcaatagcaaaattacctgacaagttctgtttgattcataaatccacacaattgttgcacatctccagccccctcaccacatatgaaagttttcttaatgtaaaagtaaaccttttctcccctacctctaaaaacttctgtctaccaattttattatttcatgttattttgttatgcaaaggattcctggaaaaatatccatgatcctagatgatcttatggatatctttataggtatttcaatgtagaaatttcaaataaatgtatttcccttttatgcacaaacacagagttcagaaaagacagttcatttagagtttgctaaactgtgtgtgtggactaactggtaaggtgacgctctaggatggcacagcttgcctagataatctgtagcagtggtttttaaactattaatttcttagaattgcttcaggaaatattactaaaggagatgggggataaagcagctctgtctgtatatgtttcatacaatgggtttccgtgtctgatttcattttaccaggggatctgctgcttaaaaagggggtgccaaatatctattttactgtcaaatagttcatcttattgtgattattcttagagttcctgttttattgatgaatagataatatatgtattgttccttattattatctatgcaaattgacctttattttaattgtaaggggttactttaaaaatatattatttatattatttttattttataaggattggaattcagtagaaatcattcaacgagtaggtaaatattgtgaaaagtgaggggtttttgttgcatatttagttttgctttcttatttgaatagaacagtgaacagtgaggctacttgtgtatacccaagttcagatcactttaaccatgaccctgcccttacttataaaagagttggcttaaactcggagttggcctaactcttacgggtttagtctgatggcttttgaacagcaaagatagtgacaggcaagttgtgaaatgtcattatagatctatgcagtattagaggttaaaaaaatagaaaacgacctggaaggtgcataccctcatttttgtagaggtaaaagttgagttccagaaagtcaaagaaactgcttgataatatcagcgggacttggtcttgtttaggctgcttcagtagggctgattgtgtgaaacagaggccccctggagtagcgctgaatcatggagtttatcttaaggatggatctgaatgagatctgatatcaggaagctcagggtcagggcagatctgtggctgaactcttccatctatttttcttctcattgttttttttccctctctcccttcctcttttcctctcctctccattcctctgcttctctagtgttcgcttgttcattgttttcctccacccaatgatagacttcctacctcctgttgtatgtttggattgttaataattaaccatgtacatcatctttttggttgatcacagccatagctcatccctgtggcaattttttattttttattttatttttttttttattttttgagtttcactcttgttgcccaggctggagtgcagtggtaagatcttggctcactgcaacctctacctcccgggtgggttcaagtaatttttctgcctccagcctcccaagtagctgggattacggttacccaccaccacgcccagctaaattttgtatttttagtagagatggcgtttcgccatgttggccaggctggtcttgaactcctgacctcaggtgatcctcccgcctcagcctcccaaggttttgggattacatgcatgagccaccgtgcctggcggcagttttgttacatgtttttcagtccaaacgcataagagaaggagatttatttgcccatctaatctccttgtcactgtccaaaagttaggttcaccagcctatttatggacccttggttctgtgggcctcagtgttctgaaatggagtcgcatggttgaaaacatggctgttttggcaacaaagaatgggggcaggaccatttcctttaaaggagatttgggttggccaaacattgctaacactgggtgagtgtgttagggctgaaaaggatgaaataatgtaaattgtgaggaaaaaaaattcaagcatttatcaagcgtagcatttatgttctatgttgacgtttgatacggcttggatgttttttccctccaaatcatgtcagaatgtgatctccagtgtttgaagtggggcctaatgggagatactcgatcacagaggtgaatctcttatgggggtttagtgccatccccttggtaatgagtgagttcttcctctgggttcacacgagatctggttgtttagagagtgtggtacctctccccaagccttgttcctcctctcgccatatgacatggtagctccctgttgccttcattcatgattataagcttcctgacgctctcatcagaaactgactggatattgacaccatgcttcttatatagcctgcatagtcatgagccaatttaacctcttttctttataaattacccagcctcagctattgttctatagtgatgcaaaaatggcctaatgtaacgtttttgtgctttatcatgaaaaactcttgtcttctgttgttaccttatttcttgtttatttaatgctgtgttctcagttgtcaagccagtattgcacttcagattatggaaatgtattcccccttatgaatgctctagtgtttgctcccaagacagcttttgcgacaacttttcccactgcctttaacatgtggagaagatgtccttctcggatattaataagacttgagtttaggcctggttttgcatattagaaaagttgaattgtatttctgttggccattagataagaaggattttagggaaggggactgtttttgtttttaaatttgtgtctcttccacatagttttacaaagagtatcaaataacatagtgaatttgatatctctaggcaaaagtgcaagtgatatttttcagtagaatacatatatataaactcctcaaggttgggtatcatggcttttttacactgcatactacttagcataaactattttctagagcagcatgggagaaaagccatccactcaaatccatcatgagagttaccctatgaacattggtgtcatggaaaattagacaaagaggagtcagttatcaagttagtgggttatttgtaagtcctcctcccctggagaagggtacatttggggagatagataggtaaggtttttggaaagctaaacacttcaactgaatgactgggaaagaggatacacatcccaataggaatgcattcattttttccctaacttacaacagtttgtatctcattccataaaatgacatttctattagataaaatagatcatattttctgcaattctcactactgaatacggcctgtgtccactgaacattaccaggatccgtttggtgaggctgctcatattactatacagcatgagagattatattaaatagaaatgttactgtcttcatttttatttttatccaaatacctcttagctattatttggtgtgtcaattggtattttcatggcatcattaaccatatatatgacataatataggttgtttttaagggaaataaactataaattcactcagtacccacccttactccccctgccccacacacttaaatgttcattgtgttagaaatccacttagaaaagtcattctcaaagtgagaacacctcactttgagaatgactcagaccagcaccatcactggggatgttgagaacatccccataccagcgccatcactagcacctacgaacttggtagaaatgtaagttcttgggcctcacccaagatgtacagataagaaactgtggcaggtacagcctggtaatctaaggtttaataagtcctcctggtggttctgtataggctaatgtttgaaaaacactgatctaggattgtgttctttatggttaattcctggcacccttacacatgttcagatgcatagaagccccatctactgaagcctctcagtaacttagttttacttttgatcaaagtactttataaagtcacatactcaattgcctgactattaacagaagcatttattttgagactattgtcaaagtaacaattaaatagctagcatttattgaatgcttattatgtgaatattacttgacatgcataaacctatttaatttttacaactgcatgagggacccgagagctcaggtgaattgttgaaggtcacaaagccagcaattgggagatacaggtattacagcctgactccaaagctttcaccagtattcttttttattagggatactttgaggaaattacttaatacaaatgattatagacaaataaatattgattgtttccccaatttcatcaaagacagatgatggaaaaaagattgatctaacttacaacaaaatgattacactttcaagagaaactagatagaaatagtttggatatctgtcccctccaaatctcatgttgaaatttaatccccaatatttagatgtggcctagtgggaggtatttaggtccctcatgaatggcttggtgcctgtatgagtctgttttcacactactaataaagacatccccgaatctgggaagaaaaagaggtttaattggacttatagttccacatggctggggaggcctcagaatcatggtaggaggtgaagggcacttcttacatggcggtggtaagagaaaatgagggtgatgcaaagcagaaacccctgataaaaccatcagatctcgtgaaactttttcactaccatgagaacagtatggaggaaactgcccccaagattcaaattatctcccccttgttccttcccataacacggggagttatgggagtacaatttaagatgagatttggatagggacacagagcaaaactgtatcagtgacctccccatggtactggtcatacagagtgaattctctgttagttcataggacagctgattgtttaaaagagtatagcacctctcctcgctctctcttccgctctctctcaccatatgacatgctgcctcccattaccttcctccatgagtaaacgctttctgaggccctcaccagaagcagatggcagctccatgcttcctgtacagcctgcggaaccatgagccaaataaacctcttctctttataaattacccagcttcaagttttgcattatagcaatgcaaaacagactaacaaacatagtgtgttttgttacttaaaaagcacacactttcaaaattcctttagttatcaccattttcccccactgatattagaaagaagagagtaataaacattactgaccataatagaaaaaaaatacagtgaaattcctgttgtattattaaatttaaatgaaactaccattgaaaagaaaagttgtatgtaaacacaatgtaatttttgtattattagcctcttaggttttactaaattaagacagttttatattcctaagttatcagggaaagcttttctaattaatcacaaaaggaagctcaagcttgggtagggtctgggaacctctttgttttccatatgggatcagtggtaagacattccttgagctctgtgaagcacaattgaaaaaaataggattatgtggttactttctcaggtctgtaattgagcagtcacattcaaattccggctttttgaactcacaatctataatgtgtcagtatggttgtctacctcagagattctgaaggttgttgaagattagttcatggtcatgtatgttttgagtatgacgctgggcattggatctaattctagtatataaacatccaagggtggagactgtttcttaattaaatagaccattccccttggccttttgtttcctttaatatcctggataagattttcctatgtaacagtttttacttgatgattaagtttctgatttttttttcatagcacaggacttttcagttagtcctgctcccctaccttgaaaccgaaatgaatactgaacaaataaatcgttaacgtattaggcaagatatgtttattttcatcccgtttcacaatcattaaggccatagttagttcaggcaaagatcatctatggacactaaaaccactgggtgggtgaaaggtttttgactagtagaatactcacagtgccccaaaatatcacctcacagattatttttaatttaaaaatcatgcagtcatgcttaaaatggtgaaatctggtacacactaccttaatcgagtcatcaaactcagcatcaccaagcatgggccaaactgacccttgagcttcctgatgggatgcagcagaagggatgtggcctcacgcatgtgatattcctgcctgacttatttaatctgaatccagtcatcaagaaaaaccagattggttggactttttataagacacctgaccagaattattttaaaagttggctttataaaaatcaaaaatcagctaggagcctgttctaaattaaaagagaataaaaagacatatcattttatgatgtgatccttggatttggggtgaaaattaacagtagataaaagaacactactggcaccactagtgaaatgtgagtatgggtgatattagataatactgtttctatgttaaatttctccagtgtgagaatggttttgaaaaaattagaaattcttaggagatgcaaactgaggtgcatatgggggatgtcggggggtggttttgcaacatcttacagatggttcaattgcaacagcaaatctaatttatgtagacagaaagctagtgtgatgaaatggtggccactgatgaatctgggtgaaggatgggtgagtggagtttattttaatagttgttcaacttctctgtgaatttaaattttttggatataaagaatgaaaaagtaaataaatacaaatgaatgctctttcataaccaattgctggtactcctcgtctatcacctgtagttagtgggttagtgatagttggcctgaaatatgacccattcaaaatcagactcttgataatggcctaagttcatttcattcacacgctgtacattttggttctgggctatttattggactgtctttatgtacttacagtgggggagtcatcatcctataattctgctggcagcacttattatgatttgtcaagtcataataagtcccaactgtggtttggtgagctttttatcacatatgtattcagataatgcataaaaataaatataaaaataacatgttcgaatggtttattcataggatttttgtggtccttggtaaagggacgctgtcagtagacacctttggtgccccacctcgcatcttcccctcccaccttcgtgtaccagcagctgctacagcgatcagctctgcacaggtgtgacctggtagcacttggcttcaactgcaacacctttcactcactttctgtgccgggccttctctgcaaccatttaacttctgagacttgtgagacttattcacaaccaggagaacagtataggggaaaatgcccccgtgattcaattatctcccacacggtcctgcccacaacacatggggattatgagaactacaattcaagatgaaatttgggtggagactcagccaaaccatatctccttccttctctgcttaactccttctagtccctcagtactgtttctcagaattgattcccaaaataaatggccaacatgcgagcttttctcacaggcattgtttttcttggcagaacacagactaagacgatgtaatctttgaaatctctctagtgatggttaaagagtgtggggattgttataattacattaactactttataaaagtttgtggtggtaactagaaaaagcattagtcaggagaatcttccttgttgctggcattgggaaggtcatttaccagtcaggtaactagcacagctacaaagatagggagttaggagaaagacatgttggtaagtctataggattctgttgcttggttataggactttggatcctggtatctactataagggattgagagtagcaagatcccctaaatcgaaaggtaaatgaatatctacagattcgtggcaggacttgggcaggacaacagttatttgaactgagatataaaattgagactcaagagtgaaaaaaaggcctattctaattcataatggaattgaaatgtaggagtaaagctactatagtatttgcacaatcttctcccctctcaccccacgctcccctgttatccagtttttgtgcaaaatcacacagcattagactggaacttgtgataaattgcatcaacctaatttgagaaactgaaaatagggagcagtctgaacttagagggtagggagaataaggaccctggaaactaattgatgtcttacaagcacagactggttgcatatcataattacttgttttattgtgtagttcagggtaattctgtgacttgttgagtctcagtggttagatattgcagtgacttcaggcatagtcagttgatgtactttctgcttcagtaaagtacagatgtagaagacctgattaaatcctgtctctttactaataccccaagggaacacttaatgaatgatgcttccctcaagaagaagaataattaacaatagctatattattcatattaatttatagttactggttgctataattaatgctatttaggaaaatcatcataattatagcactttacaacttacagagtattttcccatccattttcttatctaaatcttataacatcaccctggcttagatagaacatgtgatattctcttcattttatagatgagaaaactatggcccagggaaagatttaagcagacaacactctaccacccttgccaatatattggactatctaagagtatgtggaaatacacttaccaaatttatgtctactataatattttatatctgcgcacaagaggatcaactttactcagtttttagttgcattccaaaacaataatgtcctgtctttccttgtaccaggacccccattacccagaatgttcacatgaattttaaatgttaaatggaatttttcttaataataccacagtgtttcatagttattactgccctttgatataaacatgaaatctcctctgatagagggattagcaccttgaaaacatctgtttccagtatacagacctgctggccttaaacagtttaatcagactggaaattcagactcagaaaagtctaaatttcaaccaacctgtcatgtcactctttttctatttttggctatgacaagagagttgaagaaaatctatcaatttcacaaggctagccttcaaatctgggccgtccagcttgatgatacacacatagttaccagtgtgagcgtgtgtgtgcacacacagatggacactgaacctctttggttccgtttttatatcaaattctagagtatccactgcttattgttgtacttctaactgtgtttacccaaaagatagtgctatgagaaaggttactgcctgtgtcacagtctgtcattattcactgatttatttattcaaaaatacttactgaacacttatttgggctaggtcttgaaagagagtccaaggaaacaggaacaaaacagacaaagcttctcatgaagcttatatgttctaggggagagactgaaaataaacagaaaaatacacatggtggcagatattatttaaaaatggatttaaaagggtaggggaataacatgacgtgatgtagaggggtcataataatacatccagaaggagaaaatcataaggtggctgttttagataatgtgataatatgaaatatatatatatatatatatatatatatatatgtgtatgtgtgtgtgtatgtgtgtgtacgtgtgtgtatgtgtgtatatatatatgtttgagacatatatgtgtgtgtgtgtgtgtatatacatatatgtatgtatgtttgagacagagtctcgctctgtcatgtaggctggagtgcagtggtacgatcttggctcactgcaacctccgcctctagggctcaagctattctcctgcctcagcctcccaagtatctgggattacaggggcctgccaccacacccagctaatttttgtatttttagtggagacgggtttcaccatgttggccaggctggtcttgaactcctggcctcagataatccacccgccttggcctcgaaacctgctgagattacaggcatgagccaccgcgcccgtcctgaaatccatgtttaaagagggctcacaaacaaggaagccaactgcctcttgaagtaggtttggctccaaggacctgggccacaacttcatagacagttgatgttactgtgcttgagagagatcaggcccaggaaggattaactcaagctgactaagttcccaaaagaatgaccaaaacaccagatccctttatgtttcttttacacagatagttaaataagctccaagactcaggtaaggtggtttggtgagtaagctactagggcatacggaactagtggtcttcacaggccattaccctttacgcttgcttcaacatattcactaaaacgacagattgacttcaagggttataagatttagtgctagcctgtcatggcacgctacttgttgttgttactgaagatattctagtttcttggttggttaatgctttttctaaactcttttgcagacactagatactctcttgatattttacgtccttagacaagtccagtagaattgattagattattgtaactttccactattgtattgccattgagtcttgctgaagatacactttggtctcttaatgaagttttaagagcttcttccatattcatatatgatcattattaaattgtcactttaaaaggttatttttttacttcaccctgcctccaaatactagggtcatctcactttataatccagacagattctttgcttctttttcccaaacctgatcataattcctggaaacaccctgtgtcgatgttgttgtcctctactctcctgttgattctgactgcaggtaatacgaggttctgacataggaaatccggagatcctgacttcattgtccatgctcactgccacatgcttcccctgcagccccttggcagaaccctaagaggtctctttccagttcatgttctaggtgcatctcttgggtcttgccatctctcgcacacatgcatacctaataccccctggacctgagacttccaagcactggcatgctccaatgtcttcaagtgctgattcctctttctggaatgtccgtgttccttccctgctccttgctactccaataaatattattctaggcagtggtgtctaaacaccaagtgcttgtgagctctcttcagctggttctgttctttaggtgcaggaatggagacatttattttcctttacttgtatacttattttaaacaacaacaacgacaaaactgctaaataagtgtgtgacctgagaaaaatcatcttttatttttcagttttcatatctgtcataaagtgataattctatctcagcctacctcactgagattttatgaaagcttaattaaaaaaaaaagaggtgcagaaaaacttggacaaagccacattataacttgagaaatttgaacttataatgatatcaagggaaatttcctttgttaacatgtctgtgttgcttccaacaggggaatcccggaggcaagacacttgaggagaggcgctccagcctggacgctgagattgactccttgaccagcatcttggctgaccttgagtgcagctccccctataagcctcggcctccacaggttagtgcagcccacaatcatctccacacagccattcccagatattctactcttatcagaaagaacatgctgcacctgagagcttatttccccttccttccttccttccgtccgtccttccttccttccttccttccttccttccttcctctctctctcttctttctttctcttttttttttttttttgatggagtcttgctctgttgcccaggccggagtgcaatggcacaatcttgtctcactgcaacctccgcctcccgggttcaagcaattctcctgcatcagcctcctgagtagctgggattacaggcgcctgccaccacacctggctaatttttgtatttttagtagagaccgggtttcaccatgttggtcaggctggtctcgaactcctgacctcatgatctgcctgcctcagcctcccaaagtgctgggattacaggcctgagccaccatgcccggcccttttattctttcttgatcttcttagagtcaatgatttaagttgcctttttatttaatatcaacatgtattagtcaactggcagaaatttcttaaattgactctttgagtactttctttaaaaataacacaacatcatacaaaaatgttatataaaaaagtaaatctcttattccattgccttgctcttcttacagctttgtctatatggatattttgttacatgttgttatagttttcacaaatatgacttagcttggctatgtaaggttaaggtgaagggctgtgtcttttgcaaggaaattagttttgttggatattaaggtgattttcattatttttgtcatggttttaaataatgctacaggggacatatttgtgtatattttctttggggttatttcctggcctcagatttctaggagtggggttgctacattgatgaatgagaccactttatttacttttctttcctaaggttgtgaatagttgatactggtaccaccagttagtttgaatatatcagtttctcctcaagttcactagaatgtgatggttgcaattaatctgtgttttgtaagtgcaaatggtgccttgttagtttttctttgctttttaatttttttatttttgcctactttggagcttggctatttttcagcatcttcacttaatatctgcattccagaagctgatcttccactgctagtgatcattccctgcctctctaaagtcttgaaagggttgtggcaaatctgtttcagggcttccaattcctcagaagacagccatcagaattgtagttgcaaacgctagagaagcagtattgtcactgtgctgtttgactcttgcgtgacatttgtttgactaagtgagagtgcatagagcctctgagcctcactccagttcttgagtggcagcttctgtatttacagtggttcctttcttaaattaagaaccagtcttgtttctctgctgtcagttatttcaatacttaactgctcataaggtggcagcactttcttcttcttcttttttttttcttttatgagatggagtctctctctgttgccaaggctggaatgcagtggcgcaatctcagctcactgaaacctccacctcctgagttcaagcaattctgcctcagcctcccgagtagctgggattccaggtgcctgccaccacgcccagctaatttttgtattttagtagagatggagtttcaccatgttggccaggcttctctggaactcctgacctcaagcgatctgcccgccttggcctcccaaagtactgggattacaggtgtgagccactgtgcgtagctgctgtcttctttagatacattccctgtaccttttcttaacatataatggaattgttagccatgtgggattcatggcaaaatatactaccacttagctcttcctcactgaccctgctcttggctctatccatcctgtgagcagtaaaaatatactttgtccctgtaaatgtgtactgaactcatctgtagaaggcactgtggtcttttgggggaaccgatgaggcaaaaaaagtggatagttgagaggaagagaaataggactccgttgtaatcttctaatagcctgtaatgttatatgtgaggatatggcctatactgcaggagcacaaagaagatagtgatatattcttctgaaggtgacacagtctgataattcttatcaaaagacttgcattttcatctggaggggtgagtggaattgtatcgttcgagacagcagcagggagtagcctgagccacagggctgcaagcaagcaccaaggctgcatttagagatctgtaagcaaccagatggctgcagatgaagcctttgaaggcttgtagtagaatataggtctgggaccagcctggccaacatggtgaaaccccatctctactaaaaatacaaaaaatagctgtgcgtggtggcgcccgcctgtaatcccagctattcgggaggctgaggcaggagaatcgtttgaacccgggaggcggaggtttcagtgagccaggatcacgccactgcgctccagcctggggacagagggagactccatttcgaaaaaaaaaaaaaaaaaaaaagagagaatataagtctggtagtttcctacagacagcgtgtagacacgtttaaatgccagattatgattttaatctgtcttttgtagataatgggattatttgaaggttctcaatcagggaaatctaaaattcattctgaaaaaggaacataggaaataagaccaactctagaatgatgcaggaaatgagcccaggtcagaaaaatgttctccagcaagccactcttcatactttctgaccattgcttgatgttcagcaattttttttgattccacccaagcaaatgccccaaatctcatctcatatctgaagacaggaaggccactgactttgccactggactcagcagtatcatgcccaaatgcttttttgtgctccctttccttttttttttttgtaatgggttttcactctgtcacccaggctggagtgcagtggtgggatctcggctcactgcaacctccgcctcctgggttcaagccattctcctgcctcagcctcccaaatttagggaggatagcaacagtgtttctggctgcagtaaatttggggtaatgactttagcttacatctactttataaaaaatcctccatgacactgcatggatttatgcaattgaactaccttaatatttgaaactaaaatttctaaacattttaaaagtgtttgtcagggagtagttttagaataacagatgagaaaagttcagacatattcctgtagtgaattgcagataaaatgtgagcatagagtatcagagctttagtgggccttccaggtcatttagccaaacttacaggtgtgtgccaccatgcccagctaattttttgtatttttagtagagatggggtttcactatgttggcaaggatggtctcaatctcctgacctcgtgactgacccacttcggccttccaaagtgctggggttacaggcatgagccaccgtgccctgcccctccccgccccccagctttttttttaaacggagctttcatttaaatcttttttttcctcccctaaatccttataacctaatagacactgaggagatcatgctttgaggtctattgtttaatacaacctttattcttgaaggctgtgtctatacatgcctctcataaaccattgcattttaataggtttattctgcagctacgttttgtttgaggaatctttctgagcacacaaattcatcatcactgatatttggacagtactgattgtgaagcactttcacatatattctcacttgagtgagatatagatatctcagttctgagatgtgcgtgatgtgctcctttcagggatgatgaaactaagactcaccaagaagattaatggtttctccttggccatatgtttgagcaccgcgtgagcacaactggactttgaattttggcttgtgcttgattttaagttctaaacaccagattgagggtgtcaggttttgtctttgtttttgtaatgattttaccatcgatgaaagctggcatcagtcatctgagtgacactgtcccttgaatgttgctttcccataaaaagaaaaacattcagaaggtcaaaaaaaattaattgtaatagccattaagtagaataagttcataattatggtaaaatacactttcgatgtgcctgttccattcagaaattaaaggatgatccattctaatttttttctattactatgatttaacaaagcaagagttaattgggagatatatctcatccttttgaattatcttccctctggtggaactgaattagatgtgttaatatttattggttaacataattataggctgtgagaacaataatcacacacttaaaatattaaaagtatgtgccaagagaagatgatgtctatagtagacggtgttgtgttataattgaaaggtacttgaaaagtcctagaaatgtagaccgttaatgcccaacattgatgtttctatttttgttcaaagcaaatttcaaaacctatagaatcacctgactacttaaaataggctagtaggtctgtgatttctcattagtcaaacatgtgttgtaagcttttttgaatccatgtctctatcatctttggaaggctgctttgactcatggtctaggaaaaatgatatatatgtggaatgtttatatggtaagaggttccaaggagctccattctcaaaacaagtctgaaaaatgtgagctcttgaaaataggttttgctaaagcattttcttccttttattctagggagtattttccgctcccaaattttctgactttagttatgttcacttactaatccctatattgattttggaaatttggcttaattccacatattcattgattcattgattcattcacctaacatttgatgagatcctcctctggatcagtcattggagatttaaaggttagtatcaacaggtctttcctttagagtgatatttaatcttacagaagagataagcccgtaagtaacccaaagggacacaggagaagggcttcaatgtgctacttaaattgtcacgtaaatcaccacgtgtcaaaattattgggagataaaatacaggaataccaacattgtaccttatacctttcagtgtcagagaggactgcgtagagcaggcagtatttgagctaacttggcttaaagtgttacgggaagggcatgggattcaaggtgcaagaataacaagagtgagaaagtcaaggaacgtggaaagtgaatattatttgaagaataagtttgtctaatggggtatgtaaagtgtaaatgggattactgctgaaaaactcaaacttacttagcagtacctaagtagcccttttgatgcccaagggctttcattgttagaaagagaaatttacagggggatagcaacagtgttactggctgcagtgattttggagtaatgactttagcttacagctactttataaaaaaatcctccatgacgctgcatggatttatgcaattaaattacattagtgtttgaaaccaaaatttctaaacattttaaatgtgtttgtcagggagtagttttagaagaacagatgtgaaaagttcagaggtgatcctggagtgaattgcagacaaaatgtgatcatagaatatcagagctttagtgggccttccagctcacttagccaaactcttattctacagatggaaagcttttgcccagagagggaaagaacacactcaaggaggctcatttagagacagtttcagtgattctttgtattttccccgaactatgacacaaaggcccagcttgatgataaccacgaccaggggagagtttggtttcctttagtatcacaattggtttattccaaaaagtctttcttttatggcgtcttctttaaaataagtctcaaacacataacaaagaattaggcatatcaaagacgtacttcaatggtaaacagaaaacttatgacgttgtaacatctttaagctagtatatatctaaacccaacccattaggtaggcatgatttgttagtataagtacagcttagcctctagaagctatgcaggggttggaacgaaattctgtctatttcttagaagacaagagatcaatcatgaactaatgacttttgtgttccttcttttatcagagttagggtacagtattcatcttctagtttctagtacagggctgtctttttttccccaagtaagtttggtaggattggagctgatgactgagtgacttggaacacttttcaaataaactgtcttacgttaatatttcatggtagctggagatttagtaatttgtgaatcaagttgcttttgaattgattaaatgggctttcactatcctcatttagactagtgtgatactgtgaaataataagaaataatatataaatatatttttctactccagtttctgaatcagtgtttgtaaatccttataatttcctaggtgataggggtgctggtagcatcttttgttctaacattattttgttattgaccttggttcctgactcagagctactgaattctgtggaatttcctgagtgatggaaatatctattgttttgatgaggcaactcttggtgggctcctggattttggctggttaccagaatgaccaagcaatgatttgaagcttggaagtttaatcttcacctctcatcctctggggatgagaaaggggctagagattgaatgaataacaaatcatgcctatgttttgaatgttttgaagtctgtataaaaatccctgaagtacagagaggtttcagattgttaagcacatctttatgccaggagggtggcataccccaactctatggtaacagaagctcctatacccaggacccttttggatctagccctgtgcacttcatcatctgcctgtccatctttatcctttatcgtatcctctataataaactagtaaatgtaagtaagcatttccctgagtttcatgagtaattctagcatattatcaaacttgggaaggggataatggcaaaccccaatttgtagtcaaatcagacagaagtctgggtaactggtgaccacccctactctgccccaccaccgcagcttgtgattgacatatgaagtggaaacagtcttgtgggacttgaacccttaacctgtgggatctgtaatagtaactccaggtagattgtgtcagaactgaattgagtcataaaacacccatctgataccatagaatcagttgatgtatgaaaaaaaccctcacatttagtgccagaagtaaagtgttctgtccaggcatggtatctcacacctggaatcccagcactttgggaggctgaggcaggttgattgcttgaggtcaggagtttgagaccagcctggtaaacatggcgaaaccccagctctactaaaaacaaacaaacaaacaaacaaacaaaacttagctgggggtggtggcatgcacctgtagtcccagcaactcgagaggctgaggcaggagaattgcttgaacctaggagacagaggttgcagtgagccgagattgtgccactgcactccagcctgggcaacagagcaaaactctgtctcaatcaatcaatcaatcaatcaatcaatagaagtgaagtgttctgtgagtagcatagaggaaagaggtgagtttttcttcttcaactaatatgaaaaatttggagatattttgaaaataagaatagggtggggcatagtttgatagcctcgtctccaagtttgccaacgggaagagcattggcttcttgattccctgaggtcccctctctgaaaggagctccatttatgtgaacctgtccacgttaccagtttgtgcttccttttggttatttcaaaaatgggcagggtaactacactccattcccccttttcaaaagatagaatagtattctcaagctacaagaaataagatgatggctcaaagcaacagctcacacagtcattcccatttcattttgggattgttagcttgtgtctggagtttgttttaaaacttcaggcctttgaaggttgggggctggtcctttctgaatgctgttcatcctataaacgatatatttaattcctcactttaaaaactattctaacttcttagtctatttggaaactgagtactgaaatgctgtgtggtcatatggacacatcgttagctgcagtcccagcactcccacactgggttcctttcatagagcaataatgtatgaggcaacctgagaaattatttcaggtatatgtgtgttgtatttagagctttttataagaattcatgtggtctgagggcttgggtgcagtgtaatcagggtggagtcttgtggtgccctggatcttcccttctcatgtgttctgtgttctagcttgcaaacgccatgaggagctgcaggggagattaattagtaattaaaatgtttaatgcttcatattattcaatgcaagtcaaacatgtaggctactgggagatgaaaactacaacatgctgatactgtgtgatgagacatagactgtccctacagactagaaactttgctgtttctggcaaggctgcttgggacttgagataggaactgggtaataaatactctgttgaaaaagaaaataggtgtggatagtggcatcttcctcctcctatattctcttaggaaaaatttaggagcttttcatgatttgctgagaaatagatttgtctatgtattggcattgtctgcttaataataactttctttgagagctatggtaaaagttgaaaccttgtagaaacctctggtatgtgatgttaagtggaatacagtaaaataaaatttgcaaaacaccattttaaaagagaaagggatcttattcttcacaatgcccatgttttacttagaggatctgtgttgttttgaattagcctgtacccgccagaaaacttcaacagttaaataacaatgatttgggggtggaggagtggttagctgactcagagttgcatgccatgacttttatgacaggcaattaatttttagatggtatataattgcatttcaataacatttatacctcatcatttttttagaagatgatgtgtttgtgtcatgcgtaataagcataatcaacgttagctttaaataaattttgttttgagtgccatgaaaatgtaacattttcagagtggaaatttagcctaaaaatctaccttgcattgcacctctacaaagcttttgcccaaaaatattcatttcatttgtcccagtgtaagagctggctctgaatgtatcttagctcctagtggggataggggagggcagctgagcagatagctgctgagtgccatggggtgttcattcagctaaagcatgggagggggttgtcttctgtggttctctagccatggtccttgtggtagcctttaactgtgatttgtttgtttgaccttgatgagtccttggctccgagatgattatgttacattacactgaatcactcaatccaacattggtttgaaaagaaacgaacaaagctgcctgttgagtttctctattttacaacagtatctcagtggaaataattagtcctatgtctatgcagaagcacacatcacatttgcaaaattaaagagtgttcttgttaggactggtttctctgtttctttcttcctctcccactgtttaaatatctattttggtggtagtgttagtatgaaaccccatagttcctttcttttcttttctgatttaaaaagcaaataaacaagaaaacacaagtctagctatgttttttaactcaagatgactagatataaccacagcaaatatgtaggattgttgtgttttaagagaaaaagccgtgtctcagataatttgtagtcattgttttgtccattttgacatctacttctttatatactttatagccaaactagagtatagtgataataaggatgatctctagacagaaggttggaggtggttaataactcatcctacatatcacaatttttcatggtgagtaactggtttgccctccacacaaaatatcacattggaatgtaactgctaaggttcttcacactatggaaaaattaccagtaaagttaaacactgcctttcagtgggtatattaattataaagacaaaactatagtttatgttgcataatttgaacatacatatttccttatgaatctgtaagctggaactattgaaatgaaatatacaaagtgagcacgtgttgctgttgagccagcagttacagttttcatttacaaatgcggacagaaccatttgctcattttggtctctctgctttgggtcctgcactcacactccaatatgcacctaagttatggggtcatgttgaggttccagactgcagaaggggatcgaattatgtttcattgtattgagtcacaaatatttcaatgtaaagtaaaaattttggaagttttacgtaacagaatataccttacaggaacaatagataggtataaaatgacttcggtttgcataacaaagaaataattgtgatgagtaccagactgtgaagtccctgaggcaaggttatcatttgttttctggcacatgagaggcatacaaatttatttttgctgaataaataaatattgtcttcaaatctttacatttccattctagaaatatgctaaaaaagctaatctgtaatagatatagagttagcacatgacaaagttatagctgctttgtgatttttttaaaataaagaacatgtatttgcattaagaaaaataagtgtggccgaagtgaatatttttttataagagcaacctaatggtaaccaatgtttcatccaaaattttcagctatactcttatattgccttatatcacttgatgacaatgtattttgttaagaagatgatgttatcatgaggtataattcaatattatatcaattctgttactgttgagataacataagaaagaaatatcaactctttttctatattctccacagaactgaggaaaacagaggactattatgttattatttcctaaataaagaccaatatgataaattccttatattcagtgagaggaaagaagttgcttaccgaatgtactgatatatgcttccttttttcagaaaacaacaacatcaaccaaaacacctgtataattattacatgaattttttttttttttttgatacggagtttcgctcttgttgcccaggctggagtgcaatggcatgatctcatctcaccgcaaccactgcctcccgggttcaagcaattctcccacctcagcctcctgagtaactgggattacagggatgtgccaccacgcctggctaatttttgtgtttttagtagagacaggttttctccatgttggtcagggtggcctcgaactcccgacctcaggtgatctgcccgcctcggcctcccaaagtgctgggattacaggcgtgagccactgcacccggccatattacaagatttttttttttgcgtttactgccaggaagctctgcttcattaaaagaagcctctaagattcacctcttccttcctttaccaatttatttctgatacttcttgacccagtatttcaaatgtgataaatatatgccaattataaagcatttcaaaaccaattaattgtctaaatctaagtcatgctttttaagtggaaataaactttgtgtccatacacatatatttgcctataaacatcttaaaaatatatctaaacttcggacaattttaaaaagagagtattgaattttaaatggattctttgcttatattgatggtaaacagtggatccattaaagtagcatattctgctggtgtaaataaaatataagatttaaagtgggttaaaaagatataatatttacttgttccttttaagaaacaagttgaagaaacaataaagcttgaagcctgtatagtcagatatatgaacccataaagtaaatcatttgtgaagtgtcttgaactctttctaatttcatcttgatgttgtactgcttatatgaaaatgctgaaaaatgttacttcttagatactgctagaggtgctaagcttcttaccattcaggaatcttcttcttggctctctccgtcacccagccaacacagagttatgttttatttcccaaatggccaacttatgttaacttgatgcttaccaaggcagtccaagccaggaaacaatttttataaacagcatcctggatgacttaatattctatgtaatattaattttagagctttttctcccatcatctagtctagcatagctaaaattatgatgtttaactttgttgatctacagtcacttgtgaatgagatctcccaaccaggaaggaaggaaagataggaaaatcagagtggtctgtttgcagctgtgctagcacatgtttccttgagtgccttctgaaggaagagtggatagagatgtatctttcagggccattgcctttctagcattattgatcgtatcacatgggcaaaagaaaaagaaacaatagattttatgacaaaagttatgtaaaaaggggctgaaatcagtattttgaaagttgtgactaattaacagtggctttctgagaagtgagatgggattcaagacagtggccattgtgtatgtatttctaagagccatctggatgctcctttttatttgtgtttttggcttattcactcatttattcctttattcactgattactaattgaatacaaagtctctgtcgatttgttcaaagatattaaagaagccctaaatctatggaaagacatcttctgttgattagttgcaagatgtaatattgttaagtgggatactccccaatttgatatatagatgcaaagcaatccctatcagaatctaagctggcttctttgtaagaattgacaaacatccttaaattcacggatgttcaagagacccagaattgccaaaatcatcttgaaaaagatgaggaagtttccgacacacacttcctagtttcaaaactttctttcaaatgacagcaatcaagcagtgtgatattggcctaagatatacataaagatcaatggagtagaattgagagtccagaaataaaccattatgtttatggacaattgattttcaacagggtgttgtgacgttcaaacagggaaaaaatagttttctcaacaaatgatgctggaaccaccagatatctacaaagagtaaagctggactccctacctcatagtgtaagacacaaatgtaaaggataaaactatacaacttgtagaagaaaatatagaagtgaggttcatgaaattgggttagtcagtggtttcttaaacatgacatcaaagcacaaacaactgaagaaaaaatagatgagttggacttcctcagaattaaccaaatttgtgcttcaaatgacaccatcaagaaagtgaacaaacaatccgtggaatttgcaaatcatgtatctgttaaggggcttatatctggaatatattaagattcttacaactcattaagaaaaagacagcccaattaagtaagaaacaaagtatctgaatagacatttccctaaggatatacaagtggataatatgcctaggaaaagatgctggacatatttattgatcaaggaaatgcaagtcaaaccacaacgagatatcacttcacgctcactaaggtggctataataaaaaaagacaacatgtgttggcaatgtggtagagaaattgaaaacatcatacgttgctggtggattgtaaaatggcatagcccttttggaagcaatctgtcaattcttcaaaattggtcatagttaccacatgaccaagcaattatatttctatttatgtatccaagggaattaaaatatatgaccacacaaagacctgtatagagatgttcatagcaacatgattcataacagcctaaaagtgggaacaacctaaatatctatcagttggtgaatggataaacaaaatgtggtgtatccatacaattgaatattactcagccataaaaaggaacgaagctctgcaacatgctacgatatggatgaacctgggaaacattatgctatacgaaagaaaccagacaaaagcgaccacagtttatgattccatttatatgaatgggcaaatccagagacccagaaagatgagtggttgccagtggccagggggaggggacaatacagagtggctactaatgggtacaggatttcttttggaaaggtgattaaagtattctggaatttgctgcacaattctttgaatatactaagaatcactaaattgtgcatttttaaagggcatattttatggtatgtgaatcatgtcttaactaaaaaatttgttttaaaaggctctgtattgaataatttgcctagaatacacacatggcattgggagtggcctccactctgaataagcttacaatctcttggggaaaaatgcaatctaacagttatagtacttaagcgtacatggtaagaaagaagcacatggagggtgcttattgaatgggaaaaggaagaaatctacctggatgatcacagaaggtgtttggtggatagggagtatttgcaagaagaatccgactctcgtgtagcttgagaaagcagaatgaaaacccgtatctaggaactgaggaaggcagtcagcaatgtaaggtcaatatttttctaaaagtaatggcagctgaagtacaacttaggctgcctgagaagagagcaagttttccttcattggagcatttgaaatgacactctggtatttacaaggtgaattattcacactctttaaatctcagtgttctgagttgataacacatttcagagttgacatgaggaccacaaggaataataagtgtgtgtttaatgtgaaaatacaatatcttgtacataataaacagttattactgttggtctcaccaccaacatcattatcaaatgaatcttggcagtaattctgggaaaggaatttaggcaacagatgggagctcatttgaatgatgctaggatttcatggtactcccattgttggttacagaactccaagaactctcattcttggagttttctgtttcctcatataaaacttggaaggaagaacagaagaccttcattctgttccaggcccttaaattgattatttctgtgcctaaagcaaactgctcagcctcaatcatgactttgcacaatttgctgtgatacctggtatagatgtttcatttgttaaagttgttactgacaagaacctccaatgaccttggaacatgacctggcccctgtgggtatcagtagaattttggtgaacactgagaagtctctgagtttctttcaatctgggcttctttcagttggtttgcaaactggacttgtggaattagatgatctctcatgcccattctatctttgagttggtattatttttgccccgtattaaagaaaaactatattgatatttctttctttgcttttgttatttcactatagaaaattttgttttaacattcggttggagttgatgatatacaacccaattatatggatttgttatatgcaaacataaggaagtattcacaaatttaaagaccaagttcatgttgttcaagataatgtgaacccaaattcattgtgctcaggataatttggaactaatttcatagagtttaagatatattatagtaattaaaatcatggattttgggagcacactcccctgactctaaatatgtggcctgggatgtcacttaaacattttgtgcctcagttcttttatctctataatgaagaccattatagtatctatctcccaggattgtaatgaggactaaatgagtttccatgtataaagcacttgaaacagtgtttgacatatttagcaccatatgcattagaagatcttattgttagctgcgtgcttattcttaaattgtctgagttactgcttttatataagaagattgacttataaatttggcccatgatgtcccatccaactctctgaaatagattatctacctcttttcagctgggcatcttacttatgatatctgaggacatctctctgttcttgtgctttgcccagccccctttggtttctaatgcatggagccaaaagctacagctagagccataatggtcttgtcctaccatctgaaagacatgttgattgctagaatgtttctgtggttaacaagataattcctctgataagtgaacaaccttcacttaaatgcaaaaattatgactcatagattattaatttgtcacaatttactaaccctatcattggcctattgatgtaagttattcttgtcacgcttcacctacccagacgctaaagcatgtaaagcaatagttaagtttattgttcatctgattgacctggagggcttgttaaatgccattactgggctctaccttatgttttcaattcagtagggctggagtgaggctcaataatttgtatttcaagtgttgctctggtgtggaccacactttgtgaaccctttaaagcttcttgtcagtcacatgtttgtaagcagcactgtcttcctctgttctcttatttctatagctgcacacccttaaggcttgccctagtgtcaaaagtggatgctagttttatgtcttttttctagaggaggaaaaaccataacctagagaagtatctttccctgcatacatagtacattgacagaatctggaagatgccctttaaaaaaaaaaaaagtaaagatttgtacctgccattctgtctttcagaattgtaaatttatgtttattgatattaaatatgcctgtaatcccagcactttgggaagctgggaagggcggatcacctgaggtcaggagtccaagaccagactggccaacatgttgaaattctctttctaataaaaatacaaaaattagctgtgcatggtggcgggcacctgtaatcccagctacttaggaggctgaggcaggagaattgcttgaactcaggaggtggatgttgcagtgagccgagattgcacccctgcactctagcctaggtgacaagagcgaaactccatcacacacacaaaaaaacaaaaacaaaacaaataaaaattgtatagatttatggtgtagaacatgatgtttgatatatgtatacattgtgaaatggctaaatcaaactaataaaaatttgcattacctcccatatttattttttgtggtgagaaaacttaaaatctcccaacaaatttataatacacttgcatctgcaattcttgaaagaactattaggtttggaaaactagaattccgaattcagttctgccatacctagaaacgtgaatgtcaactgtttgatctctctgaacctcattttctttgtccatgatattaatacctcctctgcttatcatatatgatattgtgagaagtaaatgacacattgtacattaaagtgctttgtgaactataaagcgctatacaaagattattttgcattctcatcccagttgtcacacacaatatcttgttaaacatcatctgttttatgataggcacatccttctctctctcagctagggtaaatattgacttttctaactgttttcaggaaggaaatagtgcactgtgaactacttgccttgtgcacagaatccttttatttccctcctgtgattattttttcttttctagtctcttgctttttaaagtaaacaattaagaagcttgtcatttagccatttatgcatctaaacacttttgtatatgtgagatgtggtcacaaacataaacatatattatgaatttttctcataacatccttttatgcaagacatcctacacaccacatgtattaagaatgaagtgagttgctgttttgcctgaaatgcattattttttgtttttgtttttgacgtttgacttggaaaagggagttgagttgagccaagagcaatgggtcctcttcccagttgtgtaaccagcaggttgtgttaggtaagtcagctcctttcttgaagcctcaggtacatttgtacatagatcgaaatctagtcttttctcatgccttccactctcaatgtctgtgttctcagtgttaaaaggaagtttcagaagatgaccttcaccttgatgaagaagtccgaacagagtatccccatttatctatctctattctgctaagatacttttcttttcatgcctcaggtctgactgctctttgcaattcagcctgttgcagtgaagctctgacatgtctttcctttaggatgtgactggtcttcactaggactctcaatttcttagggcttacgtttctgttagtatgatcggaaatagaagaggccatgtcctgcctttaatcccctgggatagagatgttggtggattgggggattgaggggtggagaggcttttatatttttagtgagtctttccctttagtgattttcagagcatctccctattagtgcacagtaagaagtatttgttctttttgccatgcaacaaattgcttaaaaaccaagcagctgaaaacgcgtattttctctttgttcttggtgagacaggaatctgtatatagcttagctggaccaccaacttcttggtctttcacaaggctgcaatcaaggttttgactcagtctgcacttgtatctgaaggttcaacgggagaacgatcagcttccttgcttaggtggtttttaatttttttatatggttcgatttcttccaggcagttgcataaagtgctttagtttatatctggttgttggctggagtctatcctcagttatttgtcatgggagcctctccatgtggcatctcactacatcaaagcatggaagctgagcaagcaataggtagagtttgattacaagatggaagccataatcatttgaaacctaaatgtggaggggacagcccatcacacttaccatagtctgtttgtttgaagtaagtgactaggattagcccacactaagaaagatggcattgtaaaagaatgtgaagcccaggaattaagaatactagggggaatcttataaacctgccgatcacaaaagagagtgaggttagacttactgtccacagggatttagtgcaaatgtaagtttatttgtagaatctgtcaagtcagaaagcagaggaggcatgtggggtatcatgagaagaatagaatctggaaggagtaacaggtaatgaaaggtactaacagatgtaggaagaactccagaatttaagaaagttatacctgaatgtggtttaggaggtcttttgatctaaccacctccatttctcaaggagtccaaagcatatagagggccttactcaggccagaagttgtggctgaacaatgagttggaacaaagtccacaaactcctgacttagtacagattttcagcttgatgtaatgaatatagctctggatttggagtgaaaagatacacatgttcaacttttgatttgcctctgagtggctgtgtcaccctgagcaagtgataagtaaaggaagcttgatatatggttacccagtttataacatgaagctatcattatcatgtatattcatttatgtctgatgaacatattaacttttctttatgaaaattctttgtaagctgacatgaacagacacttctcaaaagaagacatttatgcagccaaaaaacacatgaaaaaatgctcatcatcactggccatcagagaaatgcaaatcaaaaccactatgagatatcatctcacaccagttagaatggcaatcattaaaaagtcaggaaacaacaggtgctggagaggatgtggagaaataggaacacttttacactgttgatgggactgtaaactagttcaaccattgtggaagtcagtgtggcgattcctcagggatctagaactagaaataccatttgacccagccatcccattactgggtatatacccaaatgactataaatcatgctgctatatagacacatgcacacgtatgtttattgcggcactattcacaatagcaaagacttggaaccaacccaaatgtccaacaatgatagactggattaagaaaatgtggcacatatacaccatggaatactatgcagccataaaaaatgatgagttcatgtcctttgtagggacatggatgaaattggaaaccatcattctcagtaaactatcgcaagaacaaaaaaccaaacaccgcatattctcactcataggtgggaattgaacaatgagatcacatggacacaggaaggggaatatcacactctggggactgtggtggggtcgggggaggggggagggatagcattgggagatatacctaatgctagatgacacgttagtgggtgcagcgtaccagcatggcacatgtatacatatgtaactaacctgcacaatgtgcacatgtaccctaaaacttaaagtataattaaaaaaaaaaacattaaaaaaaaaaaagaaaattctttgtaagctataaaagcctttagaaaaaaaagtaagctttgtttaaattattaatgtgtaggttgaggcaaaacaagcactcccttttgacagaagggataagtactggttcatataaatacaattttatctccatctgtatctgtatcagccatttatttctgcttgataaattatcccaaagcttagtaatgtctaccttactcacatatctgcaattttgatagtactccatgaaaatagcttaactctgttctgtgaaatgagcccatgtgcctcgatttgggtgcagaggattcactttcaagatgctttactcatggctggcagtttggtgttagaagtgcgactagagttgtgtgtcaggaccttagtttctcttaatgtgagttcctctacaggctcctagggctttcttacagcatggtggatgagttccaaggccaagtatcacaagagagaaaggtagaaatgccagcattgttatgacttagttttagaacttacacagagtgtcctttctactatacactgttgattgaggtccacctgggctcaaagacagggggttagtctccacctttgttgttggggttgtagtaaggctccagacaagtttgtgggcaagagacactgtcgtgaccatctgtgtacagtacagcctgccattatattgtattttattgcattgtatcacattttactacatcatattttaatgttttatgttgtatttgtttccatttgtggaggacttaatatctgccagacatgtatattctgtattaaagttgacttaattctcacaacaaccctgtgatgacgtggtccttctcattttcaccaacgagaaaaccaagttataaagatggtaagtaacttgcctaaggtcaaaccagctcataagtggcagagttcaggttcaaaaccaggcaatctagttctggatcccatacttttcaccactctgccagattatttctatgttgttatctgtttttatgtcttaaataatatttatgccatgctgttactaatcaccatttccatccctgtctctgtatctcagttagagaaagtgggtagataaggactggatatcagactggatagggaggaaacacatgcaggagtatcattacctttgagagaggtgggtctgagcttgtccctaagtgctcctggaccagttctaggagatctcaagaaaagaagcaacgtaacatttcactagttccatacagagtttatattggccttaatgattttgcctttaatttaataagacatatgggagtctacggaatctagggaaggcagctgagtaagtaacgatatttttaaaaaaattggaaataggggccaatatttgaagactaatgaaattcaggggcatctattctcgttccacaaaagtttagctatctggtattccatctggtgatctattcaatcaattaactcttccatattgggatgtttgtcagagtccagcttacaaattgaggaaatccacagtcacttgtgagctagtttgtatcagttattaaaatttacttatttattgtaaacttcatcaaaccaacaattgttaagcccctactgaatgcaggacactgcagattacaatcaaggggaacacagtttataccctttctcacaccacaagggacttctactgtaagaaaaagatgtgtaaagccataacgacaagaatatgtgataaatatgataatgaatctatgaacaaggctgtatggatgcctagcggaaggtgctccaatattctcctggagaggtcagagggggcttttcagagcatttaagcatatatattacaggaactggaaatgttcagcccagttggagcttagaaaatgtagggcaagtgataagcctggaaaggaaggcacgtagatatgtttctgcaaatgcattccctccttctgtcttcctgtctgccttatatacacaatgatgactcagtaccaggaatctcaggaaacaaacaacacacatgcacaatataaattcctctacaatccctctatttatcctcagtgcaaaacctcaattaactaatagctcatctgaaaactgtcagggctagaaagtcccataacccctcaggataaaatcacaccaaccgtaagttacttaggctctccaaggtcagcctccttttatctagcttccctctttttataaagctgcgggcctgtctctaacaggatcatgtggtaacattcatgatttgcaagagctttactgctacaaagcacatttgcaatacactgtctcttttttttacttggcatttgcgatttaattgttaacccacctgatatatagtgaaattgtggcccagaaatgtgaaatgactgctcttaatttttacaaaaataaaacaaaataatctaatccttaaagtcgtgtcttcttttgcaaaatcctagtacatttttagtacatcagttgtgttccgtagctggggactctgttcaagtgaaccttaataagaagtgtgatgtataaaatggcagagtttgaggtgttctgactgaaataaggagtctgggctctggagcgtggctgagcatcttcttgctcactccagaaacggccctgaggcttcttcatgtctagtgttgtgaaaaccactcaactgcagtgtgcttattacctatgtctaaccttggagcactcagaaaagacctaatgcttattttactgtctgaagtgggaagacagccattgttaacgtgggatctcccctagcattctccttctgatcctagcgtaaattcctgtggatcaaagcccagcccctgagactgtaacagagagaataaaagaacaagaagatggtgaaggcgatatggtgtggtagatggagcatgtgaattctcctagttctgcttctaactcactttttgatttttagcaggcaagctatttcacttctcttgtgccacggtttccattcataaactagggaactggacttcttgtctcctcaccgtctgattaaaaacattccgtggtgattccttttcttggtaagacacatagcttagtccacctcaggtcccaaaaggaggatcaaccttagtgttttacgctctctaatatgacctcttgcggtcgatgttttagaggtatctatcatattgcatggattgagggagtttgacctgttgagctgggcgagttatcaccatgcagcacttcaggtgcttactctctttttatccatgcattggttcattggattcaaacatttcattagacttcctgccttcttttggggggatattttgaatttggggataataagtttagaaatctttgggatgaagaagaggaaagagaaggcagaaaaggagggccatgactataacatttatcagcaactgtgcctcttccagaagaatcaggatggactggatttgaatataaaaagtaggaagagaggcaaggcagaaactgggagaggccgcagatggtagtgattgcagatcctttataaaatgctgcatgtttcaactttcctctgcccaacactatcaagtgagatggatccttggaggtctttgggtccagtcctcaaggaatcaaaattacatctaggtagtaggaataggttctagtgttctataccacgtgggataactatagttagcaataatgtgtgatgtagtttcaaataactagaaggcagatagttaatgttttcaacacaaaggaaatgataaatatttgagatgatgaatgtgctaattaccctgatttgatcaatatacattatatgtatggaatttcactgtgtaccacatgaataggtataattatttttaatttaaaaaaagcagtttctcatgtaagctggatgttgctggatagtttaacagaagtctgtatagccttgttgtattttaatcattttatctttttttttggcctggaaaatattaagttagaatggctgtgctggaatacatcatccccacctgtatattaaagctctgtgttatttaaaaatttgtctaagaaacctataaattgatggagcctcactgtggtggttctacttctctattttgtgtgtttgtttgtttgtttgttttttggtctggtgccattgagccactgtctataggaataaaaggatgttagcatgactgatagttcagtgacctgtaagtagcgattttaaagaaaaattttataggtctttgttagttccaaatctgactacctgttaattctgctttatagtcatgctctgactttaccatgaaggctgtagcattgtgctttatctccttgtctccagagtacaagatcttggtaagagaaaagagtgataaacccaaaaaatacaaactcagtttacctgagactgagtagcacagaggtctccactaccactcatttccctcttcacatggcaatggaacttttcattaaaaataaattgtatttactcatgtatattcttatgctaaactgataccctttttcacaatggataaaacaacaataaatgtttgcagcctcgcacatcaattctcgaaccctgttctgcaatttctggcaataaaaggccttgcttagtgtgcattaaaatcttggttctaaagtcagtgtctactttcatagaaagtatagtttgtgacctctgttactatattttcaccagcaatttgcacacttgtcatgaggctttctctttgtatgggtcttagataatgcagtatcttgacatggtacttctatggtaagacaaagaggatgctgtttttgtattaatgcgaccaaaatatttcaaagccaatcttacagaatccccctattggacatcccccataaattttttaatggaacaaaacccctctgtgagaaataacaatttgtatacgatttcaaaggcataattcaaactatagctgaataagaaaaataatacaggatctaacaaggcaacacttaatgaaaaatcaagggccaggtgcagtggctcgtgcctgtaatcccagcactttgggaggccgaggcgggtggatcacaaggtcaggagatcgagaccatcctggctaacatggtgaaaccccgtctctactaaaaatacaaaaatttagttgggtgtggtggcatgtacctgtagtcacagctgctggggaggctgaggcaggagaatcgcttgaacctgagaggcggaggttgcggtgagccgagatcacgccactgcactccagcctgggtgacagagcaagactccatctcaaaaaaaaaaaaaaaaaaaaaaatcgaacaagtctttggatattaaccatagtgatcatgccctaagtatgtatttactttaggtaaatcttagtaaagcaggaattagctggttagctgcacttactggctttaggttgctggttagttaactggaaaggctgttagtttagaggtgatacgacacatagattatggtttaaaaaggttgcagcccttatttctagaatgtattcaatggtatctgtgctgcctaacccatagggttatgttttaaacgatatgatataaatgtgttatactacattttgaaacgttagttggtgtcactatatcttttggcaaagagtctccttatgaacttcagggagcttgtttctacagaaggagtttggttcataagatgttttccataagaattatataaatttttatataaaaaagtagtgcccaaactattaactcatggagagagatcaaattctggtctttttaaaattaagctctattagtccattttcacaccgctgataaggacataccagagactgggaagaaaaggatattttattggacttacagttccacatggctggggaggactcagagtcatggcgggaggcgaaaggcacttcttacatggcagtggtgagagaaaatgaggacgatgcaaaagcagaaacccctgataaaaccatcagatctcataagacttattgactaccacgagaacagtatgggggaaactgcccccatgattcaaattatctcccactgggtctctccctcaacatgtgggaattatggggtaaaagtcaagatgagatttgggtggggacagagccaagccatatcacaagcttagtgagaaacctaattgcttatatactatctattattttcaaattcattttaatattttggattcttatccaactaagagatatagggaacaaatgctgtaataatcacccatctgtaaaatatggaccttctcatagggaacttacgttttagtagggaaaatataacatatacactaatagagattacagagtaggaggtcctttacagagtaaaaggagaatggagatgtacagtttggtgtgtactgtgggttgaggaagattgtgtgttgcggaagatggtgacagctactgacgagtcactttctgccatagagatcaattttccattggtcaattgtggacattcactaatgtaggttggagtgatgcttcaggagcagacatggcataaactatttcaggaaaccataaacagcttagctttatcttcagagtagggtatgaaaagggagagaccaatggtaaaaatccaaattagaatgatgtgatgccatcttggaggcccttgtaagtcaagcaaaggagtttgtgcaaaaagtttgaacattaacaacaacaaacaaacaaacaaacagaaaacagaaaaaaatattgcattgtatctgtgggaccttcccatccttaggttttaattttcccctctgtcaaatgagagattttacttgataatctccaaaattgtgaccagctctaatgttttacaattcccagaattattacatcttaacttctccctgagaattatttactgatcacatagtagaactgaagtgatttctacagtagctctatagctagcaacccagcattggataaactcaaggaatgaaaaatctagtgtgtgctggggttgggagggtagtcatatattactgatttaactgtcatctggaaaactttatgggaactaagtagaggatgccataaggaccattaactgctcctaagatatgatgagcaaagactggagaataggagtgggcctagtctacagattagttttctattattgctgtaacaagataccacgaaattggtgtcttaaaacatcacaaatttcttatcttacagtgctgtaggtcagaattctagtccaggactcactgggttaagatgaaggtgtcagcagagcttcgttcctttctggaggctctagtcatagtcattacctttcccagcttctagaggctgcccatatttcttggctctcggactctgtctttctagtgacattgcatttctctgaccactctttcatagtcatgtctctctgaccacagctgggaaagattctttgcttttaagaactcatgtgattagatgaggctcacctggataattcaggctaatctccctgtctcaaaatctttaaccttaatcacatctgcaaagtctttgtaatcaacatgttcacaagttcgaggaattagagtgtgtacattcttggcggggtggggagggctgttcttatgcttatcacagtctgtttttaggaaagtagataagttcacaacgttaatgcatggaggctgagattgtgagaagaaatgaagcagccagtcataaagtgtgtttcgtgctaatgtaaagagttctgaagttattctgatggccatagagagctattcaattctacctagtagaggaatatttaatctataatgatgtcaaacaattgaagtgggtagcttgtggtacccaaccatccttcgcattttaaacatgggaaaatgaagactattttttgactcagtatacttgggacacatattagtgccatgtacctatcattattttcccatatcatgtgtttttctaccctttcctcctacttgtttttcctctagcctgtgagaatgccattcatgatttataatgttctgggtaaaaagttcaggtagacctacattaagcaaaggtaactcagatttggaagactgaagcttggtagcagggagggggttacttaggacagagagatgccttggaatggccgcacattgagctcgtgcatgttggagctggcattacccatgtgaggaggtggatgacctgtctatatattcaacactagcttttctttgagatccccacaaaacagatctaggaaatctaatgaaagaattatccctgctacaccgtgtttttaacataggaacggacagttaacttgtgtgtttgttcaagaatgattcataatgcagaagatgaactggtgaatagaagaagcctagtaaattggaagattctcttgatgaaacagagaaattgagatttattattcagtcacttccaattacactgttgtgttgcagaggaaagcagctaaacaggatgttggctggtaacaccagcaaagtggaatcaacctcaaaggagatggtgtcagagtggtgttcaatgcctgagcttctaccgagtgagtcacttgtgtgaaaatgtcttgacacagatagaattgaggtgcccacactatatctgatcacagaaatgttaatgcagaatagcaaactggctttcatcttcatgggattgcaggctgggggataaaagggggtgcatttttaaaggtcatctctattgcttatgagaaaacaatgtatcacatcccatgcatctgtgagactgtatatcaagaatcagaaataaatacatttgaaggaaaactgcaagttgtttctcacgtgtgaatttgatgcttttttttttaaaaaagaaagattttctggaagaatttagcctcctgaaaacttgtttcttctgtgttgtagttgataatatctaccacccactgtggtgcatggagaggaaaaaccttctatcccctactttatgtgttattgatgtgacataatttttcagaatagccacacaatttcaaatgtgacttcttttctaacttgcaaatagagctgacaacagcaagatatgtcctgtaaacaaaccccaaaagaatatttttgaacaagttgtagttcaatttataccagattatggaacactagagatttacagtgatgcgttcttttatttagatggaataggagaacccatagagttgaagctgtttgtctgaaggtttgcagcagatcagtggctctgccaagcctgcaactatcatcacctgactccaagttactctctttctagtccagcacagctgcctcccaagtttaatagtctatgactcacaatccaaatctatggtgacatataatattttactttgattccaaatcaacaagccagttttagaagtgcttacactgctgcattactttttatactattgggttcttcaagttgagtcttatttctagaactccaataagaataaccagaggagtcatttattttgttattatgacatatttattgaagacttattgggtggcaagctgtcttatagagggtgagggtacagctatgcataaaacaatgtgtattttcttaaaagagtttatattactgtgggagaggcatagtaaacatgttaggttctatagagaaaaataaagcaagataaaagtgaaagagtgctttgggttgagtggagccatagttgctattctgcacaaagtggttaagaaaagccttaagaggaagagatatttgaggagagatctcaaggaggtgaggaagtgagctctgcagatatttgggataagcatgttatagacagagggaagcacaagcgtgaaaagtctgagaagatcatggctggcatctggcatttttaagaaagagtgaagtagccaagggtgcctgaagccaagtgatcccaaggaagtgaggaaaaataaggttagggaggtagcaggggccctcatgatcacatagaacctcataggacctcttattcttagtttaagtgagatggagagcatttggagtcacattatcaggcttatgttaaggatcactcaggcagctttctgtaggctatgtggtaatccaaaccagaagtgacaacacaaactagaaattacaatcaaactcaaaatgatagttggttggacttggtaggtatagttggtgttggggaggggataagaagtagtgggattctggatatatttccattgcagcctcaacaactattgtgagcagatcagatgtggaatataagagtaatagaagagtcaagaatggctcctaggtttttaccctgagcaaggagaagaatggaattgctatttagtgagatttctggagacaggaagattaattttgcttctgtttttgttgtttagaagagaaaggagaaaggatgatcagccatttggctttgaatatgttatatttgagctatcttttagagattcgagtattggttgagtagacagctgtatatttgagtctggggtacaagggcaggctcttgacttgatataggtgtaggtgtcagcagatatacatttagagctttgagcctggatcatatcacctaaggtaatggaggaagccatgaatattttgatgtcatggagaaaatagaggaactattaaagaatgcttgggacaagaaacactgaggtgggaggaaatgcaaaggacagtggtgtccagaaatgaagtgaaaaatgtgcttcaagagtgagtgtgtgatcaaggtatccacaccattggatcaaatgccatgaggattaaaagttggaccaatggatctagatcttagttgaggattgccttgataagaacagttatcgttactcttctgagctatttgctcacacttgccttactttttgtcaaagtcgaggcccctctaaataatggttaaatacaagggctctggagttgccctgtctgaggtcaaatcctagtttcatatttactagttgtttgagcttggaaagtttaattaacccttctgtgtgcttcagttttttttgtttgtttgttttacttttgaaaggaaagaaatgatatgttttgtctcataggtttattgggaagattgcaaaaattaaacatataccatagtgtctgtcatatagtaaattaccaataattgttagctctagtgattaagaataaaatgatcactaacatctataaaattacacctgacttatatttccttcttaccctgaaaatcatacaaactctttctagagttgtgcttgagtcggttgcactattttctgcctttttgtttttttggtttgattttttttcagtttttttaatcattacatgaattaacctcattatgatctaattacttccacatagttctccagattgtgaatgctctgcgaaaccatagcttgttcatatcttagaaccttatgcaagggttggcacttttggcacttcaggcttgaaatccaggtttctgaatgccctggtgattgattgacatttcaccttcaaggtcattccaatacttaatgtagaagtgatagggtaaactcttaattactggaattacctataaataaataaatgacttaaatttcctaaaataatagttaatgtcttgttaatctgagttccttttctctgtaaattatttcacaggcatgaccctctgtaattttctcaccttttaaagtgatcctgaggtatatcatgcaggatagttgacctttgggattggtgttcttgccctacggtagatagctttgtgaagtcttccctccctttctatttctgggacctagaacttaaaatggcctcttatgttgaattcttctcattcatatttctataaactcaaataatggtgcctttaacatcttcagacgtgccttcatgcgttacaaaaaaaaagatggtttgatatttgtttcctttatcttctttgaaatgcacgaataaaggtaactatttacaaacctgaaataaagcaaaactgtgtttattagattcttgaaaagcggttttgcaaatctaaatcaagcaccgggctaggaggactacattaagcaacaacaccagcaatgagtggtatattttaggaactgtgtccatggacagaatgagatatcatgagcaaatatctgttgcaattcctgtgccaattcataaatggcaacagctgattcttgccttgctcacatagttgtagtctggatggtaaaaggtaatattttcaactccttggtttactttgtcaggagtaataagtttctaataaagaagctatatttatacttctcacctagcctctctctctctgtgtagtccatgccacaaacactgtacattggctaacatatttgtctgagtaagggtgagagacaagaagaacatgagggaaactagaggttgtacaagtaaattctattgttgctaatgccataatttattccagatattatctagtcccagaatgtgcatatgaatgttctggcgctctcttttctgtacttgtaataaacaagacatcagaagacacaagagttgagagggcccagtttcagtacctcttgttataaatcatcaagcaggtaaagagaagatccctgatgttatcagtacttttgagcagaaagcatggatgttatcagtatttttgaccagaaagagaatggatgttatcagtatttttgagcagaaagcatgcgtgtttgtacaccttcttgtttactccacataggcactccgacaaaatagtatctctacctcaaccagtaagttccttatctgtctctgagttcttttgtccttctacagaaacaagagtgtttctcttaaactaactccctcattctggataaactgatataataaaaacaccagaacgaaaacgcatgtattcataccatactttcccacctcactgtgctgtactctgtagagttcatatcctctcttcttttacacctcttcagtgagctctataattttctagctcttggttgtttctctgttcgtatcatctacctgcaatgccattcatcacttcctacctgccactctcacccttcattttttacctgaggagctgcctcctaccccgtatgagttgctgtacacgtttcttttgacacttgtcacatatataccctgttatggttgtggtcagctgtgtagattcaacttccttgacaaggctggaaaattgtgaattgtaggaagtgtgtttgagtgtgcttccgtttctgggattcccactgtgtctaaccctgtggtatctggcatgggttaggcaatcaacaaatgtttgctgaacaaatgaaaacaaatgggtaaaaaactcaaacctttaatattcattttttaagaaaaatagtaaatagcattaccatgactgacagaccacagttaatttgccatttctacctcccacttgctgttctcaaaaaaagtggaataaaaccacagatttgccaatggtcaaaagatgaatctaaagggcaatgatgttacaacttattattaacttatttcatttctgcctaccaagaaatgtgtatgactcagcttttgtccaagcagcactgcttttgttctattttgaattcgtggtggaaaggatgagtttttgataaagatcttgacttttttgtatcaaatagaggataggacggtattatagagattaggtaatgaaatgcatgggttctaatgcctgcactgcctctacccctgtctagctatatgaccttgaacatttccttgcctctgtctaggccttagtctccccagatgtaacatgagggagctgatgtagttaattgtcagtggctcttgcagccaagcatcctagactggaattctaggtgggattcagagtaattccttgtgatgacatatgactcaaccttcagctgttaactggctcaccatcgtgacaacaggcaccagattattcacacatttttgaatatttgaattgcataaggctgctcaatgatggtgaaaattgggtcctaaatgttctatcagatatatatgtagtgtaacctgttcaggatctcgtgtgagtgtaaaatgatgtgtgaaatatgcaccaagcaagaaacactttgcacattatgataaggcagtaatacaatttgatttttatgagttaaagatgatggtactataagagctctagttatatgaagcctggaactatagtatgtcttagtctttatagaaaggaaaacaattaaaaatgttgtttctcactcttgtatttccgtgttcgtagagtcaatagtttcactcaaggcaggaagacaagacctgatgttagcccctctgtccgagtcattcaacacctcaccccctccagttatatttatatttatacatattttattattcttttactatgccagtaccacaatgggaaatatgtttacttttaaaaagctacccagaatcctccaatttctcgtccgagaatataaaaacacttacctcacataaactcacttaagaaaatgtgaatgtaacactgttcccccaaaccgctttcttctttgaatgccagcttttcacatagcagctttcctgacctcctacttccaggacctcagacccctctgtctgtgggctggcacttggaatgtggctgtccacttggcaaagtggaaagagcttctgttctcactgtggcatctggggcctcaattctggttccaccactcagcagctctttgaatgctaggaggatatttcacttctccagatcctaatctcttcactggtaagagaggaataattatatttactttttgacatggctagaataattacagagaatgcatagagagcatctaacacagagactgacaggtagtaggtgcaggtttacttccccttctgtagatggtccagggtctctgacgcatctctgcttcttcactggtttatctctgtgctatgctaccaccaaggagtcgtctatgcacagataaagagggaaaatggtctgcagtcatcacttgggattctatgcaattcagtgaggtctcaaatcactactcaacaaccattcagcagcaatgcgatgtcaatgtccttatctgtttctcatgctactactgtttcatatctcctacgtaatgtagtttaggagaaagagtcatgaagtgggttccagtagtcctggcttccagttccgattctcagataaacctactctttgacccatgccaagtcatatccttccacatatttaaatgacaatcctataccttagttctctccagagatacatagattgttcaggctgatgcacttatgctttgatttactggatattcaagtaatgaagcctatctttttctatgttttcttctttttctggaattcaaagtctatgtgttcttgccattgcccctgaagtagtaacatttctgagcctggctgatctagaacctctacaaaggctgtccttccttcttgataataagtcagtgcatttacctaatatctgggagtttacaaagtatcttcatttattcattagtattgaagtctcagtagtaactcctgaagatggggattcttacccacattttagagatgaggaaacaggatgggagatgaaaggatgttctcaggagtcccacagtaggtgttagttacatagcttggatttcaagcagcatccttctcccaatcccaggtcctggcctgaatgtaaatgtgatttccaatccaagtttgaatgtctgtgcactcattagtccctagacaaatctggtttttcttgcatgagaatgaaattgaactttcaaacattttcttaagcctgtaggatctacattctcttcattttctaatatacttgtaactttaaattccttattaagcccgaaggatatttcacttcattgtagaaatttaccattgccattggcttctgcaaaacttggcagtgaactttttttaaaaaacgtggccattgagagtggtccccttgatacttgagtgtgtattgtcccaaacattgcctcaataggtagttactgtagaagaaaatgccgtagttttaatggcagccttgaattttctcctctctcctttaatggaaatccattctatacttattaatccactgagcttgtcagtacacatccctgtcatttctcaaaaatgtaaggaaacagcatgtatagaacaagcactggactaaaagtcggaggagcagattttagaccttccttttctaccaattatttggaatgtggcaaatcgctttacttctgtgaacatctagttcatgttttataaagcattgaagtagatcatttctaaggttcttttccaccctatttggtaaattgtctagcatgttctacttcccacttgattaaattactctgcttcattttttttaattttgcaaggaaatactcattacatataaggataggagacttcacttatttccacagatatttattgagcactgactatgtgaaacataattaaagtgtaatgggcatttggaggagggagacattccagaagaggaaactgttatgagtaaagataaagcagtttgaaagtgcactttctaatgagaacctggagattcatggagaatttgcagcgcatggacttgtgagcagttggcgttaaggttgagaagagggcagtgtggactgaatgtggaggcttctacagtgtgtactatttataatcacgcacacacagacacacacagacaaacacacacatacaaacacacacactcatcccttttcagggtctcctgacgacctatactgcctgttgctctttttacctcagccagcaaagagataaattgtcaagattaagtagatctgaacatttgagaaggagttccataaaaaagacaatgaaaatcaagtgtaccagcatctttgattcatacaaggatcattttcagtttaacagtttatctccgttgttggttgtgacttcctgcaggacgtgacttttgatatattcattcttgaacttccaccaagcacagtttcaccatagttgatgctcagtaatagatccttatttgttggactgaattgctgcctactgaagtcaatcctagaaaggagagaagatagcttttttacatagaataactaggaggggttttcttcttttgaatgagctaccaataacaaaataaaactgcaatgaaagaattgacagcctggatctgtaatctgcctgacctgataattgtaaaaactgattactgtgtcagcctgccagatggatcttctccttgaaatgtaacgtgcggcacttctgaatgtgattcaagtgcaagcttccttttctctccccttcatgtttgttagtttgggaaagaagcagttttatttgaactgaacccactcattttaagtgtgtttaatgacagcagtatgtgacagataaaataaaatcctacggcctcgtttgatgtttagtttcagaccttagtgaaaggaaataggataaaacaatgttgttcaaagggagaagttgaaaacaaatgatttgttattacacacttagccatatctctccagggaaatttgggaagtcaaataatataaacggtaataatagtagtacttgagatttgtggagtgcctagcagtttgtcgagtggctttatgttcattatcacatcaagtctaggaggttgcctggccagaaatcatcatcccactattacacacacggttgagtgagttacgctaaatactacttctaaaatggtagaactgagcctcactcttggtcctgttgattttgaatggaatagttcctctaattctctgtgctggctcaccaaccaaacatgtgtgcagtacattggaccacgttgtggaaccagcctgttccttaactttactgaagcatatatatgctggcaatatacaaataaattatcacaacggatttcagcagtgagaagtatatgaagttgaacataacagccctccctcagtacccattcattttctcccctgccaaccccaactctttttccaaagagtaatcaccattgtctttttgttgtgcatctttccaagcatgtatctatacatttatgtatacatttacatatatgtgtgtgtgtgtgtgtgtgtgtgtgtttgtgtgtgtgtggtatattatctattttttttcagttcttttcctctggatcttttcatgtcagtaaaaaggatttgccatactatttttaattctgtatagtgctccatagtgtaagggttcatcactgagtctcttttatagtggagagcttcagcttttctttattacaaacaatgttaagatgagcttccttgcatatgtatctttgtgtacatgtgaatccagaattggaattgcttgttttttttttgtttttttttttgtttttttgagattatcaaaattcagtgtgggccatcatcgcaaatgttagaatcctcatcttagctcatgttatcgacctgggtttccacttagttgcttggggatgtgttgttcagaccaagccagacacttctctaaacagacacttgtggccaagagagtaaatgttggggaagttattttccatggcactgtggtttgaatacaggcactcaccatggaagaagagtagggtattcttgtaacagtcttgtttacttaaaacagccacgactcttcgctgagatagaataaggtacttaacgcaataaaaatatctaccataatttaaaaatgcaaatgtagcaatgcactaaaaaatacctttagcttattttttgttaagaaacaagtgttttgcataatcaggctttaaaaaatataattgaattctctatactgattctatgataggaaggtccagagtcaggtccaccttccatgccatactccttctttccaccattcgcagctggtcctactgagggtaattagtaggggataatatctgaaaatgtaggtatgtaagagaatagagctaatctgcctagcttttatgatattacagatcgcagaggagcatcctcacggataattcccaaatcacagataatgtgttgttgtgctttataagcagagagacacaaaataaactctctcccctatccttctcttttatttatttattttccttctgttaatagatttagtcattttttaaaaccataatataccaggatgagccagaattatgtgtgtctaagttcttttaaaataaagaaatcgtttcttgggtctgttttagttaggtcctttcaggttgcaggaaccaagatgtgcttaaagttacctcagatgactttagatgatgggaatttatggtaatatacagggagaaggaaggaagtccaaaaacccatgtcagcaactagacaaccaagcctcatggagacttggaatatcattgaggacacaacagcagctgattttgtcattcctcagaaataaacatccagtgtttccttgtccggtgggtctttgttggacaaggacttagctttcttcaattttccttctgttttctgtggcagctcctgttagtgattctgtttagtcttcttctgaacactaggatgttcgttatatgatgtcctgctgcctcatggcctcctcatcctacgccgtgtgtctctggcttttgctccattccatctctgctcccagcttttctttttctgtatccttacactgaaaagcctgaaccaacaggaccattattttagctggttcttctccagtacacatggaggaggaattcttcctccaacacagctcctgggtatctagtctggtttgggttcaatgtctgatccaactagctgtggccagagtgcagaattacctgttacaaaactgtggcaatgtagttattaaaacaagcaactttttgagggttttgcttaaacagagtggttggtgtggtagagacaacattgtatgtacttctctatcacagagagaaatttataaagtcaaggcaaaccaaatatctgaggctgggacttcaccccagatgtttgcaagtaaacaagttgtggaccttagagatccgctcctctcactttctgactgcctcttgctttggtctgtagaccaatgttccactagtatttagttttcattctggttttaaaacggtttatctgtaaacctgtaatttaaacttctgataagcaaaactaacatagtaatgagcccattagaaagcaatcgtgagatactattagactttgataactttcaagaagctttattctatttttgcccattcaaagctaacatttttggcagttttaaaactgaatggggtttttgttttttcctaaatatgtttgtctgatgtatattatatcttattatggcaaagaaacttaaagtaccaaatagaatgaagacatatttgatattaaaataatgaaaaacattcaatatttgataacttcagagagactttgactaagcttcaaggttatttttataaacatgtactactggacaatgtatagaagtttcttagctcacagattttcactttggtagatgaggactaatgtgtttgccagaatgtgcacctcttctctatttaccgtaaagagaggtgtgggtaggagattgcacagtgtcacttagggcttagaggtgagggattttggaatagcttttagtttaacctgcgtgtgagaaaagaaggtttcatcgtgtggttaataggaattttcatatgataggaaaaggattaacaagatttaactttatattctcaataacttcccaattaaccagtgtctttgatgaggaaaaatttgaaaattatacagttgtgtttcttttcaatcttcccttgcacgattacaagacgatggaaaagtgcttacactttgattgctgttcctaataaccatgttagaatttcacaggtgatctggaatatcatatcttgactttcatatgtgggagcaagagtcagcaaacaacctttctgtgcttagagatgattttatacataaaataatattgttttgaaaatgaacattgatgggaactgtgtcatattttctgtatcatatttcatgttagctttattagttagctctcattacctcaccaaataactcagatttaaaaatatgtatcttaactgtgatcagcctaaggactctattcgatgatcaagtcatagtcaaatcacagtctcatctcttaatgtgttcctttgatcctcctcccaactctccctccaacattcataccaaatccttggatgtttctgcttagttcaaaaagccatgttctctcactatgtaaattataccaagaataccactaatcatatacgagaagctaacaatctatgcttgagttgtgtgttttttaatatcatgctttgggatatgatgccaaattggatctccaatttgcctttaattagtcagcaacacttatttaatgcccactaagctcagagcaaggcttggagggtggagaaggggagtaaggagatcgaaaaacaaatacactatcatttccagaatagttacagtatctttatgcatacagaaaacagataaatgaaaggatttagaaaacttaaaagcaaaatccaaatgagtgcaaattggtctgatacaaactgagctatataaatgcaaagaggatgcaaattataaaaacttgaagagtttaaaattgctatctttctacttttattttcataatactttgccatgagaattcttagatctcaggacaccatacccttcagtgaggaaagtttactggttcaattgtatgatttagagaaacaaacctaattcttagcattttatgggcttctgagagatgacgctgtaaaactttttgagtctctgttaaacttttctcgtcattaaagcttttatgtaaccttgaacaagttccttaacctctctgcgcctcaacttccacatcattaaaatggggatgataataggacccatctcataggattgttaggactattaaatgtattatactctattacttgtatcctataaaatatctttctcacagtttaatttcttgaaaattgaaacacatcctatgattgatgtggtaagaaaccattgtaacacatattaagtgacacctgttggttctttgttagtaggttagtagggaaaaaaaaagatgcagtttatagtcaaagccgtgtgtaaagtgtgtctaaagtgcttaaaacaaagcctgtcatacagttggtcttatagaatgatgctgttatcatcattgcctgaataccatatttgtggtatgtaaaatatttgtctccaatttcactggcttctgtcctatgaagcagatatacttatagttcctggtctttgagtaaatagagcctagaaggattatcagatattacacaactgccaaataatgacttacatcaaaccaagagtttattcctcttctcatgcatatcaacacctgtttaatctgatcatgttttcaaaaacccactagtgatctatttatttctagctatagctttcatcacctgtatttggtgatttgttgctggcagagtccatactcataacactaaatctgactactgtgattacaacagtctttctaagttagataccactaatgatattgattagggagaaggcattctttgtgatcctatttgcacgatctcgggtaattcacttactggacccaattgttagttgtgaaatgtgaatgttgaaagcagtgaatcttccagctgcttgatttgtgatatcactatcaatttacctactgaggagcttcatataaattggtcatttgtagaaagtagttcagtggctgagaatctggcataatattttatttttatgaaatttcagtaaacattattgagcaacttgtaggtttcaggctccacgatagggatgcaagcatgtaagacctctgtccagcaactgagaggtaaaactacaatgagaaagatagactggtaattcagatttatttttaaataatagctttttgagatataatatacttacccttcaatccactgactctggttttaaaggagatgattaatacattcactcaaccgatattgagcatctgatatgtgccagagacttcctatgtgctagggttatggagattgacaatagttatacaaaactgagcctgtcacaaaatgtgtatcgacagacagtcttccatttggtgctatagaccagtactcagggtcagcagagggtactctggaagcatattcagggacaaagcaaacctagtcttggaagatctgaggaagtttcctatgatcatgtctgtctcctgccataacaccctgaatgcatccgatctgaactaaactgaggtctgacaaacttgtaggagtttgcgaggtgagtggcttggggaaagtagagaggaagaagtttttctggaagagaaaagaaaatatgctgtggctctgaggtgaatcacatataatgcacaatagcttagtattgtgataacatttgggactgtgtgggcagacagtggctgcagggcctgaagggtggagagggggaacttacgcttcagtaggggtgtatatgtcttattatgaggtcacaatgaagattgaggtcagctagaggatgtgacattcgagttgggtcacaaaggatgtacaggagtttttcaaggctgaccacagtctaggcagaagaaattgcaattgtgaaaggaagatttgcgtgaaagaatggtgtttttggctgagtgaggaatttgaagtatctggaaaatggagtaagtggcacagagaaagaaaacagccaaataataataataataataaattggtgagggttcggagagccgcttacaattggattcggtgcaatgcaatgactttatatgttctgtaccttgtccttgtaggcagttgcaggcactagggacaggagtctggggggaagacaggagcattgaaagtttgaggaaaaaatgagaagcatgctttagaaagataatctgaatatacttgaattggaggggccctggattgtgaatgaaaattagaagtatgtcatctgtattgtgtaggatagtgcttatctacaaagaattttatgtagaattccccatcagattaaccctttgcagcaatagccaattatttctgatattaaaaattataattaaataaaagatatggattggtaactaaacatttattgagaagttactgtatcacttccacaaatcaattcacttatttttcttagtaatccaatgatgtagcctgtcatttctcccatttttcagcagaggaaattgtggcccagaaggttgtatgtaactcatcgaggcactaagtggcagaggtcatgtttcagcctcggccatctggctccaaagcctaaatgtatgaattggccactaaaggcacaactgaaaatactaacagtccctgtgttagtgaagagggatatttggcaaaaagtttttattttgcttttttacaattcagtgatttgtaatttatttacagagtcatgcaatcattacctcaatttaattttagaacatttaaaaagtccatgctcatttgcttcccattctcactctaaccctagataacctcaaatctactttagtggtagtcagtttgtatgaatggcaacttcagtttaatggcttttttttttttttgagtagtcacaatctgatagccttaatcactaattcaggagaataacattgtttgaccatatcatttctaacttctgcatgcaattagtgtactctattcataatttgatgcagagaagggtaaaagtgacaggccttgtggcagtcattggtcaaaggcatatgagtaagactgcctgagaccctaccctggagttctgtcttgcaggtaaggcacatagacaaactattaagcaatattggagaaagaaattattgtagaaatcctgatgtttttggtgaatggcttatgttaaacttctctctcctggaagtcattgaattgtttttaaaaacttagtatgtatgaagcatttggaatgcttggcattttgagaataaaatccacatcaatttaaaataaaataaaactccccatccagaatagagtagtaattgcaaggcataaaatagcccagctgtggagtggcttaaaggacaattggtctcaggcagagagtaccagataggacacgctacacaaaggactgtaatgtctcaattagtgtacctattgggtagcacatatatctgaaatggcttaaaataaaaattgcaaatgcaccagatttaatcaatcttagtatttccttctcttatgctctcagtccttagttaaaaataaaatttgcctgcctcattctcctgtgtgctagctagtaggattaactggagttctcaacaggaaagcaatagatctagtagacgacattgtatggtgggtgaaagcccgctagagataattatacagtcactcccactatattacccttcaaagaaactgagcctaatattctcctcctaagcaatttaaccaacttctaaaaaaaagtataagatattatttagagaatgaaatagctactgtatataatcaggaggaagaattatagcaaattatactcatttgataagtgtataaagagctacgctcaaagctttgtattgtacctcccaagtaattgttcagttgtgctaactgtccttaaaaaaggagaagagataaagaactgctaaagaaaaaaaaatcaatcattatacttgttcaggaagattttccttctgggcaaagattaagtcttatttcatgctccatgaggatcaagcacacatttggccctcccatgtttagtagtggtgatttctttgcctttctcacattcatgttcatgtataaacatagacaccaatataaaactaaatgcaataaaagtgtgttttaagatctaccacatgtatgtcctagtaggtatagatagatgttatatatctgtgttcactgcacttacatcccaatattttcagaagataggactgtatgcaaatgtttccaatatctctttctaggatcacaaaaaaaaaagagcccctgaggtctttctacttgtttcaaaaatgagctggtagtaatattagagccaatttccttttggtttgctttaaacaaaataaacagcccattatgtaaactgtataagacttaagtgtttgagcacttcccttagagtttgtaagtcttatgcccccaccatcaaaaagtaaacaaataaataataaaaagccaatctaattgttattatgagaagtcatacagcgtatttgctaagagcagctcctctaaagatgtcagactgccttagatggaacactctgtatcctccgcttgccagctgggtaacattcaacaggaagcttaatctctccatgcctcaattcctgacttcaaaattattgtagtaatacaatgcctacttcatacagttgcggagacatcagttaggcgctgttcctctcacatatgtcatcaattctgagaccgattcacatgcttaatatttctgactaattactgttacgtggtaatcatgacatagcggccattgtctgtacttgtacatcaaaatctgctgtctatggagattagtgacttggaagaaaatcctggagtcaatagtggaccccttttttattaagactcttgatggcccagaggtcagtataatgaggaaaacatagaacttccatgattttgacttgaaaagtaattcaaagggttgaaatttaaacgtaaagaaatttttggaatgctttcatttgttgcacttatattttgctttttatgtatgtagaggggtgacatatgataaaaaaactatggataattttaagccatttatttcaacaaacatgtaatatatattctaacgacaaagccctatgttataatttaaatggtagtaatttttgtttccggttttgtaatagctaatggtgtattttataatcagtagcatctttgatttgatggggtagtgtagtaagaactcaataaatgttagactcctcattaggatttgggtagaggttaatgtcggtagatacattattagagttaagggtcctaaggctttttaatgtgagcagagtgcaatgaaagaatattttggattgaccaaaagtctagagaacctgatttgtaactgtatcattatgacttactgaatttcattcagtaaatattgcatgaaattgagctgaaattcatgtctgctaaatatgtgtactctgcccttttctcttcattatgaggattaaattgaatgataggggtgtaagcactttgtaaatccaagtaagaattattagttaggatagttcaggtagtgctgtagtaacaaatacttaccaaatctcggtactgaaaacaagggtttatttcttacttatgctacttgttcatcataggacagaaggagttctttgcagactaatagttgtcatttccaacacttttgacctccatgccagagtaaaagagctctgagggtctcaaactggcaattccacactttgacctggatgtaatacatgtcacttcttatatagctccttagccaaaactattcacatggccctacctagccatagggttgccacagagcagagagctggaaatatgtggagaacagtgtcaataagtttgtaatagtaataatggttgacaatcattgtgtgcttcttagtaccaggcactgttgtaagtgctttagatgggtagagtcctttagtactcatcaagtgggtatgatcatgattcccattgtacagatgacaacccaaggcacaaaagggtagaccaacctgcacagaagagacagagcagggattttgcttgtgtgacattgatgtgtgtctcaaactataatggatttgaatgcattttttaaaatgtaaaaggaagatacaaatatagttgagaatcttctgttctgaaaaataagagatgaggtttggtgatccccaagcctccctaaaatttcacctggatcagccccaaatgacctacacttacaatgactgctgtgttcttttggcgcctcatcttcagaaaccaggggccctctcctggccactgacttacgtcgtagcttagcagaggggcattgtcccagcgtttcggtagatacttcctcctttgacttatttaacctttctattttgggagttttctaacgtgtagaagaacagtagagtggccacagtctactccattatcaatgatcaatacacaattaccaatacattctcaatcttgcttaatttcactttgcaagttaatctggctgcttgtcaagctgagctgtgaacacaaactgtgttcttggggttgcggggtatagagctcctaaaacaggaagccagtgaccaggggagggccagagaggacatgtggaggacagaattgaagggcttcaactggaaaagagggcgtctctaatcaatagtttagacaagtttgcaagtggaagataaatgatatgacaatatttaatcattcataggacattcttgtaatgtaagggggaaaaggagaaatatgttgttaatagggagccagaattattacctttctccgtagctccaactgtaatcttgcctgctattgaggtagttaataaaccaaagcctgtgagctctgttcaatgggacagcaaccagagaggcttctttccaagccctcccaccaggccaagaagcagctgagctggatagaaagcatgccttcagcaccctgggtttcctcttcagtggcatccagaggaccctgggtcacttcacctctctgtctctttctgaaaaacgtatataataaccgtctgggtgactcacaaatctattatagcatttaattaacaaatgttcctcaagtgctttgagctccctgtttggatagatgtgactgaaatgtaaaatacctttcactgccttatttattgctccagcgaacacgctatatgctggcaccatttatcttcattttaattttatctcccacaaatataggcattaatttaaatcacatacagaacataacagtttttatagaggcaaacttattccagtgtgctgcattttaatatcgcactttaccatcttttctcacttgattcaagaatagtatctcttcctgcctcagcatttaatcttaggacaacagaaacttttttgtgtgtgcatgttcttgctctcaaactttgtttctcactgctttgctgcttgttgcctgaaagttgttctgtcagtgtgagcacaggtgtaagtaattccatttctcttttgccagcttaatttcctgtgtgtgtgtgtgttgtgggggctaaggggggtgtgtaacatgatggattttacagctgaagcttatactcattcatcttcagatatcttttctaatagaaataaagacaataaaagtgataccctcctcctgaaatttacacattaaagaccccttcaaactgctcactttttttctgtcttttttttcattcagaggcaaaatttccccctttttttcatcactgttacgtttgcggcagatgagtctcttccttgaggggaatcgtggtaaatgggcctgctgtatttacagctatgaaacattccagttggctgtcacaccctaagcaaggaaggtttccccatccttaatttgcggcctgaaaagctgtggctctcctcaattaagactttccaaattgcctctgacatggcagcatattcccaggagtcaggtcctgggaggcagtaataacatgagcactgctgtataacaacgtagttttacaagccattttgtgctcttttcagaagctttcaggatgctttttctctgaagttgcaaattaaaaagaaaacaaaacttattttgattttttgtttttagttttcctagtctctgaatgtctaggtttagggacatctgtcatagtcttatttatttattttacgtttagtctggatttaaaatgtacaaattaatgtttaagttctctgttttattcctgtaacaatcctacaagaacaggttccattattgtgttcatcttgcagatgaggaaacaaggcctagagaagttaaatatttttttctgaaatggtacagctagtacgtggcagggctcagattttggatccggtccaccttaactaaatatgcttttgatgtagctctcttcaggctgaattcttgacctctcatttgatgctgactcttctcaaacccttagtctttgtgctactaggtagattttatctgtggcaagaacacggttaccctggaaacccactagctagaatggcaagccaattatagcaccaccgctttttttaaattaaattagcgctgctgatgacgtggacttcttgattgaagcatgctgagaaatgggttctcaccagttgttcctgcctcttaggatcatgtgggatcattctcatctattctatcaagccaaacaagaaaatgcctctatgtgattgactggatttgaggaataaaatgtgatgatcttttaggaccctgagctttcagtagtgagtagacatgcatggaaatgtttggaaagaagccctattggagaagaagcctgtcatctggatactttccacccccaagcacacaaggtccactgatttaaagccctgctcttaactactgaggctaatgttctctattttagtatttcttattttatttaaggccattggtttaaatccagacttgattcaggaaaggttgtagccctttgatattctttggtctttgcacacttctaatagggcaggaatttgctttagttcaaaccaattggtgcatttcctttaagtacacagaatttaaacaattgaattgatatggccactgttgaactgagtggtaccaggttggaggaaaggacattcattatatgttagtgggttgtgggctcactctctgagatggtaaacggtaggctggtagaatgttgagtagttcattctgcataacacacatggcgccaggcacattacctagtacctctatgattttcatccgctttattttctgttttgtagagtaggtaaaggtaaggagacgggcttgctcatttgcaaggctattctgtgatgcagggttctgagtacaggattccttatttgcagtccagtgctcttcactttataccaccaagtcaccagagtctcagggcctgtcttctgtatcgcagaaaacaaatcaaggattagcaacactgaatcttaattcttgaagttctaacaggaaaattatgttagtcttgctacatatcgtaggcatattttgtccaaaatgagagtaatcagggaggagaagaggctgcatcttactgtgtcctgatgggtgatacttccgtgactatctccatcaccagtgagcagatttccagaagtcatagttcaaaacgatgaagagaattacacattttcagaaaacattgtacattctttgttaacttttccacttgtaaaataatttgttttcagacatccaggtcctttctccatgatttactgcgttggtgacattaatcagcgtggttatcttggagcctcatttccccttgggtaaaatggaaggataacattggcaatcatacagacgtgttgtgtagaaaggagtaagaagcattttggaagtggcaaagtggcaataatcccctgtaagacagtagctgtttttaagatcactgagctctcaaacactggctttttctgcctcacactttctagatttgtaagacttaatctgaaaatatctttgctattcattatgtataattgtagggctttggatttaaaaaatcctaattctgttatttccctgacaatagcaaattattctcatctaattttctcttatgtgaaataagacatacaccctagttacttccatgcctaatatgattgacaaatctatatgttatctgaattgtgaatatattttcatacatatagaagtacatgtgtgtatttcttgaaatctaatggtcaatatacactaaccagttatttctgggattttgggaacaggcttctttctatacttctctacttatctttaaattttctctaatgagcctactttgcttttgttttacatacagtaattaatatatttataaatgtatgtatactatatattttaataaatttatataagtatatgtatgtatatacatatgttttgcaagtaaaaaaactttagtaataaatatctacaaaggcaatgagagctcgtccaaannnnnnnnnnnnnnnnnnnnttccttcttccttcttgccctttctttctctctctctcttttcctctcccccttctgtcttcctctccccacctccatctccctctctctctcctccctccctgccgccttccttctttccagaaagtcactaaccagaatctttcacagaataaactgtgaaacctagatcttaaatgtactacagtagaaaaagagatgagatttttgaaagatgatggcttgtccttgtctctgtacttgaatctatctcaaaacaaagatataactattgtttttaataataatttcaatatagagtgaccatccttgcctactaccctgaagagagagagcatttacacataagactggtggttgcagtaaacccctttcaagtggagtggccactatggtccttcctcttcccttccttcctttcattcccttgccctttccccactttccttctcttcctttccttttttcttttaaggttcataaaatcttgattggcctccttcctagcagccaggagtttgggtccctaatagctaaagcttatatactttattttcttctttctccagatggctgtggctatgaattttactccccatcccaggactacccctgctatactgacactaattttcattttataatactgtcttcatcagtccatgctatgctactagttttagttattataatattaacttaatccacaatgaaggcgacaggtttttttgtgtgtcttactttttaaaggggaaatattatctctcactttaaggaaactaactttagcaactcattccctcactttttttttttctttcaacttgatttgttcaactaaggagaccacatttagtacttgctagctgagacttctgttctacaattctgagttagttcctcatccgtccgaccctctctccccgtggtgcactgagtcacaatgtgatcaccagctgcatgtgctgctattacacacaacacattggctagcagaggagccaggattcagccttggaagtactttcaggcaaaggtgaagaccctttccccactctaagcatctttcagtagtttagtgtagctgatattaatgttataaatggtcattcctaatcctgtctcagttccagcccagatggagttttgattttagaaaatcattcagtgaaatgtatttcctgtgcctggtagtcattgatcacttaccaaaaaaaaagggggtagtgggagactaaaaataaacttatgataattcacatacacttaacctttactgactaataccaaaaagggaatgaagcaggctctgctgaccagcacttgcagatggattccaggaacgtggctagagctgccaaagccatcgctgaatcctgccaaaagcatcccaggggattttactaagggtggggagagcagggaacatggaggtgtgtgtgtgaatttgttttaaaactctcttactcaacactgagcagtgggaagaacactgggaaaaaaggtcggaaagtgacattctagactgggttccacccaatctctatgacactggaaaagtaatgtgtcctctttggaacttcaggtatcatgtgaacaataagggtgtcatattaaggtcttaacatgttgaaatgttaaaaacattctgtaattacttaaattatttcaaaacagaaagatcatacatgttcatcatgtttctgtgttaactggacaaaactacactaaaattaaagagcaataaaagcaatcgtgttaaaattttatttttaaatatagtacttctagtaactgaatatctaactttattaacaattctaaatctcgctttttttttttttaaaccccagtgaggctgggcaccgtggctcacacctgtaatctgagctctttgggatgctgaggcggtatgatcccatgagcacaggagtttgagaccagcctgggcaacatagtcagatcctgtctctacaaaaagttttttaaatagccaggattagccaggcatgatggcatgcacttgttgtgtcagccactgctcattgggggttgggggggttgggggtgggcctgaggtaggaggcttgcttgagcccaggaggtaggaggtcaaggctacagtgagccatgactgtatcactgcactccagcctgagcgacagagcaagaccctgcctctaattaaataagcaaatacacacacacaacacacatatataaaataaaataaaaaccccaatgtgttaagatctcaggtttaaacctcggcttatacaaaccatagtactaccgtgcaataactgaattgacaaggtaccaacacctattttaaccagaaaaataacataattgtgttatattttccatgagagtcatactcttgaaattaagtattttctcaatagaattgtttctcaattaaaaaaaaaaacttactcaaaacatttagtatttaattataattataggcagataaaatttataaaagattatcagtaagatcaagaacctctgcctctttaatcatgtttttctctaccttttgctggtctcttcctgattttgatgacctcattgtctatacgagtattaagacatttggggtagctttttatgttgtgtactttctttccttctccttatgagatggctgacaccttctaaaggattcagagagtttccatcttattgaaaggtccttatgaaaattcactggtagtgttctcagcttatactaggaaggcatgtttcttcagaagcagtatttgttgtatttagggtgggaatcattatgtagcaagagtggtctacatattggtcttgcagcaacatcagcaccccttatgaatggtttgtttcccaccaaaagtcaaagattagcctatatgatggatgatggctacagaaaatagtgccagaaaaacagaatcagtagaagatatatattaagacattaattgggaaggagtagcttgcatgattttgtgggctggctaggcaatctaacatctacagattaggcaattaggaagggcaggctgtaactccgtggcatgagatgaagctactcgccacaatgagaattccttcttctttaaggaatcctcagctctacttccaagacctttcaactgattgaatcaggctcaaccaggttatctagtgtactcttcattacttaaaaatcaactgattagaggctttaatcacatgtacaaaacaccttcccagccacatctagattggagtttgattgaataaatggagactttagcctgaaaaaattaacacacaaatggaccatcacaggagggtagtctttttctacagaatttaaatctgtggtagagaagcaacagatacctcagggcaaaaaaagtccaggaagagcataaaggttcaagcagaaccatgagaatgccagcattgtcgttggagatggtgactggaagtgatgataggtctagggaacagtaaatgtggacagactggcattttacctcgggcacacttggacctggataggctccaccagtctgccctggaaacagaaccacagtgggtcagacagtcttttgtattagttttaaatacagagttgattgtctctcttgcattcttaacttgcaatttagtactgtttatattctgcttgaaggttagagacattcgactaaatggtcttttctccacattgctgtcattcattaatgtcctggtcctggactttactcattgaccacaggacaagtggctcaactctctcctgccactacccaggctgttagtcctgttgggaggctcagggcccaactcactcatctgtaactctcatctccattcagctgcagcctctacagcccctggttataccctggatcttatcattgcttcgctctattttacctcctaaatcgtaaaaattaaaaccagcctcggaacacaacccctcattcttccagcactctctctcattcaggtaactcctattctacttttcttcagcatatttaccttctattacctttctttttcctcaccagtctcttatatttcctttattatccaacttacagtctgtggttcaatacttcagccgactcttccaacacatgaccttctttcggtaggcttttttcagagtttcccttttgtacttgcccttatgtaaatctgtggcacagtcaggccatcttgccaacttttcacagttattgcacaccacactctgttggttttcttcctaccattctgaacaatttcacttcagggctctccttagtggctcttcgtctccctctccttgaatgtcgttttacctttttctttttcttttttttttttttttttttttttgagacagactctcattctgtcacccaggctggagtgcagtggcgcaatttcagctcactgcaacctctgcctaccaggttcaaacgattctcttgcctcagcctcccgagtagctgtgtctacaggtgtgcaccatgcctggctaatttttttttcttttttcttttttctgttttctttttattagagatggggtttcaccacgttggccagtcttgtctcgaactcctgacctcaactgatccacccacctcggcctcccaaagtgctgggattacaggcatgagccaccgtgcctgggcttgaatgttgttttcctttggtggggcttggggaggggtgtctttcctagggcctgctcttgtttcacttcccacatttggttaagagagcctttaactactatggcctcaactatcagctctacaatatgatataaatttgtttcagtaaacttgctcttcagattcaattgtttctaactgcttatcgctcaggtgcatttggatgtattgcagaaatctcagcctcaatgttttcaaaataaactcatccacttctctcaggaattttttccactccaatgttgttcggtatgtggcatcaccatctaaccagtttcctaagccagaagtttaggtattatttctaagccctctctttcccttattatcaattttacctcctaaatatttcacaatctttctacttctcctcatttctgctgcggtacgtgatttcagatcagcatcatctttcatggaccattggtgatatccccctaacgggtttccttgtatccatttccccaccatcgccccaatctatccaccaaggctttcctaaaatgcaagtctgactgtattactttcctgtctaatatgttatctccttattcctgtagtataagacagtgattaggaaaacaggctctgaagtcaaatagaaatgagtttgaatctcatataactatgtgatcttggacaaaataaccttttttggtttgttttccacgtgcgaaataggaacagtaattgaacttttctttttagatgttgcatacctctctggtatacatgaagaagatgtgtagtatctcattcccaccccgcttatgcaccatgctatagtcacacactgcctttgctctgatccccagagacattgagccaccactggagagtcacatgatattgtttttagcctggaacattgttcactacctcagtcttttattgccttgtctcaacatagacgccatttcccttaagacattttcagcacactcctctggtataatttagtttaaatgtccttgctgtgttctcctgtgtttttctccttgaacttcctaatccttacaccttccaccctgcaaatgatcattatctcactgcctctcccaaatgataacctctttccacccattttaagttccatgaggacgatgaccattgacccggaccgcgttgttaaacttcttagtctcagctgccaagagcttagcacagtgtctagcagagatcggacactcagtaaatatttgatgaatgtttatagtgtgactgtctcgccagtgcacatacaacaaagtgatcccatctttccttctgtatcataaaatagaattttcttacctctgtaatttctccctaggaaccagactgcttctagagagcttcttcacaaaatcaaattaattggtattttacaaggagggaaagccccaggacaagtcccttctcttgaccacaaagttctgtgtttctcatctttcctcttgatgtcttggtttcagcaaagcaacatttctatccctgccccctgctcccccataatcctacaaatgtactatagatatgtgtaagtactacatccccaatcaagtacagcgtttggcctcgggtgggagtcaaacagcaagctgatttttaacattacttggaagaaattttctaggtatataactgacaaacattcatggagagctacttcatttttctgtcaagcttttgggggattttttttaatagttctgcactttgaaagaaagttcacaatttttaaaaggaaatgtggcccttttcattagctccttttacctcatgctgagtcatggatgagagagaatttgtaggcgggtgagctgcaggaaaagtaatactgtcatttacacttgcaggctgttatgctttccagaaaactttttccgtaggttgcgaaagtgattaatctgctgttaaaactgacaaagaaggttctctgataagagaaagaattaaatgaggaatttttctttaaaaagtaagcgcttctttcccattttagattagaaaaataagtttaaatgtttcttttaattttagtcgtgtgtgtgtgtgtgtgtgtgtgtgtgtgtgtgtgtgaagttggccatgacttaatacaatctcaagccattttctatttaaattatgtttttttacttattggcatggcttattcctcatgctgtatatctaaattattcatttctacatcctgttcccttgcttgtctctctttcttcttctttttttttcctttcattttctttatttgggtcttttcaatactttcaacatcatcttacttcggagccccagatctcttcttttctaccaaccttttttgaaacattaaaactggtgaagatggcctgagttctctctgtgatataaatttatccctccctgaaaaattccattcatgtaacatttttataacactttttaaaacttggatgaaagttttttcatgtagttgaaatgaagcatcactgcctaaagcgtttagaaatttttttactgttggttttaagaaattactctaggatttccactgaggactggcaagtattggtgaagtttgatctctcagagctcatgtttcagatggcaacttaaagggacaaataaataagtcaatcacacggcataatctaactttaatatgattctgcagagaaccagtgactcatttagagaaatcagagtcctcagaaaggtggaaaacatgttagaacttattaagcttgttgcctttagcatgtcaatgccttgtttttataagaagattcaatgggttgttaaaatgcactgtcttaaccctctcccctttgtatttttctactcttaagatgcatcattttatgttgggatctatcagtttattttacttgtttttccttcttcctctccttattttgaaggctgacttctgagcttgagccatatccttggcaactgaatgaattcatggggagtatagtagaaaagattttctcacaactctgacagcactgccccctagtaaaaaagggaagagacaaagagaaatggtcccttctgcaactgaagggaccagcacaggggacttggcattcttcttttagtcctaaagcttagacatacatactgctttcgcccctgggctacaaatacatgttttaaaattctgaagttgaaaacgtcaaaaccatttacaattaaaaacctgctattactgtatatttatacaggtatttcataagggaaaaagtagaaaacatgtaaatgtatttgttttatgtctgaagttccaagattatttctgtttctttactgaatgtgtttgaaatatatgcaaacacacatgtaaacatacctgtatatttatgtacagatataagtctacatggagaccagcatttttagataacactgttttacaggctgtgcatccatctttaaggtgctatagcataaggtctatgactgcattttgtaataaaagatggcaggctttctggaaagggtctctttggggcaggaagaggtgtgaagatcttttgcattctacttttaaagtacaacaagttaaattgctaccagatacattagctttatggaggtttgtttccatttttatagcaaaatcaaataacttttaaatcagaggaaaaaaatattcttttgttgtttttatttttgttgttgagattgcctgttttacgttgagtgcagtgtttttcaggtggaaacatattggtttgacattttaagaggaaaatgttctatatgtaatatgaaagagtctttttcttaactaaatgccagcaacaaaatttaaaccaaaaaatgtagtaatgaaacaatggtaatgagatatgattatggtttagtgagagaaaaaagccctgcagggaacagtacaagcacagtaaattatgaattgctactaaataggcctcattagtccactgtggaccatgtttaattgatattagaaaggagtctggaaaactttggaaagtacatgtaagacaacttgctgttaaactaataaaagtcgttagagtgtctgtttcaaaaattagtaattattaattgtgtgtgagggtcctcaggcagcacccattttactaaaacatgcttagagaaaagatatttctatgagaaatgaaactgcagaatgctgagcagtgcaatatgtgacagttccctgggagtttctcccctcctcgtaggtatttttagcaaaatagtccttaaacattgttttttttttttttttaagttggagtctcgctctgtcgccaggctggagtgcagtggcccgatcttggctcactgcaacctccacctcctgggttccagcaattctcctgcctcagcctcccgagtagctgggactacaggcacgcaccatcaggcccagctaatttttgtattttttagtagagacgggggtttccaccatattggccaggctggtcttgaacacctgacctcgtgatcctcccacctctgcctcccaaagtgttgggattacagacgtgagccaccgcgcttgccccttaagtgttgttttaaagaaagttggcgctctactgaagactggagcccaagaagacatttatagggattgtttattttcatgttgttactacactccatggtctgcaaaaccagagtgccagatgttaaattctatcagcataatgcatctttaattaaatattatatacgccatacaattaataatgtggtctgtttccaaaactttattaagaaattaccataattttgtataataggctaataaaaaggcactgtactttgaaacagcctttcataaagtggttatatgatttgtatctgttgaatttggaatttagattaagagattgtgggccagaattatctgatgcaatgtactcaggactttaaataagttgcgaatcttgtagggtctactattatttggcttcctttaaaataaaataggtttcttatttgtcgatgagctcactctttaagaggtttagggaataacttacctactcgctttgtgtcccccaaccctactttgtaaaaacctcaaacaatacaaaacatgataattccaaatatacagtacattgggctatgatatttcttaatgaatggaaagtcatgcatctggttctgtggtcatcattgatgttttaattttcacaatgtgttaacctgatacttaaattcccctagttgtcctgtgaagaaagaattttaaattcacatttcacatgcagacaaactctgatatttaaaaataatagttatcttttaaactgagatcctatgtggatatggaatagcgtatacagctctgacaatagggcttcagtaaaataacattttgcaagctgtgtttttcaagacaaaatgtcaccctcagctaaacagaagtaatttgcatcagaggtgtgtgtgtccttactcttaatgaaaaaacggtcccctctcttcagaaagtatttgctatctctacaatgtattattttcatcactgtgtccctcccctgcccttcttatgccctaatatttgtcccttaattctattaaattagttgtcaactaaaattaaaggtagatgttatccttcacaatctgtcctggtctaatttttcagtcttgattcgtcttctttactttatggagtgtagaggtggctaacagaacaactctggagccacaatgtgtagattcagataccaacagtagcttatgctgaaacctgggtcaaattacttaagctcacatacctcagtttcctcatctacaaaatgaggataataataggttcttcctcacttatatgtaaagcatttaaataaggactagtagatcgtatgtactagctgttattaaattctgccacatttgtttgttctccatacacaccttagccttttgtctatgtctctgttcacattgtttgctggaaacaggatccacccttctcctccaaggccagtgtatgtgtgtccacaaacacacagccatccatgtgttgtgattccacgcacctccgaagatacggctcagagagccaccctctgcttgccagattgagcatagttcatctggaactttcatacacttctctgtcttacttagcatttgcaactatactttatagttattttcaagtttattttgcctcttttgctggtgtgtgaacttcttgagtccatggacttcctgtgataaatttctccctactacaaaaagctcagtgccttgtgctgagctgctgtgcttagtaatagataggggagagggtgtttttttatatctatatacatatatatgtacatatatatgtacacataatttgatatacttttgagtgtacatgatgtggttccttatttttgcattaagcctatcacttccgggcattggcaaagatctgaaaattaaaaggaacacaaataagaaatgcatttagtccatttaagcaacatgtgagttcctcttactgagtttcttccctaatttagatctcaagttttgcaaaagaatgacaaattcctttatttaaagaaaaatgaaagcagatctgttaccttctgtcctatgaatgccaattctctatcctggataattagataaataagatatttataagcgtatggtttatgcacatagacatgaagctctcaatgcctgcatgattttcctgtcatgctcatgtgggttaaagcccaatagatgtattttgaaaactcgaatgccagtatgtctttaaaaagattatatcctgaaataaagttttaacatcctgtatcctatgataaaagttattttgcatttttttctttaccactgaaaacttgcgaggctcaaagtagtttaatttttatatattgaagctactcatttgccatattttaaaaacaaatcataaaacatggtaattggtaatttcacaaattttatcagggaatattttattattacatttttaaaataaaacctgtagatttatttaaaaagcatattttgaactaaagacctgaaatgtgtagcttgtgtagctccatttgaaaagatgaaggttttgctattgtttgcaacagttttgcctgatttttgttttccccttttgctctgtttttgtagttcagtttgttgcagcattgttgtcatgtctaatttttgtttacgttgcactgcacagcactctttcgtatacttaagtaacctttcttgttctgcactgctgaatgacagctcatttattctagggtggtaattgcagtgtagcagacccaggtgagcaatgtaaaaagttgaagcagataaaatgtatgatttcttttataatggtattgtgtgctgtgttctcctcatatagatgctttttgtttacatagagaatatctaggaacaatctacatgttcttcaagatcttttaaaataaatactctttcatttttaaaaaagatgtattcttggccaggcgctgtggctcatgcctgtaatcccagtactttgggaggccgaggcgggtggatcacttgaggtcaggagtttgcgaccagcctggccaacatggtgaaaccctgcctctactaaaaaatacaaaaattagccgggcatagtggcacatgtttgtaatcccaggtactcaggaggttgaggcaggagaatcgcttgaacctggcaagcagaggttgcagcgagctgagatcgcgtcactgcaatccatcctagacaacacagcaaggctgtgtttaaaaaaataaaaagacataattgcaaaagaagtatttcacttcaccctttattataggacagaccacagtgcaagcaagaagataaatggttaacttacaactgacctctgattggagaatactagagagtggtgaagactgtggcaagcaggagggctcaccaacctcccagatttaacccaggctgcatgtaggaatgcagacccagtgttgctaggtctctggaattaagttatatttaactagcctgtgatctctaaggccttcaattatgaggttcagcaccactggaaaactgagtcagtttagtgctttatttcacaaaggcaaattgatggtcctttctgaccctaaattcccagttttacttaaactatttagacaaatctaagaagtgtgtgaaataaatacagtggagcttgaggatttttgttgttgatttctggtccttttatatttcctccttccctctgagggttcacataggagcctccacagccagaggattactttcagaatggaggcaagattatttcttggaattttggtctgaggaaaaattatttaggtcacttggacacttatgttgtgctttcccacaaaattgtctagcattttctttaagacatatgcatgaccactgcccaaacgaaataaatcaccctttctcttaaaggatccagactattaaatatgaagaacatcaactaatttgactagcagaatgtaggccttcagtgttaacatagcctttttctgttattgcatttatctgcctttgttctgaagccccagtctagtacctttcttaatgcagatctctttgagcataatgtttccattaaaccagccagtggatctcatttgctccatacatattcatattaggaaatattattgtacaaagtaaaagatgctagtaaaagatatgctggaacaacatttctgacagtatttgttctgtagttaatgctctgggagcctttttccttcaaactctctattcctagttagggcctcatcatttcttgcctggattattgcagtagcttccaggctggcttcctttatgcccttcataagcatatggctgccagattaatatttttttcaacacagccctgatcctgtcattctacaattgagttcctcacagtctacctgatacagagacagaaggaatgtgataatacaaataataatggtactcacaacaacaataaatgactggtctttgatatttaatctctaatatcaattgtcttgagacaacaaggctttttgaattcaatatcagagggtttaactgtgaggtacttggcatgggtctgaattgcatgtatattgtatgactgattgaaagaagattatctgatacacatgagaagtgtggaggtgggagctgacattttgttagaagtgcatgcctggcattttgatatactattgcacctcctcaaatctttttaacagaaacaaactactttgtgatgatagaatagcataatacaggacagcggaaaaatcttagtgctttttgttctggttttgattttgcaactaaatatgtatgataaataggaaattagtgcattggagcatatgcatctgttaaagcagattgactgcttggttatcacactataaacaacatttttgaagaattttaaaatttataatctctgatataatgttaaatgaaaaataagatacaaagccacacataaagagggttcacatttaagcaccatcacctatacaaaacacacacgcacacagtcacacacacacacatacacacagtcacacacacacttacacacagatacaagtatacatagaaatacaaaccatgaaaataaagttaccaaaacagttgttatcactaaagttttgaatgagtgttttttatttctttattaaccttgttattacttctcatattttctacaatgagtatcactgtttttagttttgtttttgttttttaaatggagtctcactctttctcccaggctggagtgcagtggggctatcttagctcactgcaacctccacctctcgggttcaagcaattctgcctcagcctcctgagtagctgggatgacaggtgcccaccaccacgcctggctaatttttatatttttagtagagacagggtttcactatgttggccaggctgatcttgaactcctaaccaggtgatctgcctgccttggcctcccaaagcgctggtattacaggtgtcagccactgtacccggcgtatcattgttttaatgaatacactgtcttacacgagggcttgcctagctctctcaaaagtctaagaaacaatgaataatattattttatttaaacattatttaaaaacatgaaaacagtgaatacaaagttgaactctcctcttacaataataaaaattcttcttgaataattctgtatcctaccattccatgaattgtatccatggaaaagtgtatgtttttctgattcatttatttatttgcttctaggttattggatgaagaaatctaggaatagaatgaataactgtatagattacacctctgatgcctggtgtgtgtgtgtgtgtgtgtgtgtgtgtgtgtgtttcttcccttgtgattttctctccttttcctgcctaataatgatgtagctgatctgcttatcatgttcctttatttctataattccaattgttgtagatcccatagaggtgttcactcttgctctctctctctcttctctctccctctcacacacacacagattaaatagagaaaattaagtaaagagaggaaaatgaggaataatttcatactttaatatattcattcattcattgctctttgataatttttttcttttttaattttatttttccctaagttattggggtataggtggtatttggttacattagtaagttctttaacggacatttgtgagatcctggtgcacccatcacctgagcagtatacactgcaccatatttgttgtcttttttcccatgctcccctcccactctttccctcaagtccccaaactccattgtatcattcttatgcctttgcgtcctcatagcttagctcccacatatcagtgagaacatacgatgttcggtttcccattcctgagttacttcacttagaataatagtctctaatctcatccaggtcattgcaaatgctgttaattcattcatttttatggctgagcagtattccactgtatatgtatacaccgtagtttctttatccactcattgattgatgggcatttgggttggttccacgatttgctactgtgaattgtgctgctataaacacacgtgtgcaagtatcattttcgaataatgacttcttttcctctgggtagatacccagtagtgggattgctggatcaaatggtaagtagagctctatgatgttttgatactcttctatggcatagacttagtgctcccatgttctaagtgttatgaaaggctgaagataggaatattagaacatggcccccttcctgagttatatagcttagaacaatggtactcaaacttaagaatgtgtaagaattacctaggccatagcacttacacatggaatatcaagagggagaacagactaggagaagacgtttgaattcagctgcccatgtaaagtataaagaattatttttacccagaatcttgaaggggaaggaactgagtcacacagacaagaatgtgcctaaagcaattcagcagttcagagtggaatgaaaaggaccctggttccctgctcttaagccagtgttctttagctggctagaactcagctctctgtttaaaaaatgaatgggttgcagtggagcgctgtgttccaagtaggatttgtaagacttctggaattctgaaaaaattctactggttttctgcctgtttctctgtctatacttgaattcactgaggccaaaaatggtaactttttacccagtagctggcaacattcctggtaattagaaagtgatcagtaaatgctcaatgactatctgaatgattgcatttttcaaaaagaaatctgaagtctaaattttgagccaactaaacatcatatttctttggttttgggtggtttgggaaaaatccaatgtgttctctgaaaggaaaacatatttggagatatgattatttttttctgtaaataaagttactttgttgtaaatataaatatacatgctcattttataaaagaaaatgaaaggagaaaaaagagcaaaatatctgtattgacaccactcataattaccactcataatttttgttttgtttttcttattcacatataggacttttatcatgatatatgtatgaatttatatcctgttatttttctgaaacattatagcataacaggattaagtatcctattacctctacagttcctgatatttataaagataaattatgaaaataatgtttgaatgagaaggtttttctgtttatatgctgttccaaagaaccttaggtatcagaatttatctgagcccaaaaacgtcccttaggtaccttaagctacccaaattctttgaattctttcaatcaaatcccctaattttataaagaggaaattgaaacccaagaaacaatataagtgaatttgtttgaacccaggaatttcagtacttgttgtcctaatttaaaattgtgtcccaaagaatatttatctttgaatttgttgatgtttgctcttttaaaaaggaaagaagaataataaactaattcctcgttttacctttaaaaggaagtttcactggaggaataagacccaaatgaatgaacccccatcagtcattcgtatcccccagctgatgaggatttcagcagttgtgctgacaccttgatcttgggctagccaccctccccttgctctgccatggagcttggtcaccttgtaccatggtcaaaataatggtgctctctttcaaaagccatccttagatttccagctaatagtgtgtagaaaagagaaaacataattttttagtaccccaaattctaggttatctactgcactgaatgatctaaaatatcaagtaggcgctttcagcaaagctgttagaaatataaatagaaaaaataggaaagattatttgtgggaccattcaaactaagactgttgttgttctcattattattgttgtttttaaaggacactgtccatatattgcaagacatgttgcccactgcccttcacctatgggattatataaacgcaatcctattttttaaatagttgtgcagaaaatcgagaagggagctaccttaactgtgtattcagttcttgagtgacaaagacaggcgtgagagagagagtcccttgcttccaaatcacccctcctttgcctcacccttttcaggacaaaccgactaccagaaatgaatctaacccatgtggtcactacaggatttatctgggcatttgctgaacctgctcgcaatttatttttatttcttccgatagacatggatttggcacaggggagtgaattctttttgaagcagcagatgtgcctggtacacccgtttgctgtaaccatttgtgctgtggttgaaaaaaatttttttaagagtgcagaattgttgaagggggagggttaaaaaaccagagccattttagtgattatgcaaagttagaatgtgagtaattttgctgcagttagtcattatgtgctttcatagcttgttttacagggataaagggatgtgtacaggtttggtgaatagagctcttatttgttcctaatagtcactcttcatgaaaacattttctacccttcctcctactctgtggcaaaagtgctctctccttggaaattatacctttctgggatccattccttttatccatctacaatcagtggacagacaactccattttgaagaacaaatacgttagaagaagaatttttttctcctatacaatctacagtgtaactgatacacattcaaatcatcgtaatacagtgatcattataaaatgagagtgttttctgcaaagaggaaaaaaaaaactgagcaaacatctagtgactttgttaggagcttaatgtgctctaaatatgatgtccttcaaatattttatttgaaatatttgataggtcttagaaaattttgctcatggaattctctgagaactgtaacacaccacctattcctttttcgctttgctttcggtcacccaaatttttttagaaatatgtgaacgagggtctgtttgtttccactgaagcaaatatagccacttgctcacactggtggcttcttttactgaagtccgtgaatatgttagaaactcttgtatgaaaatacagcaacccaatttgtccctattgagcctactttgtgatttccatgccctgctgcctggtgtgtatacactgagatccactttgttaaagaacaaaactgggtttgttacttttttgtaggcttattattaagtctgagcattctggtgtgaggttaggaacgctggtttcagactctggaaaacagagttctaatcctgaccctctgaagaccttctcactttgggcaaatctttcctgagccttgtttccttgaggaaaatgtagagatgtgtgatattcacatttcttacgccctacagttatgtgaggaatactgtatgtttcagttatgcacagataaattagttatttcttctcaaagaatcctctgttaaaaattattccccaaatagctctttttcgacacttgtctcaaggtggtcacattttaatttctgccactgatacacaaatttcagtgataagaaacccctgaatgacttgagagtttcctgagagatgggatcccacctattttattatcttttgtctttttatggcttccgagtagcagtaaaagataggaatggttggttctattacagtagttgattataaccaaaaactagtgaaccacactctccaaatgtcctgctacctacagctaagaaacccaatgtttataaactaactcagaacttttaaaattagattgaactacagaaccctctatcatacttaaatcttcttagatgaatggtgcacaaaactgatgggggatgggaagtgtgggcaattctgttaccgaactatttcccttattgtttcatttgattaaacacttctctcttgtatggaatttgccaataatacattattgaaaaaactgatttcaataatatgttattgaaaaaactaatttattgaataaaaacatatggaaaaatctctttgctagaccctaaggatggaaagcccaaatttctacccacatggagtttagagaggaaaggaacactaaataagtaattgcaaaacaagacgtaagggttatcataaggataatgcaaactattaaagagacattaatggtgggcaccttgtctaattttggaggttccagattggcttcctaaaggaggcatcatttcgtttgaaatctgaaggatgaataaccagttagaagttgcgagatggaagcaggttggaaagtgttcaaatcagggcaaccacaggatagctggagtgttgactcctgtgtagaggaaagtaagagaggaggctaagaagataaacagtagttctatcaggaaagaatttggacttcatggtaagagcaatgagaactcttgagagattttaatacaggaaggcaatgatcatatttgagttcttaaaatttgattttagaatagagtacgtactagaggacaataagcagtcagtttctttaaaaatacacatatacgtgtgtatgtgtttgttgcagtaagctaggtcactaatcatagtggactggactagggcaccaataagttaatagaagtagaaacattgacggtaactagtagagagaattaacaagctttactgcatcaagaggagaaaaaaaattgtgatcacgtttataacatataatcacattgctaaaatctttaaaatatctgttaaccttgaaacataactgatttatatagtttttgtcaatatacatatgaaccattatcttacttttcttttaaactggtatttcgaattaatgttttctggctttccagctgcataccattccattagctcaatgttctaggattttctcaaccatcctctgatttttcctttaatataaacaagtaaaatcacttatgtgcgttttaatagctcttcattgcaagtttgtccaccaaaagaatcatttcaattttcagtgctaccagtcatataaaaacgcacctgtaatattcccactgggattgagttttattatttcttgcctaattggttgaactcacagtatttttcactaaacccctggcctgattggagaaaagtgtctggtcccttgaggagatgcttcagcaaacgaggtcgcttgttatggaaataggctcttctctcactacatttctagatgatagaacacactcagattgatttcaccttcatcacaatggcattttatccagtgctggacacatgcatgctaagaactgagtgtactgtatgggtatttataatacccatattcattctaggaaataattatacatggctgggtatttacataaacaggagccttggagacctctcaagttcaaaaccgatggcattctatctcatttgaaagtcattggggtgggagaggacactccttaaaatattggatttcttagttttaatctgatgatatgctagctttatgaagatgtgagtgcaggccctcacctggatcgttgcttctctttttaataggaactagaaaatgaagattttcaaggtagcatctgggtgctcctaattgacttgattttatgtttgagaaaactaccttgacataccaacattggggtctctagaagtccagggagatgtttttcttcacagtgtcatataccctatcataagtgttgtgaggattaaatggaaaagcttctgggacaaaaactgctctgaagtgccacaccagactatactgttttaactatttctggctctgaagctattaagaataacccgtcactagcagagcacaaggctgtgaaatgaataagtgctgatacatttcaaagaagtaagatatttatgtgtgcatctctctggcaaaaactatcggggactcgttaggggtgtgtgtgtgtgtgtgtgtgtgtgtgtgtgtgtgtgtggtgtgtgctttatgtgttcattgaggactaaaaattagtattagtagtatattggcagcaatgttttgaactcggtggcaccaactaaaattgtgtgatttttatttcgtgcataatatttgagattattttaactcatcaccagatttcagctactatttatcctcatttataaggttactttttttctttaatgtggaaaataaacaaaaacataaaatggagaacaaaattttctcttaactgcctcacctagtgtaaaactgtaaccttttaaaatacattgaaaccatttttaattttctgctatgcttcttcctttttttgtatgtacatacacatggacattggaataccacaatattttagagtgtgtttgcttggtttttaaaataatgtatatatttctgatatatattatgttaaatatatatttatttttatacatttatatataagaaatgtataatatatactatgcctatataatatatatttcttcctttgagtgaaaaagtaatatgtggtagacacttagcaaaataggaaaagtatatagaatagccaaaaataacccctttaaaataaccaatgttatcagttgggaatagatccttctagccatatatgtatgcatatgtatatatgagatatagatagatgcattacttatcaacaggtataaaacaatattttctaactgaattttaaaacaaagaaaaattttgatacatattattatttttattatatagtggtaaaatatacataatacagaatttcacattctaaccaattttaagcgtataattcactggcactaagtacatttacattgttgtgcaaccatcaccagcagaactgtatctattcaaactgaaatgacatatccattaaacaataatgcactagctacattcttccttctcccatcccatggcaatcaccattctgctttctagctttataaatttgactcttctaggggcctcctatatgtagaaccatatggtatttgttttttgttttttgtttttgtaactggcttgtttcttcaagcttcaagcttaatctcttcaagcttcatctatgttgtagcatgtatcagaattttcttattacattgtgtgtgtgtatatatatgtatagatatatagatagatatagatgtgtgtgtgtatatatatatatcacattttatttatccattcatccatcagtggacacttgaattgcttcttcctttggctattgtgaataatactgctatgaacatattaccatgattgtacaaatagctgcattcctgcttttagttattttaggtatctacccagaagttgaattgccagattattgatatattttgaaatatttttatggcattgttttaatgactgtgtagtattctattatatgactatactgtaatgtatataaacaatcctcatgtattgattatttaaattttccattatcttttagttttataaagtacactattaacacggagcttcttgaaactaaacatttatgctctctggtcatttccataggctaaattttaagaaatgaaactatgggtttaaaaagtataaactttattagggcttttgttacatatcaccaaattacaccactgatttcccataaaaattttatagaaacaaacattaacttcgtccctaaatctaaattatataatcagttttccttctaagacaagtggagtcacaccattatgtcactcatagcccctaactccaagtgggatttcctgttcggctttagcaacagtatctaaaagtagttttgaactctggttttaactgacaatcacctgccccttcccttttgaatttccagatttcactctgttgagtgggtttatctacaataacttgcatttaaaaagccctaaatgattctgttgtgcagtcagatttaagaaatgcttttctaaatgtgtggtattatgtttatatatcgcactcttggccaggtgtggtggctcacgcctgtaatcccaacattttgggaggccaaggcagatggatcacttgaggtcaggagttccagaccagcctggacaacacagtgaaaaccccatctttactaaaaacacaaaatgagctggcgtggtggtgggtgcctataatcccagctatttgagaggctttgacacaagaattccttgaacacgcgaggcagaggttgcagtgagctgagatagtgccactgcactccagcctgggtgacagagcaagactctatctcaaatatatatatatatatatacacacacatatacatatacacacacacacatatatatagcattcttaatctcatatatatataatatatataaaatatatatatataatatatatatatgacattcttaatctgttaggttgttttccaactcatggggtcatctatcaagtggatagtgtaagtggcctggttggatgaggaatggagatatgggtacttaccctgaattatggaagataattagtgagatgactcaagaaagcaaatttagttattcttctagtcatggttaggataaaatgatgatgtaatttttgcatagagccaaaagaagcagcaaattagggatttcattataactgaaataggttagctgtgtttccatttttgctcattgtacaaactcagaaaccaattatatttatttatccagccattatttattaagtgcctacctgatatgaatccctaataatgagaccaagctcttcttgggcaataaaactctgaatattgcacatttactcttggaatcactggatttttgagagtcagagtatcttcttttataggtacctcgaccccagtgaagctctttttttttctcctgagtgatatagaaatatttttttatttgaagagaaagattatttattaaaaaaaaaaaaaaggagaagagtaacttagcatttcccctcctttgttgttcagatgaagagtcagtctagagaagtcacgtgactttcccaatgtcactaaattctaaacagtggtaaagctggcactttttttctcggtctcccaagttccagtgcacaactcttcaattgcatgcttcctagtgatacttacatttgccagtatccataacttcaactgggaattgtaaagtgcacctcatgcactacaggtgacctgcagaaattgttttatttctcttccttgtgtttgaaataataataataataataataataataataataataataataatgaacacagctttaaagtcagaagagtaatattggatttatattccacatgtcagcagtgagctggcatgggatagcagctgcctttttaacagagtaaactcttcagctttatagttcacatcactttgttgtttcctagacactggcattctcattttctgttcattctccaatttattcaatttttcttctaggagagagaaagattttccagtgtctacattttgatcacttatctcttaaaaataggaaaactacggatagactgataaagaattttgtggttttttttttttaacatgtcaactattatatttcactgttttattacctgagagaggtggatggtttttaaaaccccaaactatgcagccagatgacccaggcttgaaccttcgatctgccacctactagtgatgtgtccttgggcagttacttaatctctcgtcaatatcttcttctggaaaatgaggattggtttccgtctcaggagtaactgtgaggattatatataaattatgttcaacacaaaatgtttgcaccaggtaatttctatataaatgtttgctattattacacatttttggggttaccaataggtattttagcttgtgttttctgccacagggatgtccagacaaagtagataactgaaagtgaaaagcacttgaggtattcttcaaataactcaaataattgtcatgaaaatataattgaaatggaaatattcatcatcttaatcttctagcaagtcaaccatcccccttttgatattttgtatattccttggccatatgaaaatatcattctctatggcctcaattgtattgtacaaatgaattcacatcatgtgtttttcatttaaaatttacatttaaatcttaagcagtttcccatgtcatgtagctgaaattaaaatgtaataaaatgattttgaatttcgtgctgctgtttaaacgttgaccttttgctactgtctattttctccttctgttacattggaaaattttctaagtagaaatcacttttactcatcacactaaattttgccccaaatattctgtaactaagaactttctgagtgcaatgagtgtgactttctttgtctcatagtgaatctagtaagcagctcaatgcctgttacatagtagactttcaataaatttctattgaataaataatttggattgaatttctgggatttgtggtattgtgtttacttggcagtaaattcagaatgtactttgttttagtacatgttgttaaatactatttttaaatgcattcgtctctttcctttcttagtaagtttatttaaaaattgccctttatttccagaggggatttgagtcagcatcaagtaaaacttacacatatagtatggccataaaaatgaaaacaagtacctcaaagtcttcctggaaaaataatagtatcaatacattccaaattaaaatcattaaactatttagaggtggaggggcactaatgagatgactgtaattaggcacacattacatattttacagaatttcttgattgtcaagtcaataaggaaaataagatagttcatattttttcatggtcagttataatctgaccaaagaaatgcatttttcttgggatattaaccttcattcattcatcaaatatttgttaaatgccagcttatgggctatgatatgatgaagcataatgaggaagcagcagggaataaaaaggacagtctctactagtatagaagcagacatatgcacatgtgatatgtacagggagggagaagtaaagagcacccactgtgctggaggattcaggcaaagtttcacggaggaacctgacattcagcttgagatgtaagacattcctaggaatcagctagataattcaaagacaatggagaagtgcattggtgtaggtatcattgttgagatgtgagagagcttggcacaatagacatgaaagaaggtcaatgtatctcaaagagaggtagaagaggtggatttgcatccatcattcccctaacctgttgaagatttttgagcaggaaagcaatatgattagatttgcatttgcaataaatcactctggctaccaaatgaaggactcattgaaaaacagtcgtggacattgggagaccagtttggatgtttttagagaattcataatgaaaaatggtggaatcttggcatgggattgtagtagtggaaatggtaaaatgtggacatatttgtgagttatggaattccctatttagagagtaggagcaacaggatttagttcttgaatggaaagtaggcagtctcagaaatgattcccagtgttctcctttgagcaacaactgggtggatgagaaaaccaaatgaaaagcagatcagggtggatgatgaaatctgtttttaatatattgagtctgaaaagcatatgagacattcaagcagacacatgaaatagacagttgaggatttgggcttagtattcagaatacagatgaattctggagacagaaattctaaagtcttcataacatagaaggtatatcacgttgtggccatggtcctggagacaatcgagagacaaaagcagagatctggtgtcaaataaagggaatcattattcagcggctattgagcaatatattgggtattgtcattagtaacaatttcacagaaagatttaagaagcattttatttttcgtaagataatattccatttgatgcagatagatagctttctggtaaactaggttgatccagagataaagattaaaaaattcccagggacatttggttaacattttacttccaatggttctcaactagagaggaaaccacctcctgatggggagtttggaaatgaatgggcacatttttataaactgtcacaatgactggaggacactgttatcatttatcgggtagggagcaaaatacattactgtcaaactcaagaagaccatagtactctgttgagagacactgataaactcttgtgccacatatgtttctctggcttgctgattgtgaagttccgagctgactgtcaagaacggtcacagaccttctctagattttcacctccacagtactctctttgtcctgaacctagaggagatgacggctctgcctctgctagttccatattatttccctgtccttcgtgactcctctgcaattacatggggccatgtacataatacctgtgtaaatcagatccttgagaagacctagttggtgtgtgctgtcatttttatttgaatcctgactcttatggctatcttttccacatatcatttgtctcaaatatagtttcctagggatctcatagttccagatttagcttcctgttaagttacaagaagctggatagagtggtatctttttgtttggttggtttttgtgttttgttttgttctgtttttttggatattcgtctttaaaagggtaaacttgtcatttacttttgtaatttaagcagcctggatattcttgtcttgttggtggaggggctttacctttctgcttgaaggtggtcccaatagtactaaatagaaacatagtttcctcattaagcaatttattaaaatatgtatgttcaagacattcctaaaaaatactcagttaagactccaacattctattacagaggacgtggaaaaggcgttttgaacctagaaaaaatttaaggtcagatttttctcgtcaataatgccagtcataaaaaagtcagcgtagatgggcattgaatgaaagagggaataaagctttgcttttctttgatgactcaagatcagcagaaacccagagttcctattttgaacactttacaaacccaactataaatggagacagtgactgagcaactgggctgatgacaggcatgctctctgctgcagctgtaaagtctgccccaagaaagcagttcaaaatttgcatagtttgaaattgaaaaccaataacattcattaacaaaaaagaatatagacctaactccttaaaagtaactttttttttataagtttcttctttcagtctctttcttggtgaagacacacacacacacacacacacacacacacacacacacacacacacacactatttaaacatcctgaagtttttgaattaaagcaacagggcacaatttcaggcagccattgctttcttctaggaaatacctcactattagagctctctttggagatgagaagatttttctcacctttattatgaatcccattgtgtatgtgtgagcacgtttctgaatattttacatattataactgtatgtttgaaaatagaagatatatatatatatatatatatatatatatatatatatatatatataatttttttttcctttgcagttttacgtgccttacatcacgggagctggaaggggtagagaataggaataattttaaagcatatttatttatgttcttcatggttaaagaaaactatgccaacattcttctggcccacatattcaattaaatacatagtgaatcttttctacttactggattatttggtgcttccaagcatttatttttggcatttcatttcgtttttgtttttgcaggaatttttgaagttttattatgatttaacatttttattttgaaaatcgagcacattttaaaaattactctgctgtagctgtagtctgcccccaaaaacagatacttcaaaattcacctattttgaaaataaaaatgcaggtatagaaatttacatatacagattacttatttatctatgatttgttatgtgtatataaatctatttatacaatcatctataaatacagatatgcaaatatgttattttttgagacttaaatgtctgtagcaatcctttttttatgtggtatttttccattagtcattttctaagcctcttcaacatgtaaagctctgtgaggttaatggggggagagtggtgtcctaggatgatgaatagtgtgtctctccctgtcccccagtctggtagagaagctgtgcacaatagattagaccaaatagatttctacattttcaatcagaattagctgtggccaggagataagaacagacaaggtgcacccctgtgtgtctgccttctctcttggagcaggccctccacttccccttttgtttaagttcagataacatgttacattgtttatgtcactattcttcatgaccaattgtcacaaaacttttcctctatgttacttcttttagaagttttagtttcaggcctttctcatctttaaatcattaacccagttttagttaatgatgtcagataagggtccaatatcattcttttgtatgtgtatttctagtttccctaacatcatctattgaagaaattttctttacctatcatctattctttgccccctcatcaaaaatcaattgactgtatacacgtggatatatttccgggctctctgttctgttctgttggtctgtatatcttgtttttcatgccagtaccatactgttttgattactatagctttgtaatatattttgaaattaggaattgtaatgcctccggctttgttcttggcttcaagattgataaggctttttgtggtcttttgtggttccatgtgagttttagaattgttttttctatgtatgtaaaacttcattttggtatttagatagggatctcactgcatctatagataactttgggtaggatatacattctaacaatatcaagtctttcaacctatgaacacagatgtttatccgtttgtttgtgtcttgtataatttctttcaccgatgtttaatagttttcagtatataatctttctcctccttagataacttttttccaagttttttatgctactgtaagtagaattttttcctttctttccttttctgctattcgtcggcagtgcacagatatacaactgatttttgtgttcatctgtgaacactttgaaggcaagattatgccttatttgtgttctacatagtaataaataataattagcagttattaatatttttcatttattcatttttattgagtttcgttggcagtaatttttgctttctttctttcttttttttcctattctttttagagctccactggttcaacagcctctcctccagtttcgaccccagtcacaggacacaagagaatggtcatcccgaaccaaccccctctaacagcaaccaagaagtctacattgaaaccacagcctgcaccccaggctggacccatccctgtggctccaatcggaacactcaaaccccagcctcagccagtcccagcctcctacaccacggcctccacttcttcaaggcctacctttaatgtgcaggtgaagtcagcccagcccagccctcattatatggctgccccttcatcaggacaaatttatggctcagggccccagggctataacactcagccagttcctgtctctgggcagtgtccacctccttcaacacggggaggcatggattatgcctacattccaccaccaggacttcagccggagcctgggtatgggtatgcccccaaccagggacgctattatgaaggctactatgcagcagggccaggctatgggggcagaaatgactctgatcctacctatggtcaacaaggtcacccaaatacctggaaacgggaaccagggtacactcctcctggagcagggaaccagaaccctcctgggatgtatccagtcactggtcccaagaagacctatatcacagatcctgtttcagccccctgtgcgccaccattgcagccaaaggtaagaaactcagtaacataaggaggagaatacaggggtgcctatcttagtctgccttccccaggaagcgaagcctaaggcaaaagtgtgtgtgttacttttatttcactgacaaatacaatcccagggaaggatgagtgaagccagagaggagagagagactacttagtatgttactaatatggccactgtttagtatcaaatggaattgcttgctcaatctcagagaatcatcttccaaagcccacagacaccatagcatctgaggacaaagtgttctgatggagaaagagaaaataatttatttttcacatccttccctatattggttaaagcttccctctgttgtgcagaaacttcctctacaccttgcatttgcttggacattaaacaggtctgtagtatctcaagcctcagcaagggtagtgatctatgggtgagacatgtggagggcaaaactgagtgaactgctgtcaggctgtggccctgtgaaggcgattataactcccgcaatgttggtaccacagcggttgctgggccagaacaagtggccaaggacccaggaaatgggtgaggccaagcaggtctaagataatgcaaatgccttggacagtttctcctttgagaaggggctgcagtataatgcagcttgtttgtgaccccttgtttattcattttactaatcctccagaaagaatcttattcttcagcctttagcactattaagcaatgtttaaaaactccttatgagtgacagttacttcttatttgatttaattgtccatatgtggaccttttaagttaacactctctgttacttcgtctgaataggtaaggtgtaatactacacatgcccactcaccacaacttggatttttcattagtactggaaccaacacgatgttgattcctcccattatgactagaggaaccaataagaataacttggaatcggtgaaaatagaggaactgagccagtttccagccacttgggttggaagagtgcccttgcttcttttcagttagaactgtgagaaatcagaaatttgagagccctcaattagctagaagttcaatggtagttttgggggatggattgggtagaagtttggactgtatttttaaaaattctttccacatttttacaagattgtccatttcaagacagatctattcacatattcaacattgtatcaaaaatttccttatagggtatttactaaactgtttttcttatatgaaagcgtctgccatattaatggtgtcctatgtgaatttcacattctataggggaatagagctcttcctgacagtggggactgtgaagagctggagaaatcctatagccttatgtgtgaccactatatgaaattggccagccatgatccctttccgatagatagattccaaattagaattttaaatgattttaaacatgactcagtttcttaagtctctctatgaaaagaaatgttattacagttttttatttctttttaaaatgaatttgtccataatagccaatctggacagccttgctctttgttaatgtcgcagtatatttgcaccagtgcctcctggcccagtcaaggggagtctattttcaaaacaaccagttcagagaaacagattattcaacttaaccacagtttttgttttcaacaattgcaacagatttacccagggaagattacagtaaaataaaattttaggtcagaacaactgctgtcaaggtttaagttcaactagacagacaatttagccctgcccaaaacagggtgactgaaaggatggctgagtgatgttcctgaaggaatgacatggtgtctgccttgttggaggattgtgttatcccacataggaaccagacatgagagaaagcaaaactatgtgtcttgatgagactcacctggtgagaggtactgagctagtcttcagatgttgttttctcactaagtcactgggcactctggccagcctctcttcagcatttggaacccatccattggtgtaggaaaaagaatcagcccccactgctagaactggatctaaagtgctgggtccagccacatccctaacatttggcctgtcctcaccaactgacacagggagatggaatgaatttttataaaccactcatcagaaaacatggaactttattttacttcttatttgagcaaggtggttattcaagatgatctattagatgattacagattttggatgtcagtagatttcatgttatttttaaaatttttgatatatttgtttttcaacagtttcatgtgttttcacatcatattcggctgtgcattgaaaaaatgaaaatcaaaccatgtacttttcactctgattattaagagtggttagaggttgatatttagccatctgtcctgtctgtgctttgggaaagggggaagaggctgatgaagttatggataaattctgggcgcgttgtgagggcattggctgatgaaagggtgggttccttcacagttggcctttgagcaaaacactactgtattctactgcacctgtgcacagaggaccttattgtccttatattgactgtttggcttaattatgtgactacgggcatgagaaatgagctccgaattcttatcccagttctttccttgacattcctcttccagtttgaggaaaacctctagacctctttatgtcatgcttcaaacctcagtaaagtagaacaccatctttactaattaattaatgattgcaaaaggcttggaaatttccaaaggctgaataattgccaagtgaagactattcagctttccactcgctttcatttatttttaattttttttagtcactgatggaaaacttaccctcatgtctgaaaacaattatactttattacattgagtgcttctggggagtttggcatttaacccattaaggaaaaagtttaaaagatgaaataaataaatctcccttatatttgagatgagctgctttagttttcctatatcaggatagtataaaaagaggaatatgatatagtaaaaaagaggagagacaggatggggaaaaggagaaaggaaagaaaaaatgaaaaggaaaaaatgaagaaaggaaagaggcagaatgagaacctgcaaggcttaggggatcatgattatgtttatgttcccataatgtgctaagcagtgaatttgcatgctacagtgggccatactgtatttcctataccatctgagcagagttccttgaaaaatagtgttataaataagtctttataaggtagaaatgttctcttctcactggaaatcctcttaaagatgcagtggaatctcttctctttgctgatttataaaagctaatgtcagctacatcttgccatgtagttcacagaactcgtgtcctgtgcattttatatatctatatctatacctatatctatatctatatctatatctatatctatatctatatctatatctatatatatcgctgtgagttgggagccacgttttctccagtatttagataaggtggctcagcttgaaagttccagtgctaggacctggaagctagtcacaactctcaagtctaaagtgaccaggcaactttagcctccaattatcataaaaactcatctccgtcagcctcagctattaaagggacaggtatttgctacataatgtgtagaagtgctggggctgtgcattccagggaagttggagaatcttgtcccaattagtgtagaggttatgttaaattctgaaaccatctactattaaaattttcttggaaaatatttcaggaagatgagaccttggaggtcaactaaccatctttcagtaaatctaaaagtttttcttttccagaattagaacagattgttgcttttcatttggatttcgagtttggggcatattttatgggtcagagaagagtgtagaggtaatgaactgttgtggtcagtgttgaaggactttaagatctgtaatttctgttaagattaaggaaacagagaatgttcatacactaccactttgaacattccagtagtatgagaatatttaaattaattttatttatttatttatttatttatttatttatttattttttgagagggagtcccattctgtcacccaggctggggtgcaatgacgtgatctcggctcactgcaacctccacctcccgggttcaagtgattctcctgcctcagcctgccaagtagctgggattacaggctcccgccaccacgcctggctaactttttatatttttagtagagacagggtttcaccatgttggccaggctggtctcaaactcctgacctcacgtaatctacccatctcgacctcccaaagtgctgggattacaggtgtgatcccaccatgcccagcctgttttaatttttgaaaagagaaagttatatacattgattgcactctaaagaattgttggcatttggagagagttatccgtatggtaatccctgtgttaattatgtctcaattctaggatcagagaaacaaaatggaagagatgattagggtgggcagaggaatgaatgcagatagatccctcaagtcagtagctaacactagaatacatgtgaagatgagaatggtagatattgcttgaggccagtgactgtaatattagtaattcctctttgtacagactttttagtttccaaagcactttgtggagctcacaaaatccatgatcattaagcccaagtagaggtctttgtctttctttttctgatgagggttcaaaagcccagtgatgagagccactcacttaacgtcatatgtcaaattcatcggacagccacagctccaagtcaggtcttctaaagattgttcccatgctttgaccgtggcaagtgactgaatgttggcatgctttggatggcaggagctcctcatcagcgccagtgtacatggctccactgtgacccatgttacctgcagagattaaagtgggcttaggcagtcatcatggcctttggataaaatcagcggttggaggggaagcacccattaaatccctgcctggcacccaggcctggtgccttagagctatacttccccatccccatcagtcacataaaatttgtcccgaggttctttctaccttcactaagtacttaatatggagttcagtcatccccatttctcacttgaaccattgaaatggcctcttacttagggtttcctctggcagtcatctctgtacccatacatcctacatgtaataccagattaatctttctatggtaccttatcattaattgccttttgcaaaaaccttaataagttcccaaccagttgcagaatacattgaaatcccaaactggatttctagttttatctctccccagtatcctggattccagctgatatgttacatttttagttaattctcacctctatggctttgctcaccaagttccttcttcccagtccttccccaaataaaatctacacatctaaaagtgacccattaagatccagctacagtgttaatttctcccataaggttttctcctcttcctaaaagctagttgtgtgttatttcaccctctcttttagatgttttcactcttttactgtactggagtcatttgtgttcctgtcttctatcaacctatatccaagcatatattagactaagttttaggagaatatcctatgtttctagaaacatatgtatgtagtaactatatgcttagttatttagcagaggtttattgaacattgtgttcactttgaagaattttggtagacactctgtagggccctattagtgtttaagacattgtacagctcaggtgcattttcctttaaggatgcatttaacctgctagatgtcatctcatttttaagaccagagaaaaagagagcagcatctgttgtttcttgactttttaataatagccattctgactggtgtgagagatggtatctcattgttgttttgatttgcattcctctaatgatcagtgatgttgaactttttttcatatgtttgttgaccgcataaatgtcttattttgggaggtggctgctcataccctttgtccactttttgatgaggttgtttgtttttctcttgtaaatttgtttaagttccttgtatattctcgatattagacctgtgtcagatgggtagattgcaaaaattttctcccattctgtaggttgcctattcactctgatgatagtttcttttgcaaaagctctttagtttagttacatcccatttgtcaattttggcttttgttgcaattgcttttggcgttttcatcatgaagccgttgcccatgcctgtgtcctgaatggtactgcctaggttttctcctagggtttttatgcttgcttttgggttttacatttaagtatttaatccatcttgagttaatttttgtataaggtgtaaggaagtagtccagttttagttttctgcatacagctagccagtttttctagcaccatttattgagtaggaaatcctttccccattgcttgtttttgtcaggtttgtcgaagatcagatggttgtagatgtgtggtgtaatttctgaggtctctgttctgtttcattggtctatatgtctgtttcagtaccagtaccatgttgttttggttactgtagccttgtagtatagtttgaagtcaggtagcatgatgcctccagctttgttctttttgcttgggattgccttgtctgtacaggctctttttcatttctatgggtttttttcatttccgtatacgttttagcatcagtttgttgttgtccacaaaataggctgctatgatttggagattaccttgaatctttagatcaatttgaaaagagccgatacgttaacaatactgggtttttcaatccatgaagatggcctatctcttaatttatgtatgtcttctctaatttctctcatctacatatcatagttttgcatatattttggtaaacttgtccttaagcacttcaaatattggatgctattgtaaatggtattttaaaatttgtttataatcatttgttattagcatatagaaatagcaatagatttttatatactccctttgtatcctataacttgttaaatgtaatagttgtactagcttctttaataagacttcttaggcaattctacctgatcattttatctgaaaattgttgatgcaattgtttatttcctttatggataagcctattcatcaacattttatgtttgaaagatttgcttgctgattgaaaaagaaacagcgtgatacaactttaaaggaaataagttggaaaaaataagaacctttcctctccacttccataggctagcctacgtaaaccatcagacatagaagcgattttcagaatcataagtcttaaccccttacatttacagatgagaaaactgaggcctgaagagttacagtgactttcagagttatgtggttagtaaatgacctcatgtgaatgcaaaatgtaactcttctattctgcagttcttctctacattggttaaggatagttcaagacagaggaggtcagaagtaagtgacctttaaaaggtgtaataataactattgtcaggatgatcttatttcctatctttagaaccccatcatcagttttgtaaggccactgaataatagaaaatggttccgattctggtgctccctattctgtctcacagctgctcctgtgaaaacactcgttcatgggctctgtgtaattttgactcagtccataatctctctatcctgattttaaaagttatcatcagaatggatgtgctggtatactaagaaatgtctgtgaatattatttatttattttacttatctaatcattttcatagatttggttgtttaaaaataccccaggtctcaaatccctttggaaagttcagcaaatcattttaacaggtaattctggcaatatgtaattctttgtgtttacagagtgagagaaattctatttatcagtgttttttctttgttttgttttacttcagttctaagcaaagcagttattttgcttattgacatattgatatattcctttgggaatctcatttctttcttggccagctacaaacactcatactgtccaatttcaacaagagactatggttattctcttcttcaccaaacaaagaaatttgaaccattattgataaataatttctggtgaatattaaagctttgaaatgttttgcacacacagtgttaggaagtgtcttagagtgaaagacactatttttactactatagtatcaaaagtgccattgtcccacatacaaagatttacttgttaccttagttctttgatttttctggagtacagcaaccccaacttttagaagtactcttaacaaatgatacagtgtttgatctgtttcatctttggacttcagagaatgatcttcaaataatacagtttggtttatttcagaaggttgcttccttaaaacaaaattttgaaaatatgagataataacatttaacttctttttcaatcacttataaaatttacgaaacactctcatataagaaaaactctgtaagttgttcagaggcaacttctttagtatcctaccaatactgaatacctaagggagggtaagaactgacgtcgcctcactgccagcccagtgttctttccactctgtgaaacttgcctccatttgtagctgtctgtgtttgtatatattagctctattttgtgtagagttgtccaaacataaaatattcctttggcgcagagtttagagactaaaacttctgagtagtatttccgggacataacatatatttaacattatttgaaacccaagattcagtcaacattgctattaagagttaaggagctgaaactgtgcataccctaagtctgaattcaaggtaagaggtcccttgttattcagtctttataagtgtttggtatatttatgcctcctcaaatatgacaccatctttttttaaattcacatttaaagatgattgtaaaacaagaaggataaggtgtaagtgtggtagttgttttatttatggatttatcagttagctgttacttattttttgtggttcataatgcaattttaacataagtctgaataagtttactatagatgatattagtaggttttaccagaggaaaccatgcttttttattttatttttttctttttctttgagacagagtgtcactcttgtcgcccaggctggagtgcagtggtgcaatctgggctcactgcaacctctgcctcccgggttcaagtgattctcctgcctcagcctcccaagtagctgggattacaggcatctgccaccaggcccagctaatttttgtatttttggtagagacggggttttaccatgttggctaggttggtctcaaactcctgacctcaggtgatccactcaccttggcctcccaaagtgttgggattacaggtgtgagccaccacgcctggacagaaaccatgctttataatcctgctacccaccccatccaaagcacacaaaatattagttaagtaagctactagaagacaactgaggctggtggtctctgcaggggcagaaaaatgggaactggagaggagttcaggaaggcagcccagagaatatgaagcaggacccagcacacaacagcctgtgggccacatgtcacttgccacctgattttgtaaataatgtttgcttgaaatacagccatactcgcttcattccatattatcaatggctgctctcacactataacagcagagctgagaagatgcaacagagaccgtatggcctacagatattaaaacattttctgtatatcattttacagaaaaacattgttgactgctggtcaaaaatatgggaagaacgtcatgaaatttagattcttattaaaagttcttgaacatccctgaactatttaatattatttcttgtccagcagatcctgaatcttaaattagaagttgtgacagtaagtggaaattttcagggaaggaagaacagaatatcaaaatcaaaaattaacatgctatgtgcagagtaggttctatatccctcctttttttcccaccctggtaaactcttatttaaacttcaagatctgtctctaatattaacttcttggagaagtttgaccattcttccagttcccacatattattagcttatctttcctctgattttttctcatagcattttttcattcatttactaaaatatgcactaaaatatgcacctcattcagtatttttatataataacattttaagataatttgcatacagtataattcgcccatttaaattaaatggcgattaaattaatttaatttaacacaattaaattatttttagtatattcacagtatattttactgtattcttaaatatagtatatgtgcaatcattatcacaatcaatttctttacaccaggaagaaatcctctaccaatgagcagtgacttttctttttccccaaaccctctaagtctaggtaaccatgaatttaatatctgtatctacagatttaacaattttggacatttggaataatactatatatagtcttttgttactggattcttagtataatattttcaatttccattcatgttgtagcatatgtgattgctgtattcctttttattgctgaataatattccattgtatgaatacatcacattatatttatattttcatcaattgatgaacatttgaggtttttctatcttttggctattataaataatgcttctatcaatatttgagtagacatatgttttcagttttcttgggtatacacctaaaagtgggattgctgagtcacatggtaatttaatgttcaacattttgaggaactgctgaaatgctttccaatggggctaccccattttccattcccaccagcagggtatgaggatctcattttctctgcaacctcccaccgcatttgattttattcatattatgtgtctatctctcaaatacaaatccatgttcttcaagagtggaaaccatgtctgtttcagttttgtttctgtatgcctaatatagtacattgcatgtatcaggcactcatgaataaatgaaagagtcaaccaacaagtgaaataacacctactgaattgacatggaaccacatagagttcctattatcaagagttgttgggttgatgggtgcagaaaaccaccatggcatgtgtatacctgtgttaagaaacctgcacattctgcacgtgtaccccagaacttaaattttttgaaaaaagcaattttattccaaaaaaaaaaaagagtcgtttatgtgggcttaaatagctgtgcttttataaatgttcttttttttaatttcagcttttattttagatacaggggatacgtgtgtgggattactacatgggtaattggacccaggtggtaagcatagtatccaataggtaatttttcagactgtgccctctcccttcctccccgtctggtagtctgtggtgtctgttattctcaagtttatgtccatgtgtgctcagtgtttagctcccactcataagtgagaatatgtggtatttggctttctgtccctgcatcaatttgcttaggattatggcctctagctccatctatgttgctgcaaaggacatgatttcatgattttttttgactgcacagtatttcatagtttatatgtaccacatttttttaaatctagtctaccatttccagctatgttcttcatctttctaccattcacatcctagtgcgtgtaaccgataaattagtattcatttagatggactccattttattttattttattttattttgagatggggtctcattctgtcgcccaggctggattgcagtggtgcagtcttggcttactataacctccgcctctgggttcaagtgattctcctgcctcagcctcctgagtagctgggattacaggcatgcaccaccacgcccagctactttttgtatgtttagtagagatggggtttcgcattgttagccaggctggtctcaaactcctgacctcaggtgatccacccactctggccacccgaagtgctgggattacaggctgggattacaccactattttttaatggcattttagcagttaaaaactgaatgctctaaaagtcagggatggcatgggcacaggtgaaagatgaaagttttgtctatttctatttctatgatgaaatcagttgggttaacaagagcattcttctaagcagctagagattctgttggtctcatccagccatcacccagatggcaatacaaccagtaaaaggcagataatggtatctgtttttgcagactttatgttcacaccagtgtcactcatcttaacctggactcttgtcatcagcttgatatttcctcactttcctctttctccccttttcaagttatagctgtgccttgacatgacttacccaatactctgtattctcttcgtgttcattaataggctcattttccagaactaacattggggcatttcaaggactttttacgtagcacatgagctgcttacaacgtaattctgtctagttgggacatatgtcatttagccagattgtttatggcattaccacagccaagcatatattagtttcatagtaatttctagggaaaaaaatgtggaggaaatatgtggtttttgttatacttgcaatgttactatattactgcttttttttaagttttgatttcaataaatacctagcatatattttcagatgccaaaggacatacaatgatgaacaaaaactcagctcgtcctcaaaatcgatatgtattattggtgatgctggactccacccactcatagatgtttctcattattgtgaaacattactttttggaaaaagagagctgggccaggcacagtggctcacacctgtaatcccagcactttgggagaccgaggcaggcagatcatgaggtcaggagttcgataccagcctgaccaacatggtgaaaccctgtctctactaaaaatacaaaaattagccaggcgtggtggcgcatgcctgtaattccagctactcaggaggctgaggcaggggaatcgctcgaacctgagaggtggaggctgcagtaagcccagatcacaccactgcactccagcctgggtgacagagagagactccatcttaaaaaaaaaaaaaaagagagagctaacatcttcactttttaaggaaatagacattgcccccatgattagatacgtatggatgactagatcatttaaaacaaaaattacataagggcttaaagagtggctcttaagtgtaaatgctaggaagcacccaattagttattatttcctgtatgtgttgccttcatggacattggttcatatagcctcaaaaagtctatgaagatacttttttttttttttttttgaaagagagcgtcactctatctcccaggctagggtgcagtggcacaatctcagctcacttcaacctccgcctcccaggttcaggtgattctcccgcctcagcctccagagtaggtgggattacaagcatgcgccaccataatcagctaatttttgtatttttaatagagacagggtttcactatgttggccaggcaggtctcaaactcctaacctcaagtggcccacccgccttggccccccaaagtcctgggattacaggcatgagccaccgtgcccggctgaagatactataaacatcttgattttttactgagtcagaaactgagaaagggaaaaaattatttgctgaagactgcatgcctcaagtttatacccattatactacactgcctgcttgcgaaagtatgttttaaaaaattgtcactgctgtgcagcaactcaaattgtcactgctgtgcagcaactcaactttaagtcttaaacctagttatcttttatcttgagcaggacatatatgttaagctgctgaggatgctccttaacatgaggccattgggcgggtgtgtgccagacaatcctcctagttgtttctctaatacagagcttcaggtcgtctcttcctttttcatcttctagcctgccctggccaagtacctatgaatcaaccggcaaggcgaggggtgtatttggtgggctatagagtggaattaagcagaatatcaaaaattttagccaataacattgaacctcaaagaggaaagtactgctgagttctgatagatgcaagacaagctaaagacctccttagctccattgttctgcatcagcacaatatgtcctagtgagaaggaaagacatagcaaaactaaaaatgacctgtttttcaagagcaatgtcttttcacccaaacttgtgaactgcttgccaaaagtcaggactaacattgttttgtacatttgcattaaaagaaattatatcaccgttgaagagctgatcagagaaagggtataggaaaaaggaaatgttaaaataagctgtaaaatccagcccatttatatctggagtttagaggcagtctaacaaaatgaatgttccatttactaatcacatttgccatttattcaaaacaaacacggcttgagagaggattaaataaacatccaaaaactgtcgttcttgaaacctttggatagaacattgagttgcattcctgcaggagaaatgccaagtgagtgagcctagtccaagtttgtttagaaagccatatttgggagaaccatggaagtgcgaacctgatcatgtgaaaagcccaggactgttcagccttctgtggcagttctgtgagttctagtaccagactattaatagggagtcaagtagaaatatccttccttcccctccctccctccttcccttcccttccttccttttccctttcccttcccctttccctttccctttcccttcccttcccttctccttctccttccttccttccttccttccttccttccttccttccttccttccttccttctctctctttctctcttctttggtgtgctgagaataatctgcagacagtgactctacagataagattgcaaatattttcccttccttcattccttccttctttcctctcttccttccttctttccttcttccttttttttcttttttaaccacatgatttctatttcctttagcaagatgttatcatgtgagggaagtcttaggtttctatatccctttattcttagtgttagcatttcttattaaagacagatgtctagttttctattttaagggttatctaatttcagtcataaaaatgtcctataaattaagacataactttgtcaatactcttctagaacataatagctaccccaaaatatttgttcaatgatgggaaattcattgatatttagaccttcagagatgaaataaatatgttgcctttgcttttcaaagatgccatcttgcccattcataagaaaactaagacccacagaatgactacccaaggcctcacagtataattaggactttaacaaaaatccataaaacctctggtattgggatatttaagataatacattgatatatactttatcactgtctttgataaaataacagtaaaaccattttaatgggacacatttttataaccattgtgaatttggtcctcaaaaaagaactcactgagatgatgagataatgcatattcatcctcttttacagatgatgaaacatttcggagaaggcaagtcagttttccaatttttcatactatatagatcattgaatctttgtcccttatatacagaatcaacaatatgaaatatgtggaacttgaaatcatagtttccaacttttctgcctatagaatgcccatttccagttgcttaacatttagattgataaacatgaaattcattaaacaggaaactgaataagagacctggactaatatttaggtattacttagtattccatccaagaagtgtctgcagacagtgactccatagatgataaggttgcacatatttcagaagccaaataaatgttgtgattaaatgattcaagtctgttaaccatttggtagttatgatgtaaatggctgttaaatggaaagcatttgtaaaaatgtatgtgcaaaaagaaaggatttctaacaaaccgaatgggccttacctattttagttaatactctcaataatgagcagtgagattaatttataagtatgtgtgtgtgtgtgttaagatatattcacattttatgaaacctgaagctttgaagcttatcactgtggaaataacttctgtatgcataaaagtattatattatttcggtaggactgctataacaaaatacagtcaggccttcatattcaagtaggctgcattcagaattcaaccaactgccaatggaaagtgtttgtaaaaaataacaagtaacaataaaatattagaaaatactacaaatttcaaaatacaatataacaagtatttacctagcatttacattgtattgggtattttaactaatctagagatgatttaaactatgtaagaggatatgtgtaggttacgtgtatagcatatcatatatataagggatttgagcatccatagagtttggcatctgcatggagtcctagaactgatcccctgcagatatgaagggacaactgtaccacaaactgagtgacataaactacagatttttttttcctcacaattctagaggctagaagtctgagatcaaggtactcacaaggttgctttcctctaagagctttctccttggataaaaatggccaccttctctctgtgtcctcacatggtctttcctctgcttctctgtgtcctagtccctctttttataaggacaactccagtcgtattggattaaggtccaccctagtgctctcattttaacttaatggcctctttaaaggccctttctccaaatacagtcacaatctgatatactaggggttaggacttcaacatattaatttgaagggagacatgactcagctcataacaattatgtaggcaaatgaacatttattttaaatgacagaggaaatgcaacatgttataaattaataaaagctatgaaatacctcaaaaatcacattaataaaagctatgaaatacctcaaaaatcacaaaaatcttgaaaaataacactcttatgaattaaattcctgattactttttcttacatttttagcagcatattcattgattaactaactgtacaacctaatttcataatattttctgcagagagaatacaaagataatttcatgctgagagtttattactaccagtcctgccttacaacaggtccttaagggaatgataagcatgaaagactgttacctacttctacaaggacacctttaagtacatagcctgctaacactataaagcaactatactatcaagtctacataagaaccaggtaacaacatgatggcaagatcaaatgcttatatatcagtattaatcttgaatttatgtgggctaaatgccccacttaaaggacaccgagtgtcaaattggatgaaggagcaaggcccaactctatgctgttttccagagtcccatctcacatgcagtgacacctttaggctcagaataaagggatggagaaagctctatcaagcaaatggaaaacaaaataaagcagaggttgctattctatttcagacaaaacagactgtaaaccaacaatgattcaaaaggacaaaaaaagggcattacataatgataaagggttcaattcaacaagaagacttaacagttctaagtatgtatgcacccaataagggagcacccagatttataaaacaggttattagagaactacaatagtgggagacttgaacactccactgacatttctagagagatcactaaagcagaaaaccaacaaagatatttgggacccaacacttgaccaaatggacctatgagacatctacagaatatttcacccaacaacaacagaataaacattcttctcatctgcacatgacacatactctaagattgactacacacccattcataaagcaattctcaaagaattcaaaataactgacatcataccaaccacattctcagaccacagtgcaataaaaatataaatcaatactaagatctctcaaaaccatgcaattacatggaaattaaacaacttgttcctgaatgacttttgagtaaagaatgaaattaaggcagaaataaaaaaaatcctttgaaactaatgaaaacagatacaacataccagagaacacagctaaagcagtattaagaaaaatgtttgtagagacaaacacctacatctgtaagttagaaaaatctcaacaacctaacatcacacctagaggaactagaaaaacaagaccaaactaattccaaagttgatagaagaaaataaatagttaaaatcagagctgaactgaacaaaattctgatatgaaaaccatacaaaagatcactaaaaccaaaagctgtttttttttgcaagaataaataagattgtcagactactagctagattaataaagaacaaacaaagagaaccaaataaacacactctgaaatgacaaagggtacattaccaccaaccccacagcaatacaaaaaaccctcagcgactcttatgaacagcactgcagacatacattagaaaacctagaagaaatgaataaattcctggaaacataaaacctcacaagattgaagcaggaagacattaaaatcctgaatagaccaataatgagttccaaaattgaatcagttataaaaaacctaccaaccagtaaaagttctggatagaccagatggattcccagctgaattctaccagatgtaataagacttgctggtaccaatcgtactaaatagcttccaaaaatcgaggaggagggactcctccctcaatcattctataacgccagcatcattctgataccaaaacctgacagagatagaacaaccaaaagtgaaaacttcaggccaatatccttgatgaacatagacacaaaaatcttcaacaaaatactagcaaattgaatccagcagcacatcaaagagctaattcaacccaatcaaataggctttagccataggttgcaaaattggttcaccatacacaaatcaatgaatgtgattcatcacataaaagaactaaagacaaaaaaccacatggtcatctcaacagatgcaaaaaagggttttggtaaaattcaacatcgcttcatgttaaaaaccctcaacaacttgaaattgaaggaacatacttcaaaataataagaaccatctatgtcaaaccctcagcctgcatcatactgaacaggaaaagctggaagcactccccttgagaactggaacaagacaaggatgcccacttccaccactcctattcaacatagtactggaaattctagagctccaaatagaaagagagaaagtcaaactatttctgtttgcagatgatgtcatggtatacctagaaaaccccatagactctgcctaaaagctccttgatctgataaacaacttcagcaaagttctagacagaaaatcagtgcacaaaaatcagttgcctttctatataccaataatgtccaaactgagacccaaatcaggaacacaatcccattcacagtagccacagaaagaataagatacctaggaatacagctaaccagggaggtgaaagatctctataatgagaattataaaacacagctgaaataaatcagagatgaaacaaatatatggaaaatcatttcatgttcatagataggaaaaaaatcaatattgttaaaatttggggcagtcatactggccgaagcaatttatagattcagtgatattcctgtcaaactaccaatattatctttcacagaattagaaaaaaaaaatattgtaaaattcatatggaaccacaaagagcccaaataggcaaaacaatgctaagcagaaaggacaaagccagagtcatcacagtacctgacttcaaattaaactgcaagactgcagtaactaaaacttcatggtactgggacaaaaacagacacataaaccaatgaaagaagctagagaaacctagtaatcatgctgcacacctacaaccattgatattcaacatttgtcaactcaagatggattaaaagacttaaacgtaagacctaaatctataaaaatcttagaagaaaacctaggaaattatattctagaaatactattctaggccttggcaaaaatttcatatgaggtctccgaaagcaattgcaacaaaaacaaaaattgacaagtgagacctaattaaagagcttctgcagcacagcaaaacaaactatcaacagagtaaacagacagcctatagaaagagagaaaatatttgcaaactatgcatctgacagaagtctgatattgagaatctatatggaactcaaacaaatcagcaagcaaaaagcatccccatttaaaaatgggcaaaggacatgaacagacatttctaaaagatgtgcaattaaccaacaagcatatgaaaaaatgctcaacatcagtaatcattagacaaatgcaaatcaaaaacacaatgagattccttctgacaccactcagaatggctattattaaaaagtcaaaattaatagatgttggcaaggttgtggtgaaaagggaatgcttgtgcactcctgttgggaatgtaaattagttcagtctcactgtggaaagcagttcagggatttctcaaagaatgtaaactagaactaccatttgacctagcaatcccattactgggtatatacctaaaggaatataaattgttctattaagttggtgcaaaagtaattgtggtttctgccattaaaagtaatggcagaaacctaatgaaaagacaaatgcacttgtatgttcattgcagcactattcaaaatagcaaagacctgggatcaacctaaatgcccatcaataatagactgggtaaagaaaatatggtatgtatgcaccatggaatactgtgcagccatgaaaagagcgagatcatgtcctttgcagggacatggatggagctggaggccattattcttagcaaactaacatgaacggaaaaccaaataccacatgttttcacttgtaagtgggagctaaacactgaatacacatggtcaccaagaggggaacaatagacactaggacatacttggtgtagaggctaggagaagggtgagggtcgaaaaactatctattgggtactgtgatcactacctgggtgatgaaatagtttgtacaccaaacccctgggacacacaacttactgatgtaacaaacctgcacatgtatcccctgaaacaaaaataaaagttgaaaaagaaagaaaataatgtttatacttagaaaaaaaattatctttcttctagcctgagtgataaacattttttattattatagtttttaaaagtttggaaaactgcctttaatctgcacaacttttattagtattgttgtttgaaatttaagataatcaaatttggggacactcctattaagtttcttttatttgtgagctattacaacacccttactcttactgcagattcatagctgatgagttctattttgtgcaattagcatcaaaaagaaaaatcaagtcagccgtgcatttataattgtgttcagtgcattactaagcacattcctaaagagaaagtatctccatttgcatcatcgaaaaccaagtagtactccacatgtatacttttacacatctgactattggttgaatttccagcagactcaatttctgtctctatgcattttactcctgtttgtctcctctactagtctaatttccatgctgggtgttataggacacattaatgacacgtgacttctggtcccacaaatctgtgtcacagagctaggacagtaatgggcccaggcacattgaagcattccaggaactcattcctatacaatgacgatgggtgatgacttaagcacacaccatagtgactgcagaccatgtaaatatatcccatgacactcagctaaatgtctccctgactcaacctttcttaaccaatctcaaaggtcacatgttgattctaacatttccctacatgagcgtacacagaagacagagtagaagaaccatagtgaacatacagcttggtcccctcccaagaccttagtaggggccagtgtacatgagggcccctgaagcttcatttccttcctcgtcaaagcatgtttatttaaaagtatttattttactctggatacttcctcagaaatagttattcctttccttttttccctccctctctccttacctctgtcttttcctcaaacatttatttagtgtatactatattctagacccatgttaagaataagatacatatgctgattctacagcactgcatagaaagtaatgggtaacctaagtggttacaaataaaatctactagctatcctggtgatttaaaggccaccttcagctgaatgttcaggaaaacctttatgaggaagtagcatttgatctaacctataggaccggtaggatagggcctgggtggggagactgggagatggaaaggcattccagtgtgctggtgctgcacatggtgggacttctatcacatgtattctctatctgtaacagttaaagttttttggttacttggcctgggtaatggcaaagcaaatgtactaaaagaaactctggttttgtggccacctcagttcctttggagaatgtcctctctcagctgaagctgagaacatccagtcacatttctgttctggaaccccttaagctgtttctgtgacaacatctgaaagaattaagctttatccaagtcaccagaaaagggcttacgttaactgttttcactaagactctacgtttcaatactaacacttacggacaagtggaaggtattcttcagttgtatttggtagttcttctgtagcgccccttttgtcttcctccatttctctcttgctagccctcaactctaccccacgttcgttttcattatcttttttctcatcccccatttcctgcttatttgtttattctggtggctcttctctctctcatagacgacatagaagcatggccttctttctgaactttccttgacccagagggagaaaagtctaacatactatcttatttatgcaatctgaggaaagttgttggccagccatcacccagtgtgacctagtgacagaaccagtagggatatctgagtgttcagtctttgaatgattcttccaagtcatatagatgtgttgattacttcaatcttgaacaagatatgttgtcactatcatactgggctatgagtacttgagaacagggaactgtgtagtaaaattcaccacatatgctggtagcacacaggcatcaaccagtctaaacagaacccacccgggtcacctcccacgtcactgctaagacacagttctttacacagaccatgtaaatgctgttgtgttgttttgtcaaagcttctatcactcttcttgctgtaatttgagaagcaaaagcattaataaccagttacttacataactggtattgtaaggcttactggtggcagacagcattcctgtgagcagtattagcacacctctcgatgagaatggctgtgaactacattctttggagtaacaataagaaagactatacaaaccctggtcctctgtctacagtgaatgaacacgctcatcttttcttcccacagtgatttttttccagataacatattctaatggcatgagtatattaaaataaagtcagatagggtgaggaggggcatgctaacaaaaataatctgtcactcttgccaaatggaggtaatacagtcacaatatttacaagtaaaatggcagggatgtaattgaaagtacatctatatatcatctatatatcattcatatcattcttcaagctgttatcacagttccatctttgactgatgcctcttcaatatgttgtataatgtactatagagttattcctttttactcttttgctcatggaaataatttgaaggcttttaaccttctgatctcatttttcactttgttccagacatggcttactctctctgccatggaactatcagataaaatgcataatttgattagaccaaaactgtactaccatcagtctgtcggtcaacacaagatatattttaaggggatctacacaaaagtctgcatgaaaatattccatataaagaatagttacataaaccttaataaaaagaaaatactgggaagcacttagtgtctcagattctggaatcaaagctctctttcttttcgtttcttttctcagcgattcaaatgaccactctgatattttctttgccaaattaactttagcattggaggggcgtttatatagtatctggcttaaagctattatttttctcatttgctctgcagacatttattgatcacttactgtgtgccaggccctgtgataggaatggaggtagagaagacacaatcccttgccctcaaaggtttcagtgacagaagaaatagatgaagagaatgaggcctgaagtcatttgctcatggtcctacaggcacagagcaggggtgcccaacccccgggccatggacctctaccagtccgtgacctgttggaaccaggctgcacagcaggtggtcagtggcgggcaagtgggcgaagcttcatctgtatttacagccactccccattactcacattactgcctgaacttcacctcctgtcagattgcagcggtattggattctcataggagcgtgaaccctattgtgaactgcacatgcgagggatatattttgcgtgctccttatgagaatctaatgcctgatgatctgtcactgtctcccatcatccccagatgggaccatctagttttgggaaaacaagctcagggctcccactgattccactgatggtgagttgtataattacttcattatatattacaatgtaatagtaatagaaatagcatgaacaataaatgtaaagtacttgaatcaacctgaaactatccccatgccccaatccatggaaaaattggagaccacagaactggtccctgatgccaaaaaggttggggaccactggcatcgaggatagaatagggaccagaaagagattgtgcagccgtccttctagatctggttcttgtcaaccactccatctccctaatgtgggacatggcagaagagttacaactagagtaaaataattcttgttgtgagttgcaaactttatgggctccatgtttaaattatattattaaaatatgtattttgtgtttgatattaatctcatagacatttaggagaacgattagatttctgatgcctctaggcattcagaagtctctaactcacatgctgcattgtctgaaaggttctattttgtgatagtgcttcttgggcatcagtggggacagcttagaaagcttgtcgttgcatctaaataaatactgagagtttggatatgtttctaagttcctttcctttgaactgtggggcataaatctcacgagacagcttgttctcaagaggttaccagtacgtttggttctagtctgtccacaaatattgtgagaacaggcttattcagattattttgacatgctcagacaaggcgttccgaaccatgtgagaaatgaacgtgtgtgtgcaagggaaatacacacaatgctactgagcctctaagaggctccattcctcgtgttttgaggagtggaaattgtctcaaaaaatcagcatctcagctctcattcctaatgtatcagaatctagaagttctggttttggaatctgatatagtgagaaatcagaagatgtcctggggtgtgggagaatgatatgttctttagtcgagtttaaatgagtttattccttaacttagcacttccccagtggcacaataagcactcagtaaatgtttattgaagtgaattccaattcctgatttgaatttagtgttggagaaattccagtcaccgggctgataaaaagtggtgtcagattactggaaaaaggactatgtggagaagctgcttgcaagtaataaactctttgtgttagagtcacctgttttacccaatgcctagcctagatcgttgaaaaggaaattgaaggatggtattcagattaagaaacagatccctggattatgtttaagaatttctgggaggagccaagatggccgaataggaacagctccggtctacagctcccagcctgagcgacgcagaaggcgggtgatttctgcatttccatctgaggtaccgggttcatctcactaggcagtgccagacagtgggcgcaggtcagtgggtgcgcgcaccgtgtgcgagccgaagcagggcgaggcattgcctcactcgggaagcgcaaggggtcagggagttccctttcctaaccaaagaaaggggtgacagacggcacctggaaaatcgggtcactcccacccgaatactgcgcttttccgacgggcttaaaaaacggtgcaccacgagattatatcccgcaccttgctcggagggtcctaccccatggagtctcgctgattcctagcacagcagtctgagatcaaactgcaaggctgcagcaagactgggggaggggcgcccaccattgcccagacttgcttaggtaaacaaagcagccaggaagctcgaactggggggagcccaccacagctcaaggaagcctgcctgcctctgtaggctccagctctgggggcccagggcacagacaaacaaaaagacagcagtaacctctgcagacttaaatgtccctgtctgacagctttgaagagagcagtggttctcccagcacgcagctggagatctgagaatgggcagactgcctcctcaagtgggtccctgacccctgacccccgagcagcctaactgggaggcacccccctgcaggggcacgctgacacctcacacggcagggtattccaacagacctgcagctgagggtcctgtctgttagaaggaaaactaacaaacagaaaggacatccacaccaaaaacccatctgtacatcaccatcatcaaagaccaaaagaccaacattagacagatcaacgagacagaaagtcaacaaggatacccaggaattgaactcagctctgcaccaagtggacctaatagacatctgcagaactctccacccgaaatcaacagaatatacatttttttcagcaccacaccacacctattccaaaattgaccacatacttggaagtaaagttctcttcagcaaacgtaaaagaacagaaattataacaaactatctctcagaccacagtgcaatcaaactagaactcaggattaagaatctcactcaaaaccactcaactacatggaaactgaccaacctgctcctgaatgactactgggtatataacgaaatgaaggcagaaataaagatgttctttgaaaccaatgagaacaaaggcacaacataccagagtctctgggacgcattcaaaacagtgtgtagagggaaatttatagcactaaatgcccacaagagaaagcaggaaagatccaaaattgacaccctaacatcacaattaaaagaactagaaaagcaagagcaaacacattcaaaagctagcagaaggcaagaaataactaaaatcagagcagaactgaaggaaatagatacataaaaaacccttcaaaaaattaatgaatccaggagctggttttttgaaaggatcaacaaaattgatagaccgctagcaagactaataaagaaaaaaagagagaagaatcaaatagatgcaataaaaaatgataaaggggatatcaccaccaatcccacagaaatacaaactaccatcagagaaacctacaaacacctctacgcaaataaactagaaaatctagaagaaatggataaattccttgatacgtacatgctcccaagactaaaccaggaagaagttgaatctctgaatagaccaataacaggatctgaaattgtggcaataatcaatagcttaccaaccaaaaagagtccaggaccagatggattcacagccgaattctaccaaaggtacaaggaggaactggtaccattccttctgaaactattccaatcaatagaaaaagagggaatcctccctaactcattttatgaggccagcatcatcctgataccaaagcctggcagagacacaaccaaaaaagagaattttagaccaatatccttgatgaacattgatgcaaaaatcctcaataaaatactggcaaaacgaatccagcagcacatcaaaaaacttatccaccatgatcaagtgggcttcatccctgggatgcaaggctggttcaatatatgcaaatcaataaatgtaatccagcatataaacagagccaaagacaaaaaccacatgattatctcaatagatgcagaaaaggcctttgacaaaattcaacagcccttcatgctaaaaactctcaataaattaggtattgatgggatgtatttcaaaataataagagctatctatgacaaacccacagccaatatcatactgaatgggcaaaaactggaagcattccctttgaaaactggcacaagacagggatgccctctctcaccactcctattcaacatagtgttggaagttctggccagggcagttaggcaggagaaggaaataaagggtattcaattaggaaaagaggaagtcaaattgtccctgtttgcagatgacatgattgtatatctagaaaaccccattgcctcagcccaaaatctccttcagctgataagcaacttcagcaaagtctcaggatacaaaatcaatgtacaaaaatcacaagcattcttatacaccaacaacagacaaacagagagccaaatcatgagtgaactcccattcacaattgcttcaaagagaataaaatacctaggaatccaacttacaagggatgtgaaggacctcttcaaggagaactacaaaccactgctcaaggaaataaaagaggatacaaacaaatggaagaacattccatgctcatggataagaagaatcaatattgtgaaaatggccatactgcccaaggtaatttatagattcaatgccatccccatcaagctaccaatgcctttcttcacagaattggaaaaaactactttaaagttcatatggaaccaaaaaagagcccgcatcaccaagtcaatcctaagccaaaagaacaaagctggaggcatcacgctacctgacttcaaactatactacaaggctacggtaaccaaaacagcatggtactggtaccaaaacagtgatatagatcaatggaacagaacagagtcctcagaaataacgccgcatatctacaaccatctgatctttgacaaacctgagaaaaacaaagcatgggggaaaggattccctatttaataaatggtgctgggaaaactggctagccatatgtagaaagctgaaactggatcccttccttacgccttatacaaaaatcaattcaagatggattaaagacttaaatgttagacctaaaaccataaaaaccctagaagaaaacctaggcattaccattcaggacataggcacgggcaaggacttcatgtctaaaacaccaaaagcaatggcaacaaaggacaaaattgacaaatgggatctaattaaactaaagagcttctgcacagcaaaagaaactaccatcagagtgaacaggcaacctacaaaatgggagaaaattttcgcaacctactcatctgacaaagggctaatatccagaatctacaatgaactcaaacaaatttacaagaaaaaaacaaacaaccccatcaaaaagtgggcgaaggacatgaacagacacttctcaaaagaagacatttatgcagccaaaaaaacacatgaaaaaatgctcatcattactggccatcagagaaatgcaaatcaaaactacaatgagataccatctcacaccagttggaatggcaatcattaaaaagtcaggaaactacaggtgctggagaggatgtggagaaataggaacacttttacactgttggtgggactgtaaactagttcaaccattgtggaagtcagtgtggcaatacctcagggatctagaactagaaataccatttgacccagccatcccattactgggtatatacccaaaggactacaaatcatgctgctataaagacacatgcacacgtatgtttattgcagcattattcacaatagcaaagacttggaaccaacccaaatgtccaacaatgatagactggattaagaaaatgtggcacatatacaccatggaatactatgcagccataaaaaatgatgagttcatgtcctttgtagggacatggatgaaattggaaatcatcattctcagtaagctatcgcaagaacaaaaaaccaaacaccacatattctcacttataggtgggaattgaacaatgagatcacatggacacaggaaggggaacatcacactctggggactgttgtggggtggggggaggggggagggatagcattgggagatatacctaatgctagatgacgagttagtgggtgcagcgcaccagcatggcacatgtatacgtatgtaagtaacctgcacaatgtgcacatgtaccctaaaacttaaagtataataataataataataataataaaagtttgggacgaaaaaaaaaaaagaaacagatccctcatggtatcccataaaagttaccttaatttatgaaaatccaacctgtgcaatatgggtatcttttttacaatagaagtgatttatatgggctactcttcccatagcaagagtctcattgccttaccatatagctcttttggaattttttttttttaaacttgaatatatcagaatgatagtaactggccactggagaaaaagctctgacctcaagccaaagagcaatctgtctacatgtctataccatggcagtgattattgataacacaactgattattgtaatcacaacttcccatacagaaattactatttgtattattctccaaaaaataaggccaaatgccataatgtgttttttcagaaacagtagaacatactcttagaatgatgtgagtgcacactcactctcattctagtttattctaaacgagaatctgagatgaatgttccaaatctctccaatcacaagggaggagggtacatttgcagtggatttttctcagaaggttaaatctaaagaagtaattaaggctccacatttctgatttgcaggaaactgcgttatgcatttcccttggatgaaaataagtaaagaggataaaggaagactctcaaattgcagtctgtgtgacctgtttttgaataaacataatcatattccacagtcaattatctccaaagtacagtgtgttctccagccagagcgagagagtgagaggaagaatgtcagttagaagtggttagagaagaggacacatgcatagaagtgtacatctttctattgtcctctgaaaatttttatacgatttgggaggggttagtggggaggattatacagtatttttatgtgatttcataaatgtcaaatttcagtcatcagtaagagaggcaagcacaggtaggaaaacaaaatgagatatgttatgttcagcacagtaataaggctcctaataccaaaggaaaaacaagtcagtagttacaactattgaatagaagtggtctaatcggagcagcaggatgcgtatcccattttattatggcttcattatgtgttttgcaaggctctttggcttgccattaaaataattttgtgcagcagcactgtgaggactcagaatccaggagcgtaactattattttcttttcttctttgttttctttttgaggtaaagttggcagcaaaggaaggtttcggatggaccaagtatagacacaacacttctgttaattcacatggggactaggcagcctcccacaatggctgtgacattcatcctgttctgatagaaactccctgctttctgtgtggcctgggatttgaatctggaggtctttgatccttagcctctcccgtggctggttaccggatggaacggacctgatctttcatttcccaaagaaggcctattaccatcagaagcaaaccgcatccttgcttttatagcagttgcgcttgataattattggtgatactgacatctgcccatgcttacttcatattcatgagcctgaagtggaattttttttttaagctaacatccccagttttggggaatagagtatttcctccaaagttaaaccctgaggtttatttcagaaaaccagtagtcaagtacccttcttctcactgagctaagaaatcctcataaattatttatttcccattttagacattggacagtgactcagtgtgccctggaaatattatcactgtattaattttctcatgtggctcagcataatgttagagaaatggatagttacaggtccagacactataaagatggagctaaatattcttctaaaaataggatgtttggttaacgtttagtagtcaacaactttcctgaagccacacacagtgccggactaagaaatggaataaatgtcctcatacagtatttggtgaagtctccctttaggagattaagcttttaatgttaaagattcagagtattttagctttatccctgagacttattatttgacgtgatgacatctttaactcaagaggtcaacaattgggataaaatgccatgctgtgggtgatggacgccataaaagtaacctgataatcggtcgggtgcggtggctcacacttgtaatcccagcattttgggaggccgaggcaggcagatcacctgaggtcgggagtttgagaccagcctgaccaacatagagaaaccctgtctctactaaaaatacaaaattagctgggtgtggtggcacatgcctgtaatcccagctactcgggaagctgaagcaggagaattgcttgaacccgggatgcagaggttgcggtaagctgagatcgcaccattgcactctagcctgggcaacaagagcaaaactccatctcagggaaaaaaaaaaaattaacctgataattgagttttagttataaaagtgccaaaatgctaaaagaatttacagtttctgaccactgaaatattttgctctagcctgggtacaagaagaagcgagtttgagactaggaatgaatgagaggaaacttttgattcttactacataggttccttttagaattttgaatgtttagagctagaaattgaatattcattattctagcccagacattttacagaggagaaagtcaaagtttcagagatgaaagttgtacccagggccacacagttaggttgctgcaaatattaagagaacttacttcacttaatttggtgcatttttattcttctatttatagacgagtaaaatgtgctgagaccagtgcattttaagctccaagactgtcacttcttcatttgtcttaggcttttagattcaattaaataagtaatgcacctaaagattcatcagctgggaatactgtctcaccactgaatgacttaagagagataatattgccttgctgaagacatattataaaaatctgagaatgagcatgtgtgaagctctctgatactcttacaagaagtgaagtataagtagttgtggattccttcaaatgaaacaaaatttttctggacgcctttttagatagagtatatgcaacccaggagtatagatgtgatgtctcctgtcctgtgcaggagtataaatgtgatgtctcctgtcctgtgctcaggcaggttaggattctggcagaccatgagacacccctgagccatcactttaaaatgccccgtatttcagtagcgtctatgtgctaggatttctgtttgggagtacaaaaagcaatgagattgtttttcttgagtaacctgaagtctactgggaagaacccagtggtaacccaaatagctatgacacaaggtagaaaatagtaccaaggtagatagagataaaacctttgatacttaaaggaagacagaaatactgctgactgggaattttagaggaattttcatgaacaaagatcagtaacatcatccactatccatgaaatattgaactataaggcagttttagtactgggaaagaaaaactacatcatacctaccagtaagaatctcatgatcatcatattttaataaaagatgaagaggtaagatcgcttattctgtgttccaaagaaattcctggaggagaagggatctgagctagactttcataaatagagatgatttggatagaagaacaatttagagcatcctggtttgaaagaacaaaaggatctaaggcagtagccctgggaatgtacttcacaagttcaggatcaatgagtatccagtttagctaaagaaaacaattctagtgaaagaagtaaacaaacgtttggtaggatgaaatggttccatcttatggagaagcttaaatattgatccaagaattttgaacaccctagtggacttcaggagaaccttgtgactctgagcaaagataaaaataaattgatatgggaaatgatgttcctttcagattagagaaactcctgaattaatctcaaatttggaggccgcttagtataacaaaaaagtatattttcaatattgctgatatgtaatctaagaatggttctctcttcctgtcactgaaattcatctattatttattccaagctttaaaaaaaaagtactaaaataaaattgtgtgattgagcattgcaaaagagtgggtttttataatgtggaagccaaaattttttatcagaaaagaaaagagaaaaaagaatctatgctgagaggagatggccaactactacatagatttattaactcaacaaaagggtgaccagttcttccaaacctggtatttgttggtcgtatctattacaaggtagctgtggcttggtgcagggtgcagacaagagagggaacaggaagaaagagattagtgtaaactgtgaaatcaggcaaagctagactcaaattttgtctctgttttctagtaactatgtgtgaccttgaattattgaagctctctaaacttccactttcttgtttgcaaaatggtacgatggcatctacatatagaattatagtaaagagtaaatgagaaatacatgtgaatacctagccgcttctggaaaatagtatgtactcagttactggttatttttattatcgttgtaattactatttccagtgatgtgatgcttattaccttccaaagcaagtacttttatatttgaataagtgaaagctctttcccattatttctaaacccttgtcctacttctcagttctagaactttttttttttttccttaatggaaggaaagaaataaggaagggttggagagagagagagaggaaaagcacctttgtttgtatgctttctttagatacgttgaagacaatactcacaaatctcttcagtcgtctctccatttggatggccatcctcagtgcttaagcacttcttcataaatatgattttcagaagcatctgaagcatctgtattcggggtcctgtcctcatccctgttaagaaatataaggctcaaaatcagatgttgttatgtgaggtgtggtctcgtgcatggagtacaaggtcacttttcattaggagacaaatgcgcagtaatacctacagtgtgggaacgtggatcccttctctttaatatcagttttgccagtgccctcctttgtaacccagagtagcttcagataaacctactgagcccttcttttcttgttcataggaaaatatttttaaagggatagtgcatttataagaaaatttttatatacttcttttaccctgagaggattgcaaagtttgtcatgccctgattgacaaatataagttcaaaaaaaaaaacagaaaataaattccttaaataatttatatcagacaaatggatctgaatctaagcaaaattttcaggaaaaaaaatgtttataatcattaggtaaaagtagaattctgaccttatctttatattttctttatattttaaagctttgcctacatattccaagacttggctttcagttttcctaaatctaaacagagaaataaatgaaatcatgtctaagatttcttccgattttgacattgttatatgtccttacctgtaaaatgaagaaaatattttttctttttatcagggttgttgttaggaagaaatgatattatggatattgtgtttcagcctgctagggacagatactttcatagcttcattcattcaccctagggtaaaagtatcagtgttttcttctttttccttcaggatttattccttagtcagggagtgaccaaggatggtcagccagaacctcagctggtcacctggagcataatatggtaaacagaaccatacccaaagttctgtttacggaggcagtcctggctaccagtgaatgatcaggaaccctataagctagcccctggaagaacaatgatgctgattttatctgtaaaataattctttgcatacaaagtactataaactcagttggttctccctgcatatttttgaatgattgtaggcagagtttttgttatctgttttactaatgatgcaactgaggcccgcaggagtcaggttgcctataaaggcaaggatgtgcatatagaattacccaaagcaaattggtattttgtggggcacaacctcaaaaccactgatatcttgctacatttaagtacaaaaagctcctatatgccacagaattagaacattaccagatcttaaatgttccttagaaatcacctcaactgatgccccacatttggcagaaagccaaaaagtttctcagctaggaacaaaacacaagttccctttctatcacatggtgctgaagcttagatgcataaaccgaacaaatcatcaggaagctataaaaggaacaaacaaatacagtctctggaatcattgcaacctcaatacacatctcattgccacttcctggacatttgtgtctagctaggttgcttcccctgcctgagccttactgtgaatatgtgccaagcagagtgttgctgttaattgagctagataacatgccagtgtctggcctagttcttggcccataataggtattcaactaatatttacttcttttcatccactcacccttcttcttaacagttggaacccctgttttgaactgttcacttctactctggatttccctgtgtaagctcacttgcagaagagggtggaggtgaacacactgcatttcccaccatccagctctgacctgggcccaccctgtgcaggactctgctgactttgggatgccagctgtggtcctcacacagggctcactgtatccgggggcctggcttgatccggtaaagagcgtctgctgcggtgcctgatggaaagtgcccgcttaattgggagatagggcttcatgaatggatctttcattagttgaaaaaaaaaaatatttgcctgcaaggactgtaaacagaagacttgattcacttgttccttttctcctgccctctcttgggttttgtttgacttagcgtgtttatacctcaggacacagctggtactaatgcctttccaaggttaagaaagctttccctgccattccctatggtcccctttgtgtactttcaagagacaataaaggaggtgtggatgtgagacagagagtgcattcacattagtcctggctattatggggacctcagaacaagcatcacctccaccctgtctgcatggatttaagagagagcatctgagcacctgagcttacctcaaacacgttctttgaagaagagtcactgccggtcatttctgtaatgtatcacagctgtcctgacctgatccttctctgctctatcgtggctactttagcatatttttctcaaaaagtgttcctctttcataattaaaggtgagggaagactggatgaaaaaagctgtgggatatggtcagcacataaggcctgtggtcaaagatgggtcttcagttacatcgtttggtcttactaagcctcaatgttctcatttgtaaatctggaataatcattagacctttttcactctgcttgttgtgaggttcaaacatgagactcaatgaaaaagtactttttggacaatagaacactacataaataggaaaattttaatggaaccttcctcatattccattaatatgttggtgctctgcattatagtagtactttagttgacttgagcacatgatgtagttgactttagattaaactttcactaagtattacttagaaaaaacgagccatcatgtgattctacagtctttatgggctacatagggatggtgaattcttttcaccactagcaaaggctcctaaaggatcatgccttactcccactccatagatgaagaccttaggcccctgggaatccattgagctcacagaggtttacataatgccaaatcaggatgggaagttagatcctgcttagtgctcataactggcttatgaggtttccatttcagacaatgaatactcatcaaggaggattggtggggaaccatgagctgttcatgtgtactgctgcactcacgtcgtatccagacacccagatatcatctctggcccactgcagtaagatctctgtcttctgtcctgtttgtctctccttcattcattccttcatttgctctatctagccttcatacttcttgaatcactttgagtatggtacccttattttaaataaatagtaccctcatttgggtatttgtttccagtgttcctgaggctggggaatttctccagagtttaatgatgactctggtgctcaagcaccaagaaaatttccacttgagatggatctggcactggaggtttattttttcccctttctattttattgttggccagtttgggccagcatgttgctaggttgtattggtttcttagctcttgtaaccaagctaagatgcacatgtcaaaaaatattttttcttcctctctaaaaaggtttttcctcttttctgtaatgcttcaggaagggaaaagagtgtttgcttgattctaattctggcatatgaagtgtttgctacaaaatgtttttatcactgtgttatcttgtcaaagtgctatcgtcattgtcattttcagtttaatagcaggaatgttccattttcacaaaggatattccatattttaagtaaactcaacaaaggaaatttcaaatgcaaaaaaatattgatagtgagaagctaattagtttttttatttctcaaagccctacatttaaaatagctttaagtttccagtatgtcatgctctgacagtagcatttacaggtaaaggatgatgcttaactaggattatggttacattgtaaacactcaagccaaagaaaaatatatccttggacaaaggggttaggatgatttgccagagtggcctccagtgtttggatgacagctacatcactgtgatttaatgcacctttagtttcaggagttgtatccagactagtcctcatctcagcctcaccaaaggggactggacttaaccacaatagaactcagagctcctgcagtgaaacccagtccctttccatgcgggaagtgataaccgcaggtgaaactctgagctagggaaataccatcttggtagtcctgaagtgatagcacttacattcttttgccaggcatccaaaatcctttattcttcaaatagttgtgaaggttttttttattattatataaagccttgcagtgagtcatagaagaaatgcattggggtctgagacagagagagagagatgaaacaactataattcctgagtcaactatgattcctgtcttcaagagtctcatgattaagaaatggagacaaagcagaaataactaattccaacttcctaagctaaatgtcataatgaacaaggaaccaaggaagcacatagaaggcttaggtaaattcttcctgagggaattcctctgttataggtaataattattaagcttccaccttgtcttgtttctatgtctctattattatttaatatttacagctaaagctatctatctatctatccatctgtctgtctagagttcctacctaatggtatgtttcagattaggatagatttctcacttgaaacagtctgtctgatgttttgcatccatccatccattcattctacaaactgttatgccctctatatggcaagcattttgctatatccttactacagaattcacttaggcactaatacctattttaattatggagacaaaaacagctaagaaaatgttatcactccatagatgagttaaagaaaaaaaacagggagaatttcttgaaggtgatgtcaatattatcataaactcaggcagtccatgctgaaaatgatttttttgtgagccagaatcccctgtactcatcatttattccctgatttactgcgttttattctgtatcagatgatgtgctagcataaagcggggacataacatcttctgatatcatgagacattgtttctaaacctcttttcttggtgattagacctatgcttgtgcccatcagagtcaagggttgtggacacttgctccgctgcttgttttttctgctatcttctgtccttgttggttgcattctaatggacctataccaagtgctgtcagaagatgagagactacaaatcagattccacaaggatgttcacaaataataagcatttggttgcaatttaaaattggttggcagagcaatagggcatttgattattaggattttacattatctgagtgacttggaaatagaaaagaagggacttgtattatatgtccagaaaaaaagtccagcaaactataatccataggcaaaatccagtgcactgctgtgtttgtaaataaagttttattggaattcagtcacgcccatttgcttatgtgttgtctatgtctgatttctgtctacttggtggcattgactagttttgagaaaccaaatgacccacaaactttgcaatatttaccgtctctttattgaaaaggcttgaccctctataaaaacgaattaatcctgaaggagaagaaaaaataaatagggaccctaatcatatttttaaatttatacagcatgcagttttgaaacactcagtcaatgatgtagaacaattaaaaagaaaaaataaaacctgggctaagatgatagacaaattccctttcaacttcaaccagtttgttctgaggatattgtgtgcttcaggaatttctgccatatgctgggatattcagacatatataacgcagtctgccttccaggaacccttagtctgttagtggagatggacatagaaagcagcaaatactcctttgtgtaactcatgctgtatatgagataagataatgaggcagagaagagttggagagtagagatggcctggcttttgggaatttggggaagatatcataaaacagtagaaacttaaactatgtttgaaagcatgaactcatgatagacgggcaagggtagaaacaatcgttttatttctagaagcttcaactctatcttgaaatagtttgttgtgtatattagtccgttttcacgctgctgataaagacatacctgagactggacaatttacaaaataaagaagtttcaatggacttatggttccacatggctggggaggtctcacagtcatggcagaaggtgaaaagcacatctcacatggcaacagacaagagaagagagcttgtgcaggaaaactcccattttcaaaaccatgggatctcacgagacttatttactatcatgagaacagcacgggaaaggcctgcccccatgattcagttacctcccaccaagtccttcccacaacacatgggaattaaagatgagatttggatggggacacagccaaaccttatcagtgtgtttataatggcaccacagtttctaaagtattatccattatctttttggtctttataacagaggttggttgtaatcattatctccattttattagtatttcttaaaaggcttcatcaaagcagttaaatgactttttcagggtttcactgcttataagtggtaaaagttacctgaccctacctctgactctaaagccacaggactgtccccttaaatcaaactttctggcctaagtctacaggtattccccagaatttctaattgacatgaaatgcaagagaaaagagtctttgaattttcctgcactggagcaacctgccttattccagacattgccaagaaattgtttttgccactgacattattgcgcatgctgccagtggaagtaatagtgatctggacttcatatgctttcaccgaacatgcatatggctcttcttattagactgtcatagggctcccttactttcaactttccttggaggtttctctattttctgtcctcttttcctttccttgtttctgataccagcctatagaccctctgtcaccagttgggtttcttcatcacatggttttctccttctcaggtggagttttggccagagggaggagaatctgttcaattaaacagattctgtacaacagattctgtataatgcaaaacagaaccgattctgtaaaatgcaaaaaaaacccttttctcttgcatttcagatcaattctaaattctggggaatatctgtagacttaggccagaaagtttgacttgaggggacagccctgtggctttagagtcagaagtagggtcaggtaagttttaccatttataagcagtgaaaccttgaacaagtcatttaactgccttgatgaagcctttaagaaataataattaaacatcccctggtatttgagaaaagaggtatcccaagtcccaccgtttaccaggtcctattactcacaatgctggtaaccataggtctccatcccttatgctcactcctcttaccacgccctgtctaggagctacttctacatttatgtgctcagtcttctatccagaaccctacccccaaatgtctaagctcctcacacctcagttctctgtcttgggccatggaacctctaacactggtttggaagtgtgtgtctttttcctcaggcagctggagcagagactgattccactgccaattcttgcctcaagaagagttgtcttgagacaataggttgaagctttcactacatgttcttttagcaaaaaattataaagcatagaggttgagatgggctctggaatcagactacaaagattctgatcttaatgcttcagttataagctctggatgttgagcacctctcctaatctccccaagcatcatctactgaaagggggcatcacaggacttccctcattgagctgttgtaaggattaaatgagcacatgttaagtttctggctgtgtaagtttttgttattacttttcttttgtacttgaacttgtcataccatgtttctattttgggttcagaaaatatggttaacataattataggtgtaatagaaattttggattagcctgtgaacataacacacaattatagcactgttttttttaatgagagaatgaattcctgagttctaaacagatgagttacaaagaaactcttggactgaagtcatccatatataatagatggtccagtttggagtagaagactgactgtgaaagataattgaaagtctgcaaaaatattttttactaaatgcactgtctttttgagcttgcattcataggcacatctaacgcacctgccccaatgtaaccaatcaacatcacatacagccctcagttactaagtttatgaggtaaatttattttccttcttggtttttgtttctttgcattttgatctttttatgtctttgtttattaaataagaaattagaatctctgatcagtagattggctaggatctgcttatgagtcttagatgcaaaactgacaaatctttaattggttgtgccatcgtatctgtcctcaggcttgttagctaaagctcagttagtgatttgccaccactgccattgcttggtggtagaatagggtaaaggattatcatgccagcatcccttgtccgctgtgaccttagtcttagtgaacaaattttcttgtgtgctttctaaaatgcccatgacccttatttcatacttaggaaatagaagtcacaaagatttcctgaggacctcatcattatgtggagctaggaaaagtactgtggtttatagctctgtggtttacacaaagggaaatccaattgatttgcacaaatacacaaaacaaaatatatttaagtgccatgaagagaaacgatgttctttaggaattaagaggaggttcagaaggaaaatggtgttgattgaatctggccaactgagcttggacaatcagtgacctcagggaaaggagtgttaggaaagagacattcctgacagaggaaataacataagtagacagggagatagaacattctggaaattgaatctgtgttaaaatgccttaaaaatggtgcatcatacgaatttagcgacatttcacttcaagattcttacataccttagggtgaaaatcaacaaagaccttaaaatgcagacaattaactctttttctctgtgttgtgtgtgtgtgtgtgtgtatgcgtacacacatatactccacatatctccacaaatcaatgacaatatcaaatggagcaattttccacaattttctccaagaaactgcatgcttaagcactgcactcagcaaaatgttgtaagtccatcaatatttctcagtcttgctgagtttctgcatgacccccaatagcttacccagtctcttcctctataagtaatgatcgcagattctacatctgcaagtacaagaatcctttcacaaataaattccagaggactccaacctgcagtgtctttagtgagtcagaaattaggaagatagcttcaatttggttatacccagcaggaaggaaacaatcctaatcatactaataccaatggaatattgtagtccaggagtttgatggagtttgaccagcatcctttagaaaggaaaactgcataaattaaataatttatatggaacaaacatatgtgtaatatgcatgtaaaataaaatggcaccagttattaatcaggtgaatgcatatatatcatagagaagtcaactatgaccagaagatacaaaatgaactgttctttaggctcatgttttgttttgcaatacagggcaggatattctctcttcctttagccttaactgatctgcttccatgttctagtcacttgaacattgatatgcatgtaaaataggcccctgttcttccattaactagaaaataaaaaagtgcccagaagggaagtttccatttctagcagcacgtagaaaagtgccagagtttgatcaggaagtggtatcagggtcaagatgagggaaaggacatcagaaaaaaaagtagaattatcctgttcacttcaaggaagacacacagcataaggcgggttttagaaaaggattaagagaaaattggcagacagaattagggagattgcttaatcaatatcacaatataacgatgctgggtagaagatgcatggaagaagcatggattatctcaatgacgattttattttgaagatagtgtgattatcacccctggggatgctggaacattacactggggatttagtcaccaactgaagcagatctctgggttgaatagatcaccatgaaggttgtttccaaccttaagttttcttaaatttcagaagttcaatgagttcttctccaaggatcaaggaggatatctactagaaatctactatagaatagagagaattggtctatacacaagtttatttaaattaaataatcctgataccattttgaacttttcagtcaaaacctaccatatgcacctcttaccagtgacttcagtgcttccttatacaaggtgcaagcggttctaatctcacattaaaaaaacactttgggccagttgcggtggctcacaactgtaatcccagcactttgggaggccaaggtgggtggattacctgaggtcaggagtttgagaccagcctgaccaacacggtgaaaccccgtctctactaataatacaaaaaaaatagccaggcatggtggtgcatgcctgtaatcccagctactcaggaggctgagacaggagaattgcttgaacccaggaggtggaggttgcagtgagccgaggtcacgccattccactccagcctgggcaacaatagcgaaactcagtctccaaaaggaaaaaaaaaaaaaaaacactttgattttagaaagaaggtctgtgcccaggcgctcccaggtgctgccaggcctcagaggaagggttctgaagacaaacctgactgcctccttccacatgctatgtctgcaaatattggctgccttcaagctcacagcctgtgacagcaagttggtttcatttcttaaagttgatcttcaaagccgtgaagcaatcgcaaactgtttgagatcccaaatcaaagaacagattgtgtagactcaaaaaaagcaaacaaacaattacatttaaaaacaaagtgttggaaaaaaccagcaacaacctttctgctcacctgccaaggccttgtggctaagcttctgtttttgccaaattgtagcaaatcacatcagacagtgtccttcttgtactactgacaggtgacccatttcctggtggttaaatctggagggatttgggagttcttgctcttaacatgactttcccactgactggatttgtgattgtaagcacatcacactcatttcctccatttgaaatgcaggttctctgaagccttctggcttgaaggaataatagtgagtaatacctaacattggtattgcacagcatgccactgagggctgcccaatagctctgtgaaagagatgaggaaacaggattagagaagggaccagctcacagtcacaggactagtaaattatgaagtgagaattcaagctttccaatatcccttgttcttcctactacatgataccacttctagctaaccactcattcagtagctcttgaaaaggatattctgttacctcctttgaagataatatttgatccctactttctcacagggctttccaaatagagtccacattggcccatttccatggaacattttgctggtctttaggtattttattaattgctgaattgtttaggggttttaagttgtctaaggagactatatctgaattcaattatttttttcctctttcccctcgagcatgcacattctttgtaatactgtagtgatgtataagttttcaagagctgtcaaggtgtatatatatatatatatatatatttccaaaagcagatagtatagtacatttactacagttgtttcactttgatatggataaaaaatgtataaaaaaggcaaagaattctgtgagtgtcattacaactttaatttcaaaatttttgcccttatgttatttgctatacttggctttcctcgacattataaatcattgatcacaggctggtataaatttagcattaccagtggattctgcgtatttgatatgctctttttattttggttttgtcagtttgctactcgtgagtttatctttgaacagcttcccatggctatgggattaggtctgtactccagagcctgatatctatgggcctttttttcttagcctttctagtctttttaccccatatttcttcatgatatccatagtttgtccaacctaaacaaagagctagtccccaagcacactaacccgttacattcatccctctgcttttaatacaattgtttctctatagagaatacctttaaaaatatatataagttggctaagctcaaaaacaccacttctatgataatactcttacagattcttccatttgtaaatatgcatgctcatagtactcttacagcgttggtcctctcttataacattgttagagtagatactgtaaactgaaaagtgacacataaaaatacataatggtgcagctcaggtatgtgtcatcttaatattcctattaaccttagaactttgtgactgtgttgggattacttgacatatttgtttatcaatcaacacagtgacagtgacgacgaatgagtaaccagtgttttgtttttgaaacatttgaagaagtgttccatatttctgaagttattagtttagtttagtttagtttagtttagtttagtttagtttagtttagtttagtttagttttaacgacagagtcttgctctgttgcccaggctggagtgcaacagcgtgatctcagctcactgcaacctctgcctcccgggttcaagcaattctccctgcctcagcctcccaagtagctgggattacaggcacctgccaccacacccagctaattttttgtatttttagtagagatagagtttcggcatattggccaggctggtctcaaactcctgacctcaggtggtctgcctgccttggcctcctaactgaagttatttttttaaattaaactaatacatgcaactggcttaacaaactaataggactaatgagtctaaaacaaacgacataccctccgtgcttctcctctctccactctctcaatcctacttcacgaaagacactcttggctgcttcttcctggcatttgcacagcttcatgtctaaaacagaaatgcatttctatctttggaggcataaatcttagacattatctgtggattaataacacaaaagacacggatatgccatccatataaatgtttgactgtttagagcttcctactctgggaaggattgacccatctccctccaaaattgagaaaagggactttcactggacattatcttcaagtccttgcagtgttccagaaggtgtgacaatctggtcctttggctggctgcattactgacctgctgacctgctgttttaggttgattatatttgcctttgagccaaaagagttacttgatgatactccagagccccatttccacacaacacttaggtttaaaagctgcaaaaatggatttaatgaaataatgatggagtgatttgaagatttttcatgtctttcaggaaacacaaggtgctcttagtgaccacagagctagcagcctcccctgcatctcaactttatgtttccaaatatagtctagatgcttagtaagtgttaaaaaataatagtgcatcttgatgcattctttatggtgtaaaataacctgttaggtatcagggataatttttcttcagcattagatggctgtttatgtatgatatatttctctgtgtccctgggacctaatgatcgttgaatacaggtgaatagaatgttatacagtagatggaacatgattatcaaagtcaggagacctagactcagttgctttctagcaaggcagtcattaattacatgttacgtcttttatcagaacctcagtttggatctataaaataggattactcatttccaccttggaactgtttttatgtaaccatcaagtaagccggtaaatatagttatctgtgtagttaactagctgctaacaaaggaatccagggtggcctttaatatatgttcggaatatatttattcaacaaatgtttcttcaattgttttccaagttagatttataaaaaatgagagcctggcaggcaagcaggcaagttggtagcttgggatgggatccactacagcacagaagtgcagccagagacttgctcctaactccccacggattgctacaaatccttgctccaactcgcagcttggcaagggatcttgctatcagccttctctcatggaacccattgtgcatatgaatatttgattagcttattccattttcattttatactattagttctccttgtggggttagatcctatgcacacacacacacacacacacacacacacaccatttaagaataggaaactattttgcaatctatatgccctctgcttgtaattgttactgttcccaatccatttcctcctcattctttgtctctcatccaaatggttttcactttatgtgtaacaggagtgagcttattctgaactacattggttaggtcctttaaagcgtaagcacgagagaataaaatgaatggaatggcacagagcacagctcacatatttgttttttagttttaaattctcatttgctttttagttttacacatatttattacccgtatttctcatagatttgctttttggttttacattctctccttacttttgccttggttctcctgatgtgtgaaaatgctcctaaggccaccaatcacaggattgtgactccttccccaactttgtttacctacaataattgcaacagcatgatattgttcaatgttggcatatgcaaacagaaaacctaagatctggggagccaattctttgcagaaggtgcttcaacctatctaaaagcaaaaacattcaataatgtgtacatgctttaaggtgtgtgtaatatttgtgtgttcattatgttattctcatagtcacaaaactcctttcaggtaaatatttgttcccattgtatgcatgtagaaatcaatgtttagaggggttgttaaatagctagttaaaatcagaaccaagaatcaaattcattatttctgtcttaaacttctctttcaactattttaggctgcagtagtaagcatcatatgacttcttgtcatctctagtgtgaaatggttttccaaagatctgtgtgtgtgtgtgtgtgtgtgtgtgttttaaataggcattttacttttaaaaggaaggttcacagtcaaactgagcagaaaatacaagcaagttcccatatacccccatccccacaaatcccacaaatgcatattctttcccactatcaacatctctgacgagagtggcacattagttacaatcgataaacctacattgtcacataattgtcacccaaagtccatagtttacattagcattgactacttggtgttgtacatgttgtgggctttgatgagtgtgtagcatttatttcccgtcatagaatcatgcggaatactttcactgcccctaagaattattcttgctctgcctattattactttctcccccaaccccggtaacccctgaaatttttactggcttcatagttttgccttatcagaaatgtcttatagttgggaccctacaatatgcagcctttccatattgccattttactgaataatatacattcaaggttcatccatgtcttttcatggcttggtaactcatttctttctaatgctggataatattttattatatagatgtccacagtttatttatccattcacctcctaaaggacatcttagttgtttccaagttttggcaattatgaataaagtcgctataaacatccacgtgctggtttctttgtagacatatattttcagctcatttgggtaaataccaaggaatgtgattgccggatcgtatggtaagagtatgtttagttctgtaaaaaactgccaaactgccttccaaagtatctgtaccattttgcggtcccacctgcaatgaatgcgtgttcctgttgctacaacattgtggccagaattttattgtcagtatcagtgttgtcagacttttggattttgcctgtggtagcaggcttatttgcttatttgccatctgtatatcttgtttggtgaggtgtctgttcaggtcttttgcccatttttaatggttgtttttcttactaagttttgagagttctttggatattttcaataataatagtcctttcttaaacgtgttgtttgcaaatactttctcccactctgtggcttgtcttctcataaacgcttgacaaagatgcatttttgacatgcaccctgcctcatctatagcatgtcttcaaataggcttaagcgactaacttgagggaagctgatttatcttggagaactcctaactcatttttctttcattcatttaataggcagcagacttggggatataaaaggaatattctgatgtttagttagtgcttaattattttgcattcttaagtcaagcttttgactgttattgcagtgcacttgcacaaacatgaacatttcaacatctgctgttagtgtgaccagaaagagagagaagagaaaggaaaagaagggagaaatgttgactcaatcctgtccttatgtgaaacaataaaaatattttaaaactttctctcagttatgcgacatagtgcttttctattttttcctaaactggaagctccctaaggggaaaggatgcatctcatagaatctcaaggtgctcagcaggtaatatgcatttgagcaatgtttcttgaattaaacttgctagccttatttatcctgaagtgatataacatcgttgggctgcttcaaactgcctttatcctgatgggttcaactggcacaaacagttattaagatttgggagagtcagaggtcccatagataccatggactttgctgcatctcagttcttccattgcatgcctttggaaatctttcctgctggtgaggttctgtgagggactgtggcctgatagaatttgtttcatttctgtttgtttttattctttagaaaggcagagtagaaaaaacagtttaatgagataacaaatagaggaaaatactttggacttactgtttaaatttaaaggttgactttatggtagctattaatagttccaacatcttgttgaatacccaaagcttaattatgtaaagagcttcttatttcctctctcctgccccttttcttctccatccccttgcaaagcaggcacaaaaattaaagctatttagagatatgtgaatcagcatattgcctatatctaatttatctttgtgcaatgcacacattcgtgaatttctcaaagccatgtgactctccagaaatctttaaatatgtaaataatattataacgtcccttagtgaatagcagatgcaatgcattattccaggtgtctgagtaatgcgaagaaaagatcaaattccctgttgtactacctgtgtcacatgttacattaataaacacagtcagcttgcaagaatagtatgttatctgaatttaatgaacttctgaactgaatggaatgcatctaattgacaaactgtcatcaaagagaacagaagacactacaaagtccaaagggaaagaagaaacaagtggggagaaaaacaaacaaacaaacatgatgaactgtgggggctgggattaaaatcattggaaggcatctctgtgtgaatgtgagcctgtgcagtaacctgcacgtgtgttgatgcctggtggtctttccatgtgagacatcttggatctgattaaagggccttgtggtgtctggcatttacagctttgtatttcccttaattgcatatacagactcaagaaagggatgggggagtgtcacataaaagataatccacagcaaagatctcaagctgttaggtaaatgaaatgtttccacaggagggtttatttttgccttcaaaatctcctggtacctgataaattaaagataaaactctttcaaacaagtttttacttttcttttctccacctcccatgctgtcatattgagtgtcacgtacatcgctacttaaaactccaacgggtagagtggctattaaattcggtctgtatatacatgatatatattatgcatattttcagaacatatgctgtgttaccatcttctgacccaaagagaaaagctgcagtaaggattttttcaggactgtaattgggcaaatgaccttgtaacgcagtggtctccgacctttttggcaccaatgaccacttttctggaagacagtttttccacgaacccagggttggtggggtagggatggcttcagtatgaaactcttccacctcagattatcggcattagagtctcataaggggcatgcaaactaggtcccttacatgcgcagttcacaataaggttcgcacccctatgagaatctaatgccaccaccactgatctgacaggaggcggagctccggctgtaatgctggctcgcctgccactcacctgctaggaacaggccaaggaccactatcagtccatagcctggggactggggacacctgttacagaatttatactgttaaatgtcacttgatatgcacactaaacctattacaaaccacatattgtcacttgtcataattggacagagctgcagtgaggttttggttttaagtgccaactcacctctaagctttttcagatccttgagctaaaagtgtcctctttctgaaatcctattaccatttattgtatatctttaatgaaagttttagtcttttccttcatattaatgttattcacccatttggcttagcacccctcttagagataaagctctgtgaagatgtgtttcttactggttcatttcggcatgccgctaaatgtgtaaaacctagaagatatcccatagccttgtttgaataaataaagttacacatggtgtttcaagttcacctatttctttgactaccaaaagacttctggttttaataaaacaactgtgaagttcaagtcctgtgtattctaacactttgatttactcaatggcctgatagaaactgtttttaaaaattatatttacccttagcattttcctgagtattgtctttagctattggtggggaagatggatatatgtgtatgtgtgtgtgtgtgtctgtgtgtgtgtgtgtgtgtggagagagagagaagagatacatggacccattgccacaatcttttaattatgtgaaacaaaaaatatttaaataacgttgaggttatccatatcttctgtattatattctgtgttactgatttttttggatcaaatagtgatttttcatgagctaggtataaaaatattaccagggactaaaattaggggaaactgggagtaacttagagtgtagccagttgtttttctactggtgctaccggcattgaaagcaagagagttcctccctgtgtggggatggcctgtacatggcaggacctgagtgtgccaggtctccagcctttacactttggtagcatcttccccacacacccagtgtagtacgccctctagagggatccatttcttcagtgaccacgtctttggagagccactgtctagatttttagtgcacaaaaatggagtgtgattaagggttttctgaggatggtgtattgttttatgttttctgttgctccactcaaattcaaattttgctgttagacttatcattataatgaaattgaatgttggtaaatatttttgtaaagtatatgccccttttctgtgttgaatgggctacaggcattcaataccccgtaatacccaaaatatcattaatttccagaaaatataaaattgtcacaaaatctaaaaactggaatattaggaaaaaggaaagaatggtttccataaatcactttgtttaacatagtttctatgtgtttgtctgagtagttgttttattagaaaattgtaatttcctctctaaacagagcaaacatattccctcttcttcttcttttttttttttttttttgagatggagttttgctcttgttgcccaggctggagtgcagtggtacaatctcggctcactgcaacctccaccttccagttttaagcgattctcctgcctcagcctcccgaggagctgggattacaggcacctgtcaccacaccaggctaatttttgtattttttttagtagagttggggtttcaccatgctggccaggctggtctcaaactcctgacctcgtgatctgcctgcctcggcctcccaaagtgctgggattacaggcatgagccacctcgcccggccagctaacatactcttttgttcctaaatacagttttaaaagcacatgtcttgagactaacttgtcctttcctttgtaacatcagtcagttttgttaacaaagtaagtgaggaactataaagtttgcattttaggaaaattttgcatttagtatataattttatcttagcctgtgctttatctggcaggatctgatccatcctataattctacaattagtgttttagtcagaaatgcagtcatttacatttatccctttgacattttgccattcttattcatttatccagtcattcaatttcagaatactaactttgccagatactaatatcaaggactggccaattcattcatgagtagatgaataacataagtgtcctgactcaaggagcttgtaaactaagaattgtaatgttataaactatttatatttctctagtattttacaaattaacaagcaaaattgtgtgattctatttgtagtcaagtgacctcagaagctattcagtcttcaccatttcctaacttatgacttgatctcattctagccagtgacgctctatagtattatatttattatgtcatccttaacggtgtggaagttgaaggaccagaaagattcacacagacttgtctttgttcacaggagtagacccatgcctctagatttaaaaggttcatcaaggcagtataacttagtagaaagaataagaaactgtaagtctggggtgggatctggcctcagtaattctctggctgtgtaaacttaggtaagatgcttaattttaaacacagtatatccttctttgggaaatagaatataccttacggatttctttataacaattatttttcaacaggaaagaaggaaagagaaatgcttgcatggagccatcatttattcaacagtcactcatcaaatacttgttgaatgcttactcggtgccaatcacttgtccacacactggaagtcaggagtaaatacaatcataaaaattcctgccctctgggtgcttacatttctggttgtgttatgctgcagggagaaagaggagattttcaaaggtaatagtacctaataccatctgaaatcctaaaatttctgccttactgtcttccacctaccatccccattggggaaaccttaccttagaggaggccactatatagtggatatataatagtgtttgtattttatatcttttatcactgttttctgcacacagtaaaacagtgataaaagttatcactttcttaagattttgaggttgctgtacattctcatttgtgaacaaaaactttgctctgattacgtaggattcatttaaaatccatggaatcttttgacactgaagttagaagttcattttatcaacaagtgaaatagtctcaggcacaaggtggaaggatgtgagtcctaaaatcttcggtaggagttggctgggcgcaatggctcacgcctgtaatcccagcactttgggaggctgaggcgggcagatcaccaggtcaggagatagagaccatcctggctaacacggtgaaacctcatctccactaaaaatacaaaaaattagccgggcgtggtggtgggcgcctgtagtcccagctacttgggaggctgaggcaggagaatggcgtgaaccccagaggtggagcttgcagtgagccgagatcacaccactgcactccagcctgggtgacagagcgatactctgtctcaaaaaaaaaaaacatctttggtagcagttttacatagattcccttttgacagctcccaccccagcaactctgtaccatagttattggtaagcacatcttccagatgtgggaactgtggcttagaaatgctatgaagccagttagtagaagagctgaaattagaacttggtattctcaacctcaccatctagtgtgctaatcttttttgtttttgtttttcttcctgggacagataccatttgtgacctgttgagtgagactgatttagtccactgtgttaacaggaaagttgttatagtttttttttttcttccgtattgtttttaatggcaatgtaaaacatgtgaatctgaaaagagaggttctgagaaatttgtgcagctcctttttccaaataaaagatagatttctcttgatgaagccttgatggttggaaattaagacaagaactgaaagcaaaacagcctactcaaggttagacagtgactcgagtcattccatgcacttaaacaatatttaggatgaccctatgtaaactcacattatcacttaaaagccagtataaaaatactacccatctgctgtgctagtcctgctgttgcttgccacatttctctgacaagctgttacctcagtatatagagagagtatacattttggaatccggagtttaagtttgaaaaaaaaaaatggtatctggtacatatggactagattctgttcttccaaatgtagatttgtaacctcatttattcttaaagatgatgtgttaagttagctttttttcttgactctgaagattgaagctcttataattttatgcctggacatgaacaatgtacaataggaaatcatttagtttacactcgccatatgatatgcaaagtgggtgttgggaggtgtttatatcaaacaccataactaagttctaaaccgctctctggaagctatgtaacttttcaggtattaaaggtttggaagatttgtaggtgcagtatgtataattgcttccatacaagtaattttttagtgccaaaaaactctaattccataatttccagtgccattataacagccgagatgtaatcttccttcttaataggtatttgagcagaagaggcaagattgaaagttagatcctcaggcttctctgatgcatcaatctgcggataaagcctttagctaggaattacaatctggagcagacgtgcaagatcactgagtcatttgctgtttttccgtgggacaattacttattctttttctgcagatttcctaggaaatactccaaagtaaaaaatatcaggagcagcagtatgtgatcttccttgctgcttattgttcatactctttatcgcttctcagctttttggctaagatcaagtgtattgtttatactgtctccacgattttcctggaaatcctttttggtgaatataaccttgtgcattacttgaaaatgggcattttaatcattttttcattccactaatatttattgaatgatcattatttgtaagatcttaggagacctgtcaaagacaagcacgggctcatcaaaatcttaaacttgtgtatagagtactaaagaaggagcatgtgaacatatgattttcagaaaattgagaagggaagtgagtggggagccctttgagactggacagaaacaagaggaccatgacactgaagaggacatttttaatttcatgttcaccctgagattggtaatcaagagtcttatttactcagagcaagccgcataaatcaaaaccacaatgagataacatctcacaccagttagatcattaaaaagtcagggccgggcatgatggctcacacctgtaatcccagcactttgggaggtcgaggcgggcggatcacgaagtcaggagatcgagaccatcctgactaacatggtgaaaccccgtctctactaaaaatacaaaaaattagctgggcgtggtggcgggcacctgtagtccgagctactcgggaggctgaagcaggagaatggtgtgaacctgggaggcggagcttgcagtgagccgagatcgcaccactgcactccagcctgggtgacagagcaagactccatctcaaaaaaataaaaaataaaagtcaggaaacaacaggtgatgcaggtgatggagatgatgtggagaaatagaaacaattttatactgttggtgggagttcaaccattgtggaagacagtgtggcaattcctcaaggatctagaactagaaataccatttggcccagccatcccattactgggtatacccaaaggattataaatcatgctactataaagacacatgcagacgtatgtttactgcagcactcttcacaatagcaaagacttggaaccaacccaaatgtccatcaatgatagactggattaagaaaatgtggcaaatatacaccgtggaatactaagcagccataaaaaaggatgagttcatgtcctttgtagcgacatggatgaagctggaaaccatcattctgagcaaactatcactaggacagaaaaccaaacaccacatgttctcactcataggtgggaattgaacaatgagaacacttggacacagggtgaggaacttcacacaccagggcctgttgggggttggggagaggagggagggatagcattaggagaaatacctaatgtagctgacgagttaatgggtgcagcacaccaacatggcacatgtatacatatgtaacaaacctgcatgttgtgcatatgtatcctagaacgtaaagtataataataaaaaaataaattaattagttaattaaaatttaaaaagtcacactattaaagttagaagacatgccctgaatcttccagtcaaaattccttgtttacagatgggagaaagagtgaggaagggttttgccaatggtcacatagatgtcaaatatcatttactgagaaaatcagcataagaacccaggtctctctctttttttttttttgtttttttatcactcaagccaatagtttttccacccttttagttctgttatttgtcttctccactgttattcaaggctatctcaggccagaagcagaggtttgaactcttttcagatgagagcatttttgagactgggacctcatgttgaactaaactcacctccacgttggcacgcacgttacttcctcttccactgtataattttgccgttggattaaactcatgtggttggtgctaaggctttgaccacaggcacatttgaagattatacttatttctggatacaacctcctttgcctccaaactgaaaggttggaaggatgacgggaacaaactcaagtcaagggattccaaatggtcacatcttatgaccacaggctttatatttggagcgctaccatgattaatgtgtcctcgttgccatcctaagacttccatcattttcttccattgtctttctgacttcagctccgttgctacttctgggcagttataggtttctaacccaatagggcaatttcagtttcccccgcgttttctacataagttgtcctttctccacatatttgtttatgcagtttaagtcttgccagattgttctctctacgttctaaaatctttccaattttgaaagtcttagatcaagtactacgcagctgaaaatggctctgcctcttttatggcatttaatatctaccttggattatagttattataacgaccatagatactaaaactttgaaaagaataacaatttgaattcctttgtcctatccccataggacctagcattgcctctttcaattaataaatgtgtaaggaataaattattttggcatattatcccttgtcttttaaaagtttcacaggagtccctttgcaatcaagttaaaggctataaaaatttaacatctagttgtgttggcagagttgtcagcatttacttcagtttatcaaacttcaatatttatttaaattgaaaccaatcagccatttttttctatgcaaatcacaaatctcatttattaatgccttcccctccccctttcccttactacatcaataggaagattacatcttgacatgataaaaggagacaagctttcgttaatgttaagaatctgctccatggccccctttgcccagaaagtcatgaattctgataatcaaggggcagttgcctatgttatttttttttaagtttctagttaattatttgctcttccttatttgcattttgagatgtaacagtagagcagtttacccattctctcctgaaaactatgagtctgtttcagacaaattactatactaggcacccaccctcagtggaggtgcaggagactctaggcccggaatgggtgaaataccagaagttgcatttgaatataatattgactaattagtcagccagaaatgagagctctaaacatgctctttttgtgtcatttactgcatttgtggagcatctaattataaagaaaataagtattcttcattggttgctagtaaagctgccactgaagggcaaaaagacatatagcaatcattgtttaaatagaagcgcttgaaaattttccattaattttcgtgtttgcattttgaatgctttcttgctcacacttgaggtatcaaactgaacaagtctgaactgactgcgtaagaatttaaggaagaactgggaggggtagaaatgaggaagctatttgcattcctggaagacaaaactcacgtttataatctttcttgatactaaggcagtttgtttcccaaatgctatttatggtgagctttttgtcttcaaatgtttgttataagactcttttttttttttaatcatccagtgcagaagttcatgaaagaaagtgaaagtgcacccatacccccattcattttccagagcttaccctgtttggtacattatcttgttggctcatgttttgcttggttttgtttatgcaactttttcttattaatttgttgttgtcgttggatggagttagggagggttaaaggactggagtaaaaatgctatttatctttaccccttcttcacttacagtgtgtgtacgttgatggagggggtggtggggatagagggtgattttacctgctccatttttgtttctatttgctgctaccagcttgcttcttaaccctgggcagaggctgccctgcaggcaggagcagaataagctgtctgtgcccttcctcttcctatacctttgaagattggtgcctttcactgttttccaatcgcttgttctttccataagctcgttcccttctctccactgctttgacaacaccttttagagttgctcctggagctgctgccaagacaatagtatgttttctcttttaaaggtctaaaccctgggaggagaggaactggaggaattgagtcaatataatatacgaatcactttatattttactatctataatttagtttttgacttccatttctaaggaaaaaattgttttcttttattgttttttttttttctgtttccattcagcactcgtgtactgagaatccccaagctatattaagtcccatttgggccattaatgtgtgtgcaacatggtctgtctgttccagtagagaaaaaggcatataaataactttcttatcactggttatatgctttgaaggagtacaaattaaacaacctgtggaagttcaagtaaaagaaagcttatttccagtcacgagaagttaaatgtgagctgggcagattcataatagagaagtaccgtttttttgtttgtttgtttgtttttaactctgagggccctgtgagcttggtcaatttacatcatctcatgaatgacatagggccctatatgtggaaacaaataaacaacaacaacaacaaaccactgtagagtcatatcaaagaaaaatgaaggtggtattcatccacatcaatattaagataaattattaaatatttataaaactctttgacagtgtacagcctctataattaatcaatgtagcactttctcaatacttccccattttaattagtaccaacatcaatcataattaggctcatgctttggtctctctgagacttttaaaacatcatgggtagggggcatttttcaggattcaggtatcagctaagagttcatttagccagtagatcgtgaccattcttcctctccctgaagctatgattctggatactgtggctcttcctgctcctccagacatagagaaaatggacaagtttctccttccccattttgagtgcatgaagtgaaaacttagcttgtccagccaaactggaggaaggagaggcgggacttattggagtaactgaaaagagaaaaattggaatatgagcagtaccaatactcagtctcttaaggaagggtagagtccctttctttctctctctgtaatttttttcttttttgttttttttttttcaaagaagattgcataagattctgtctctctaggagatgactgatgaaatataccccctgggtcatttgcatcttactcctttgtagtgtagggaagaacattccaaacccattataagcacttactgttgttgggcatgtcataacaaacacaatacctttctggaatatactgctgagcccttggctttttgctgaatttgcctaaaagcccttctgcctattgagtggccacattctgaactagttatacttggttaagttttcacacagtacactctgggatactagggttgcaacaatttaaaaaagaacatagatggaagctttatatctcaaaagctcctacctttgacttccctgacaatttttccttctcctgctcttcaactctatgtttcccaactttgtttttgtaaacacgaaaagtaaattttttaccattttgtgcctaattcctcttctttctctcttctctttttactcatcacaggaatgtcttagctttccttccttctccaatctgccttgggtatagagtcacgcctttaaatcttttagcataccacaatgtaacttacataaggaaatgtttaatttgggaacctcagttggttttgttaacactgctgcaccgaagctctagctgaattcacataatctcatgattttagtaaaggtaacaaaggaaaactattatgtaagtacctacttttcaacaaacattgggctgggtttcttctttacattttctcatttaatcttcataataaccctgctagataaggtttaccatctcattttgcaatgtggaatctggagcccagagatattaaataccttgtacgagagtaggtgtgcaaagctaaactttgaacctaggcatctctgacttcaaagtctatgctttttccacctcatagaaagaccatccagaagatcaagtgttggaaccttccgaggctgtgacatatttattacttcaaagtttattatcacaggacatgcatgctgctttagcaactagaagtgtgtgaatgaatattactattgtgttgcataagtccttggcaatattactttttaggtgccattctaatcctgccctgtttggaataattgtgattacgagggcataggagtaattcagaaattttttgaagaaatttctccacacagcattagccttagttatgagtataatacaaaagaagaggaccagcactgctggaaggtaaatgaaaagatggaggaattgaacgattacataacagctgttcagacttgtggtactgattagagtcatttgtagagatgaagcagtgtgtctagccagtgtggggtagggtatactgggaaggtctcacagacagagtgaagtgggttacggcaagccctgaggtatggcaaaatctggacagctagcctggatcttcatttttcattagttggcttccttaactgctcaacaagtagaccaaacaaacaaaccacgcatacacacaaagcaaagaagtaaataaagaatggtggggctaagactgtgaatagctcctagcaaattagagaaatagcttcaagtatatgccttctggatgatgtatgtttgtatatgaaggacaacacatcaaggggtgttggtagtaatctgtgctaagcttagaagccagtatatcattgttctagttctatttctactgtcgagtggctttatagccttagacaagtcatgtaaccgttcaggccccaaatgtccttctggaattacagggattgaactggatgaataaaaagttctatttcaactccaacatttaataattctaaagttcttagtgagctctgattgctcatttgcattacataggcatatattaaccattttaatatgtatcagaaaaggtatgttctttttcctcagaaatgttgaagcctgactttgttatagaaagcacccaggaatcatgtcttcagagttcctaatttttagtgttttcttgtactgccccgactgctgcaatcctctctcttacattggaattctgttttaagttttggtgattggaatcctctttttgatttaagagaaagaatcctaggggtgaaagattactatactggaaatgaaagattactagtctctaaatgagaattggctttggtctgtaatagataaaaagatttttaagggaaaaatattagaaaagtgaaaacgtttttaaaaaaaataggtagcagtcaccaccgtattctggtggaatcgaattcttgaagattagatttgtgtattcatggaataatctagacaaaatcctgccttgcacatagtggggagatacactaaaatactgaaacagctacattgtattcaggtgaagctacatagatgtaaataaagggcagccagcgggtacaagctgtcaattaagtgttttcaatagtctactccgtgtcgccacatcttaggtaatttagataggtagaagacaggtcattagcactgaagttgagaacacatttgaactccagaatgggattaatgcatctccaaaaaacgtgtattttctaaccctgtgcaaaaattatatttgaaaagattaaaacaaacaacagttttcttcgttctttgttatatgtctttgtacttgaaaaaggtaaaattctgcattacgttttaaacaaattgtgccagggtaaagggtaaaatctccatcaacatctaaaggtctttcttgttcagaaaatgaaggcccctctcctgcattaaagaccaatgtggccttatagatccttatacagagggaacaaaatgacattagacagactctaaggtgccctcaattattcccacgtggtggtattcatgcctttgtgtaattgcctcccaatgagtgtgggagggacctatgatttctagccaatagaaacagcaaaggtcacatgtagtctttgatgacttgtgtgtgattgtgttatataagactgtaacatttgttctatgaggggactttcacccttgtaggctttaaagaaacaggctgccatgttgtcagctgccacctggagaggtccatgtggtaaagagtgagggcacctagtagctgacaagaaactgaagccatcagtttagcagcctgcaaggaaccgactgttgacgacaatcatgcaaacttgaaagcagatccttccccagtcaatcctcagttgagactgccaccccagcctaactttgcttgtagacaatgagaccctgaggcagaggacccatctaaaccatacctgcacttgtgacccacagaaactgtgggataataaatgtatgttgttttactctgccaagtctttattgttttatagatagctaatacaattatgttacttttagaatctaacattttcttcacctttcgttttctacataatagttactaagtgaatgtgacttgttatccccatcctcaaaatcattaagggtcttttatttaatatttgatttatctgtggctttgtgaaattcataaatctgctcctcagtttctggtatctcttcaggagagatgccctcttactctactgtatatggaagttgaataagattgaaactgatagagaaatacttgttgaatcaagttgaattacatgaaatgggcttctttaaaagctgttattaaatcttcctgtggctgtcctagagatgatataacagaacttctgctgggaaatgggagagggggagggaagcgttccatgagctgctctgtcatttgcatgccagtgaaattaagtttgaatttacattaagaggagttttgaaatttaggatctatcttaccaaatcacaattcagcctaacaaatgttatggaagtacaacaggagcccggactgtccattgtcatctaaatgatggatgtgtttaaggtgtttacatcagtgctgtttctcccacctaccctaggtctgggtggttgcctgggattgtttactcaaagacagtagcttgacaatttggaaatgacagaggacgctgatacttgaaatcaaactgtagccctggaatagcccaaacatggtcccagggtggtcttgcttctgacttatgtggaaacggccaaatcttcaactacattctgtagcttttctttattcacccagccaactggaagatgagtacctatcttggaaatttcccagaagcagcaattcatactttccttataactcttaacacattgctttatagtttctgttccaatgccagcaaagcccctctttgaagactcagtttccgtcatgctgctctcttacaacacgctttcctcaattctgaatgaatgagcagatgaggatgctgaaatgttagcataacaaaccaaagtcttcttctgttgcgggacattacatttaatgtagctttatacagctcagatttatttctataggttaagcattttgttaaactattcctaaaacacttctgaatgggtcaccagaaagaatatggagcaatcaattctactgtaacctagccaggcaaatattgactatttcctgataccagcatatgttgtatatttctgccttactctagtgagcagaaaatctgtgaaggtttttaggaattgcctaaagacacgcagttctcaaatggcaggaaggagagtaaatcctagtctttctgattccaaactttatattttttccattaaatgaatacagcatacttacatacatacataagtaatacatacattcatacatgtattcagctgtgaacattttttgggcaccctcaatggcccattcgctgtgttggatgtgatgagggatatgtagatgaataagacctagatcttgcccttatagggaaaaataagatttaaataggttaaatcctagtcttgtgggaagatagaaaagatgcacaaaacgaaagccagactcaaatgagtaaagttagattataagtctgcagatgtaggtaggtaacctgagctttccaagaactgtctcctcacttgaagaatggcagttaataatctctgctttatagactggttgagtggattgaatgagaacacatgggaagatgctggcatttaataggcaacccataatagaaatgttaacatgtgctctggggtatcttcagaggtattgggagaggagtccctgcctaaggaagaagcagtgctgggcagaggaaggaatgtggacttggattggaactcagtggatctggtctccagtcacccaacaagccatgtgactgtggaccaactactaactgcataggcaccttggattccacaattgtaaaatggacatcactggaaagccttcctcatgaagtgattagaacagatgcagataatagcacaggtgtggttgaaaattgtgaacattcatggaaaagttcacttgttttttttttatttgtttttgttttactgtcaagaatataataggagccactcaatttatgactctgtcctttcacttattattaaaattatggtattccttttgccactcctgtggacaacatagccaagcaaatgagcattttagtctttctcgtcgtcctgtcttagtttgccaaaactttgaatactctgtgtgtgtgtgtgtgtgtgtgtgtgtgtgtgtgtgtgcgcgcgcgcgcatgtttagttgctgttgaaaatatttgaccactatgaggaactggtaaatttgcctgtgctcaggaatacattacatggatgctctggttagtcactttgtactttacatctgacttttcctccatcagagacaaaattaataataaacaatttttaagattttggataaaaaccttattaaaatgcatggcatatttttcttttttcttatggggctattctaagcatttgaaaccttttgatgactcagggtcatcaccatgaccatctattgttatgctctgctgaaactcagtaattttttcctcctatccccccaggctgtcagcggccatctctgctgtcactgtgctgcctttcacagtctttcccactaccttctaaagttcattggttttaatctcctctggtatgaggaagaaacagcaaaattgtcattagaatcattggtgaataggagtcaacaaacattcactagtggcccaaaggagcactcatcagaggaaaaaatgttgttttattttgaaaaattgctattttataaacccagagctgctactcccccttcttttcttctccgttctctttcttcatctttttctttcctttccaaccttcatgaaaactggaaatatggactatgacttcatatgctcttacttaccctctgctgggattttgttctgaaattgtaacaattagaggagtgtttctaaattggatcgcttcagattgtctcagttctctgtgactttaagaacaagctgatttgaagccacatactgttggcagctttcatccatttatttggactatcaagcaagaatgctcacaatctttcatatgaaagaagacatctttatttccagttcacactcttcataataagaagggtatttgaaataaagccaaaaagcataacttacttctctaacttcatatttcagatgcctgcaatagtgggagaacatttttttactaccccaccttaccctcaaatcagtagcagaaaataacagtgatgcattcagacagcaaaaagagaaaataataattttattaagtttacaggaaaggtctcagctttcttaaaagcctatctttaggaagtaagtaactggagctgcacacccaacagaggaagatgactttacttatcatttacttagaaattatctttgaaaggatcattgtgctgttgttagcaaaaaggagcttctgtaaatgtcacctcaaactttgaaatctgggaaagtctcattatgaaacgcaagttttatctttcatactcagcgctggagcactgagtatccttgcattcatgaagactttctggtacagagtaaacggagctgggagcataagtgagaatgcagctccagctgacagacccccagctctatcttcccaggtgcatttcctttttttttttttttttttgtgagacagagtctcgccctgtcaccaggctggagtgcagtggcatgatctctgcttactgcaatcaccgcctcctgggttcaagtgattctcctgcctcagcctctcgagtagctgggactacaggtgcacaccaccatgcccagctacttttgtatttttagtagggatggggtttcaccatgttggccaggatggtctcgatctcttgacctcgtgatccacccaccttggcctcccagagtgttgggattacaggcgtgagccaccgcacccggccgcatttcccttttgtacactaggagctaccgagtaccagaagtctttgttaggatgcacagttctttgctcactctgcctgggacagtggctcaacatctccagtcccctttgagttacctccagaaggttcaggaagagcctttccctccaaaatgttcatagcatttgatctaccttctctaagataagcagcttttgtcacattgtacctagggtaaagatttgtaatgccttaactctatgccatctgtatgcttcctgcggacaggatatgcttctaatttatcagattcccttaagaaactacaccatgatgcacttctcaaagtatgctcttaactaatacttatgggaggaaaaaaggaaggagaaggaaaaggagggaggaaggaaatcgtgtaattgcagaaagtttatgtctgggacccttgtgtaataatgttaaataatactttgacttttacgccatttttctatatacaaaattctttcacatctattttcaccactatcctgatattgtttgcatgatgtgtagtatgtatgtttttaatgtgtgtgcatattgtttgtctctcacacatacagcagccccaacactgacaaatccaaattctatgagtacagggagtttgttgtgttcactgctgtatccccagcaccttgaacagcacctttcaaggaggaagaacctaattcatgtttgttagaagaatgaatgacaatattgtcttatttgatcttcaccataatcccgtgaagtgaataccgtattcatactgtatcctcgtttttttgcagatggcaaaactgaggccttgagacctgctcaggtttgcatagctagtttttggccatggcaagatttgaattcaggtttttctatttccttattctctcctttttgtcttctgggaatttgctatattaatagcaaagcaagaaatgtcacacaaagaaaaattgtttccaattttaaattcatgatgcatatgcaagaaattactgacttttcaatccaatggtaacacagattgtgtgatttttaggaggaagagcctttcttttccatctcttgcgtttattagcatatgtgtcagtgcacacacatctacaccgtgcagctctcaccttgtacttttccagtctgaattcgttttgtaggctgtccctgccctgactatcccaggtgcctatcagggctgtgtcttggtcaggctaaggccaagcaacaggcaccagcatttgttatggttaccttggcaagtgaatggggtttgagggaagctggagagcaggcatttcaggagtagaactaggccagtctgtttttgtaaaaagttgatattcaccctaattgtagctcatgttggcaagcggagtaaacacccatgcaaattactaagttgtactgaatgtccaaggatgtcaataatcatcttgaaatccaaataaatatattttttactgaaacggaagccaggcaccacatgcagtttctctctgtcactggagacagatttggcacatatgcatgagacagagaagggcaactcttcaggccctaatgcacacaggaaactagggatgtgtatatcatacttggcagcaaaatagaggtggggcagccatcactttctgttctcaagcacctctcttttttcctatattttaaaacaggatgaccacaaagaagaataaggtatacagtagcataggatcctaaattaaagcatgagggaaagctagcattagtttttcatctaaagtccatttgggtaggaatgagtcagtgcaaaactgtacaaaggtgatcttaagtcacatgttatgttaccgactctgtggcaatggctgtgagtagtccaggaactctccaaggcctatttttaaattcacttagaccaagcataatgaggtaaagggatgtctatacacattctcaagtttagttctctgaccgtgagtcagactgtgggccatggacctgggcgtctcagtggtagcaggactcattttttccccttttctttctcataaatgacttaggagacacattggagaaccctatgtgctccttttactggaattatcttttaaggaagtactgatttcacctcctgtacatggtttgctgagatggcctattggggtttcccaccagtccacaactggaagtttctatttgcacattttgactgctagttctatatttagtcaaaagcctgccttttgcctggtttcttagggaaatagtctgtaggagttgctgtgtccatttgccttgttcacttgggtatttatttgactgtataccctgattatttcctaaattaacaaaaaggcacagggccccaaatgaaggaagaccccttgtaatttgttaaaaaataagtttatgaaaatgtgtcgtcaggaaatcagagttgtgttgcggggtggggagcatgatatacatttgtgtttgtatgtttctaattgtctacagatttatggcctactgtaacaaagccattgtaagtgtacagtgggagggtcaagaaaccttattctatggattcaaacacattatgcatacaatttacacgtaggcacaaaagtatcccttcaaagaccctccaataagctatggtatagttgaggaaacactagacttgaagtcgggaaaccggagtgttgtcattttaatctcaggctatatctttacatgaacaagagaactttgtgttatttttcatattcgaactctttgtgctgaagattctgcagtcaaactgcaagacacatacgcattggctgatcagaaatgacataaccattcttactgcactgagttgatattcagtcaataaacagtctaatctcggttaaatgtttgcatatttttagacttttaaaaatttgaaatcagcctctcaagttccattagacagttttatcacggacacatcaagttccatgtacaacaggctgagaaccattaagctacaaaatttctaaaattttctccaggttctcagttgctaaattctctcttgaacatttttggggataaaaaactggcagagaaaaagaagaaagtacacctttttacattatgaaacacctatgttcaccttatccatggagttatgccagtgacctaatgcctattaagttcttccatgttccaaaggtctttctgtacttgaaaactcataggtgagtcaggtccttcactgatagcttatagctaaaaaccacttgggagaggggctgtccaggtcttatgtcaaaactttgtcccatacgctgttagtgttagaaatggagccgtcagcaaatagaatctgttgtttcatttaattacttttcaatatgccattaccagaaatttttatgtaaatacatattttattccctgaggcttgtcaatctgagaccaaaattatacaacactgaaaaaaaaaaaaacaaaattttctttttactagttctctccctgtgttactgtgtcatctctcatgcatggtataggatgatgatggtgctcaaacttagccaaagactcttttgttggtattcaattggcagaattaatgaaacaaatattttaagatccctgaatatgtgctaaaagcatataactacactactggctagtcagtaattggtgcctcagaagagttaggtatttattcatttaccaaatacttatatgtcaagcactgttccatgtgttttcttaacccatgtcattgttaaaacaaccctttgaaatgtgggtactgtgattatttccattttgcattgaggaagctgaggcacagagaaagtaaggaacctgcccaaggtcatactatcaattgtagtggtgcaagacagtgggctctgaagtatgttctctctatgacgacactgtgctctgagggagtgagagaaggaggacattgtttggggcccagtgaattaatgaacaagatatctgactaggatctgaagactagcagaattgaccctacagagaatgtttgaccctacagagaatggctggctgttggtgttcacagccgtgagcatagtgtggtccacagcctcggtgtggaaaatggtctctgtggttgaattgagagaagagcaaatgaactggtctggaatagggtgtacacgtaagtagaagataagattgaaaacaaatttagtgccaaaatctgagggaccttgagccccatgccaaagagtctgtataccttatctaatttgtttaatggggccactaggcaattacgggtccgggacccgcatggcaagaatgccttccatccacagcagcccttgatgtgaggtcagaaagctaactgctaaacttgcagtcctgagggaacaccctcaaatggataaacccagctaagcaagctggaccatttccttgggaattattcacctctcaatcaaagaaggaaacttcccaaattcaatccatttgccttaacgtggtgtcccattaccacgaatactgagttgtatacattcttccctagctcccttgaacaagcttctctactacttttcttaaaaaaaaaattacccatttatgacttatttattatttatccccttcctataagggaatgtccactctttgagatcctcattcttcctccatcatgatgatgtgatgatgtaatgatgtagtcaaggcgcttccctggcctaatgtgtatgagggcaggctttgaagtttgacagtcttaaagctagagtggtgtcatgcattgctcacctctctaatcccagatttcctcctctgtataatgggataaatacctttcctatgaacattttcagatttttaaatattaataattcatatgaaatactcagcccagagctctgtacaaaatatattactcaataaatgtagccattgatattattaataatattattaaatattgagaatgaattctaccaaagtgcatggcacttccagtggctgattctgttttatgtagccacaggcctttaccaaaggcaatggcaataaagagagggcacagcaagatctatactcctttaaactaaggtaacccacttcagttagtccccacagcttctcttgcaactcttaccctattagctgtttctggggagaaatttaatgggcatagatactgggtggatagaccataccccagtgatactccagagagtgaaaaagagaagttaacacagggcgtgacttcctatgtttaacttgcagttcttatcttacgttgcccatcagaattatctgtggcatattctaaccatattcttcctaggcctcacccctagagatactgaattaattgttcttgtgggtagagtcactgttatgctttaagcttcccaagtgattctgatgggcagccaagactaagaatctatgatttagatagaagatgggaagccgagggaggccatgggaaagctctgatggtgagtatgggaagaatcaacataaaacaagcactcaacaagtgtgcatctagttgaagccttgcttctcctgcatttgttatctcagtgtgctatttaaaagcagcacaaaaaacaaggagtgaagaccttgatatcaaggatgtgaaagctacttctaatcttcaaacagatattaggcaggggctttaagacttcaacttgagagaaaagctaaggcacctggtatgtgtgtgctcaagtgaaatatttgtgctgactgagggcttcaatgtcaggctgtctgaaaggacacaatatcaacagctttgctgtgcttgtgtatgagtctttaaatgaatatatctggttatagcttatctcttttctccatgctccctcatttccaatttccaggtaatggagatcatctagttcggtttcagctgctttattttgcagatgagcaaacccagtgatgcctgtgatctagatggaggcagatttcctctctcccccaccctggtataccatagtctgttctaatgctgggatcaaggatgaaagtgctaatttgggagtgtcccccactttcttactagctgatatggtttggctttgtccctacccaaacctcatcttgaattgtgatccccacatgtcaagggagggaggtgattggatcgtgggggcccttcccccatgctgttctcttcatagtgagggagttcttatgagatctgagatttttaaggcagttttccttgctcttgctcgcttctccctctgctgccaccttgtgaagaaggtgcctgcttccccttctgccatgattttaagtttcctgaggcctcctctgccatgcggaactgtgagtcagttaaacctctttagaaattacccattctcagggaagttttttatagcagtgtgaaaatggagtaattcaatgaccctttcttactgactcattggtctgatttcttgaccaaagctctgaatattcccatgtcatcctgtctaaccagctgtcttatactctttttttttttttttttgagatgaagtctcgctctgtcgcccaggctggggtgcagtggcacgatctcggctcactgcaacctccacctcccgggttcatgccattctcctgcctcagcctcccgagtagctgggactacaggcgcccatcaccatgcctggctaatttttttgtatttttagtagagacggggtttcaccacgttatcttattcttaacagtgtctgaggtatttttttgaaacacaattcttaccttaactgccccaggcaccacggcagaagaaccatgaccttgctgagaggcactgcatgccaaatgagacttagtttttccaaagtacttgggagaagaaaaacaataatctatatgatgggcttttggcctaaacccatatcctttagatgacggaatttggcacagctcatattctggtttaaagaaaaatgttttgttatgatgtcatttgcctaattaatagcaaaagaggattgaattttccctatgcaatgtcatctagcctttgagattttagagttaatgactcaaatcaattgtcctgtcttctgtgaaaccttcctgatgccttcagttggataaatctacccttggtgttcataaggcattatattgatgcctctgatgttatgcagatatatcccttcttggctttgtttgcccattcaatgaacatttgttgaacaccacctatatgccaagatagttggaagatggaagtgtggtacacagaggatgtggaagggaatcacagaagatgagactatgaaggcaggcccttcaaggactttctaagtagtactcaggagtttgacaaagaggagctagaagaggtttgtgaagtcagatgagtaatataattaggtttgtattttatgaagggcaacatctaaatatggcttgtctattcagcaagcacttattaagtgccttttgcatggtagacaacatgcttgatgctgaagatacaagaaaaaatttaaaatggtccttgccctcaaggagctcacagtctattgagttacctttctgactttcccactagattgtgagctcctggagggcaggcactttcgttcatctgaaaaagagcttaaatttcagtgttaatcctagattacaatcccgcctctattattttaactttgttcacatctgttaactgctctgaaaatcagagctaatactgcctacctcatcagggaaagattaaacgagaaaagaatgagatgtgattgacacagcaggagctctgtgtatgctatttcctcctctatctctgtgcctggtacatggtaaacattcaggacacttctgctgcctgcttggctggagagcctgtctatgcagcctcagtgttgggaggatttgagcctggggtcggcctggcacccagctatggtagttagcaaatctatcctcagctcagtcagtgatcaaatcactggctctaggctgtaaactaacagggccagaattgggttctggactctgaagcccaggcatgcatattgcaaaagtcagaatcgaagtcataggaaaatgatgaaatttcctttctggccagaatgctattatttcaccaagggcaacaaatcttcttggcaggaaaagttgacttgcttgtgctttgtgtaatcaattgtatttgcaagtgatggagtccttctcacagtggcttagaggaggtgttaaccactattctactctctacttccatgagatcaacttttttagattccacacttgagtgagatcatgcaatatttatctttctgtgcctggcttatttcactcaacataatgtcctccaggtttgtttgacatttcattgttttcggagaattttcacagttcattatctcacttcacagttcctaatagtctctctgaggtccatatggtaagaattagtaccctttactatatttgttgaatcacaagtgagcggaggaatgggtatagttgagacccacagaagtgaagtgacttgcccaaatccatatagcttattatgctacctgtttgttagaggtttcctgttgtatcagaaactagtgagataaatattagtaatttttgtcccattgacacatgatggtatatcaggaattctgagctcattttttttttttggctcaataagtgaccttagaaaatccagaatgggatttttaagttgaatatccttctctgacctgtgaaatcactgcatctgtttccctgactttatcacaaggtaacccaagatattgccaatatttacatgtgacaaactctgaaagatgtgcataatgctcccaaaggtcatcatcttcatacctaccttataaagtgcaaatggaattgacctagtctagaataagcaggcgagatgcagagagattatgtgacatagctaggtcatgtgactagtatgcagcaggcttggggcataaatcctagtcctctggctcccgagtccagtgttcattacgctatgtgacatgtcagtattgctgtttgctcggggttaggcttttcctttggaggttagagcttgataactctaaatcgataaacttcttagtatgccacagtaatgctagcagaaagtatttgttgaagcaaaaaatatgttgtttcaaggggtctgctccctgaaagataagtttttttctttatttgtggttttacatctaatttttctaatgtttcaaaaaacattctgtgttcctttaatctacaagttggaatggatacggtgccctaattttcgtgttccctttgagcacaagcaataacacattttaaaggatgataaatagctgtgtaaaatgtagatgggttctataaatacttaccaaaatccctgtagtcagaccctggtagaaggagagaatagtcaaagtgttctctctttccacattcttcttcttcttttaggggtagtttggtagttaagaacacagttgctagacccagacagactcagacttgagtcttgccctacctgtactacctgttagattttagggaactccttaattttcatgggcctctatttgtagaaggatgctaacaatattatgtgtagtttttagaacattcatctagtataatccctatacattttaagtaggtaattatgggttatctctcatgactgtttttatcttcatctgagaccctttctttcttcctttaagatacttctatccatatttttccctagagagaaacagtattagctactcctgcctgtcagtttaagctactgtgtcatgactattttgcatttctaagtttatccttacctttatcatcaaagtgctgactaatgcagtatctgccaccttgtgcctgctcagtaaatacaatttgggttaaactttattcatttttagttatgagtgcaatataatgacatagctaaaagttcgaaagtagagaagggataacaaataggtactgataatgccactcttgtaatactacatgtagctgactggtgaaggccatggactatagagtcatactggaatccaggcttcagtgccttgagtgctctacttagaaatctgtgctttaatttccttagcactgaatgagggcaataaaagtaaccacctaatcaagatgcagggtggatgaaatacatctgaagcatttggagtaaggcctggcccaaaggttagctgtaataataaaaaggtggatggtgacgatgtacatgatgatggtttgtgtgtccctttattcatattgccattcacaaattacttgagtagtcctacttctcctgtttggtttatttgttgcaagaaacatgtgcattagaagattgaagatgattgcgcccacttgaggaaaccggacccagagaggtgaaatgatttcctaaatagcacccagaaagtttatgatagagaggaacatagaactctagcagccaggctgctctattcttattttctctatacttttcttgttggaaaaggacactgttgactcctagttaccatctaacattgtggtccaagctacagagacagtagagcacattaagttctttcagtctggcttttatgctggctttgtgtgatagtgcctcatatccactgaaacgtaagtacttaaggagtggatgggaagtattcctggaaactcacagctaagcttttatgtaaagacagcacataaaaaaaaaaccacttttcataactttatggaacctgcaaaaaaatcttggcttccttcatgatgcttgcccctagagtgtcagcatagcccttgcagagaaaccccaggatacctgtatttctccaccctggccttcctctgagcattgagttgttagcatcaaaaaatcaccacagccacgttgatcctcattttcttcagcctctatagagcctgctatgccagggtcctgggtaatctgcagacagctgctgtcatgcagcctcatatatgggttgactttaccagcaaagaattccctcaccttcgagacatcactgacatcttcatgcacagcacagacaatgaaacaaacaaaaaagaacaaagagggacataaaggttggaggtcatttacatttgcatttacttgaaaggaaacatgctaacttgttgacttgactcacttgatgtactttttcgagatttcacctggaatcttgttcttgctagatctctggatatgcaaatcccatctttgtccaagacctaattcaaatgccaccttttcttgagaatgtcccttcatctcctgagctacaaccatctcccctttctctgtgctctgatagcacatcattaaaacattttacttcggattgatggacatttttgtgtgtctaatattttctactatatcttctagagggcaagacctacttctcaatatctttagcatggcacttactaggcactcagcaagtgccctttgaataaatgtattatttgcaatcatctcttcaggtatatgtagtttttgtgttagaagcttgctaggttgcatcttgcaagagaaacaatgtgatccttcacatgtacttgttcttctccgaatgactttctatgcaagaagcactggaggctgagttcatacgttcagcattgtcagcagaattgagtcctgaatgacctgggtcagtcactacattagatgatttgattagaaaaaagaataaagccagttataacttgttttctgcctattacccaggatatttagaatgatggagatgcagaagcatttagagtttttgatgatactcatggtggtatcatgaaaataacaccttgtgtgtttatggcacataattacatgaaactcattttattctcattagagtgtcaccttgaatcctgttctttttggtcttaatgtttagtgattagaacttgggaagcaatttctagaaccagaatggtcgggtacaaatcctagctccttctcatatcagctctgagaacttgggcaggtaatttaacttcatgatgtctcaatttcctaatctgtacagtggggcagccagagtacttatttcattgtattatttgagaagtgggaggacatagtgcatagtgattctataaatattactattgcaaccaccaggctttgcataaggccctaagtcaagaaaactttcaccgtttaacagagatgtttctctctgaaaggcatgttatttgagaaatagttgttgagatgaaaggggggaggcaagatagaggccagcttgatgagggctttgaactcagccctatcaacaagaagaccatagggctgcatagactgaggagaaacactctttgtttgtcgaggaaaaggaaacttgcaaagggatggcaccagcgcagcccgacagaattctctgtgggccacatctgttcatgccagctgttgtcagtgtgtgtcgcctcgccgagaataacagcaatgattttcactttatagcaacttccatcttgggatctcagaatgctgcataaatgtagattagggctcccaaaatttttgccaagaatgagcatactttacagagcatcaagaatgcgtcactcttctgagtgaatctttattggtgcaaagagaattaaacgaatattgaattagaccttccttcctgatgtgagctttcttcttgattttactccttattttctagatgaccttgaataactcagtttccctccttgacactcagttttcttcttataaatgaagggattcatgtactactaaatggtctccagtgtcttttctgtttctgaaattcacagaaggcagggaatctaaagttgcctcccacattttagaaaggcctaagttgttgtagaattgaatattttcttagcattttattcatgatatggtaagaacccggcagaaaatttttcagtttggtcactggaaaatgacactgtcctttagcttctaatgtgaaagaatatagtattatttacctgtttttccctttgcccacctttaggtacagtactatttattattttattttactattttaagatttaacattaattctctagcttatatctcagattgataagagcagttctacttcttttgatgagtcaagtgaatgaatgaagacattaaaaatgaccatgtcggccgggcatggtggctcatgcctgtaatcccagcactttgggaggcagaggcaggtggatcacctgaggttgggagttggagaccatcctgaccaacatggagaaaccccatctctactaaaaatacaaaattatccgggcatggtggcacatgcctgtaatcccagctactcaggaggctgaggcaggagaatcacttgaacccgggagtcagaggttgcggtgagccgagatgttgccattgcacactgagcaacaagagtgaaactccatctcaaaaaaaaaaaaataaataaaaactaaaaaacaaccatgtctctcaaagccttgtactcagaccacctgcatcagaattagttgggggtacttgtaatatttttggtttccatctttgtgcgcagagagactatatcattaaaaaatgtttgtccttaagaaaggttcttttgatagttcaagactttgtaatgtatgtgaaattccactacaaataagtggatgggttgttaaatctcactggcaaaaggcagatgagttgagagactgaggcacttttgttgcggttaagcatccctttctggaattgatgactggattcaaatcccaggttctccacttattatcacggtaatctttgtactccagctttctcatttgtaaattcagaatagaagccacctaatatggttgcactggtgatgaaataagttactcaatataaaacattttgaacacctactaagcactcagaataccttatttatactcttgtaaattatacataaattaatacataaattaaatactaatgtatttctacctttcagagtttgtgggaatggataaaagattccttcaatatgactactattattttaatcatggtcagtgattgattagaaatattaaatgttgctggtctttagattcactgtcagagcatgatctttcttcccctcggctgcagtgctgacgaataacactgagtcattcatattctctcatccaccttcctgccacatttgaaagacatccatagctcatatttgacagactgtgtgtgagcatttaatacaaataatcgtgcgccactgtcaaatattagcacatgccatgtgtcttcttatgtattactcacagtggctctcagatgaaggcatctacccagctcctctgcctactttcccaactccatttacaggtgaagacgctaaaggggggaacaaaaaacttgtgaaatgttatacaaaactggaggtataatttggcatttgaaccagcttgttctgcctctgaagcccacgctttctccattataccacaatcaatatttctgaaagtaaaaaaggccacattggtctccagcttctggtctaattagcaccatactttaatcagtgagtttgactgtcttgattaacctttacgatagaccatgtaagtttcatatttctaaatgaatatatagagatggctgtaaattagtggaaaaacactaagctggaatcaaaagactcctgcctaactcttggttctgccacttaatatgggtatgattttggctaatcacttaacaaaccactaacttggtttctacagaaagaagaaatgatttcatgcattggacaatattaaataatctagtgtgtgtgtgttgcacccaagtatcttttgactgtaaaagcacatagaaaggtgaaggaattttaatcccatggttgatagagtagaatgccacctcagttcctctgaattctgtccctcattcaagtcctaattcaagctctttaagcacacagtactctctctctctctctctctgtctctcttaatctgtatcatccattgatacacttgaataatatttatacatcatagtatatctttaaggatgatattagtttcttaattggtgtaggctggaccatctcatttaacttatggctcatgcctgtaatcccagcactttgggatgccgaggcgggcagatcacttgaggtcaggagttagagaccagcctgggcaacacggtgaaaccctgtctctactcaaaatacaaaaattagacagagaaattgcttgaacctgggaggcataggatgcaatgagctgagattatgccactgctctccagcctgggcaacagagagagaatccgtctaaaacaacaacaacaactcacaaagtaaattctatttaccccattttatttttgaaataactaataggtagtaaaattcagcatcctgcactggatcatacaattggtaagctgtggatgtgggatttgaacccaagtaagcagaccctagaacctatatatctaaggcatactgattactatcaacgttcaattttttgctttgttcttttatttctccttcatataccttgatttcctgactggattataaattctatgaactggttgcatctcactcattttgatgactgctttaatgcctaattaattactattatttgtggataatttaatatagatttcataggaggctatagtttgctacactgctcgtgtactctagaaacaaggacccttgacttttttctcttctttggctataagcttatcttcttaccatgttgagatactttgatttgattttcactggtcaagcaaaaaaacatgttcttgttattttcacttaggcactttgtctgcctccctgctgaggcccaaaaattcagtgtgatcggtgtgtctgtcagaaggtaggattgcttgcctagggtggcattgttattgaacaaaacacatgccctttctttgcatcctaagtgtcttggattgctgagccagaaccgctctgactcaaatgaaaaccaccttgtgttaggtgaaagatggggagttaaccatttgtttgctggtttgcatttcccacgaaaaactcaaaaacagaaatttacctcgccatggaaagtgatgtgccaagcgtcatatttgcatattaaaaccgaaaactgatttgcatgttatttcagtgtcttgtgtcacgttcaggcatctgtcaagcccactagacagaaacagcttgtacagtaggaaagtgtttttatgcatatcagactgaaaatctaggtgccttatttttatcagcaacttgtccacactttgggctctccaatctctcctaggttcatacctgaaaatactaaagaaaagtctggaaccccatgttttataaagtatgtttcctgttattttctaagagctatccatttttataatattctgtttagataattttaaaattataaagagaaaaactcaaattactcataatatcacaatcctgacataagtcttgttaacatttggatatattcacttctagtagctgtttgataatacttacataggctaacatatactggcccttttgcatatatatttttatacatttgtaattatcagatgtactattttcatatcttcttattttttggcactataatggcaagaattatgacaatccaagtatctaaaataacagattaataaaatcttattttgagcagacaggaaattagaaccagtcagggctggagccgtggcaaccgaaactctgtgccatctttttgatagtgctttattaaaactgtagcttgtaattgaggatagtttttctatgggacaatgcatagaaagctgtgcatggtgataaaacctttttttcccgacattagagcaactagcccattgcattcttccaggcaaccaaatgaagatgaaacgtgtgcctggagtcactgccaggcatgtggggcacagcaaaggccaaaatatggttttagtttgaaaacccaaccttgaataatggttcattctattcatcaaacttttaggtcatgggtcttgcctaggtgaagccatccaatggaaataatgtcttggaattctcttgcctttattatgtcaaatctctaatatataacatccataaagcctaattaatgggaaaaactgagtgtatgttttagccataacattgtggaaataggttcttttagtttcacacaaatagagatcttctcaccccaccgagaaaactcgctttctcctttacggagggcccgcatggaggtttagagggaaggaaccctgaaatgagaactgtgaataaggttggcaggagatctttgacctagattctcctcgactctgaggatttggcgcttctgctctgcgactcgcttttcttacttcttgcctacccggcaggataacatcagtggttgtaccttgtctgccgaagcctaagggaggctgctctgctctaaatagccaagcatgagctttactttactatttgtcttttggtcctaaaggcgagactgtacaagaattaatagttggagaggcagcaaggcatacgttcaccaaatgtcatgaatttcaagatttgtagctaaaaagtactcagagtaattacatcccttgctaaagcaacaattaatgtgaaattcgggtacactacactgaagtcctttatcagcagatggaaaagtggagagttactggagagatctcattctgcaaacattctgcttccaagaagaaaatcatctttgttagtggtttctaagttgtccctcttgataattataactgacatctatttgatatttaatatgttacaaagcttcttcatatgaatcagatattattattctccagtttatatatgagaaaatcaacaatagaaaaagaaatcactggagaacttaagtagtatcttagacatcaggcctaagagccagatgctccaagcccaggcactattatagctgccttgacacgtggagacggagagaggtgggtgtggagagacctcactttcccccagctcagcctagataaaacccttgtgtgcagagaccagggccccctgactggatgcccaggccttttcccagctgcagtaactcttccaacaactcctcctgtctgtaattcagaatcatccatccttggctatgactccaaatttggtttaagaaaaggcattttatgggcatcgatgcatggcatgagaaagggaatatgaggaagtagagattttaagaaaatcaagatttcgaaagttgaagatcaactgggatgagtttcaaagcaagaatcaaacttttaaagtcaaaatttctgggtcttcctctttgtgtccttaaaattcattcttcaataaaatggaacataagaatagaagaaccaagagcatgcttttctaatcccaaggagctgtgaggagtgttcatttagaagatttcaattcagatagtcaggtatccaccttccacttctttccttctctgtggccatcgcttttaacctgaaacagaagaggtatccagcaaatcatctgcccctggccagaaggggttctccttccatttaagcagtgagatgttgagagtagagtataattcagtgagagtcaaaaagtagaagcagccacaggaaattgcaaactgcagacttgacacagctaaatagaaggggggaaaagaacgaaaatatcagaaatatattttttctggcaggctttcagctctaaaacggggctaattctaccttttgaaaagaagataatttcaatgtttcttttttttcaagaacacataattgaagttattttccctctgagggaaggaacctcttgtacatcactacaaatggacaagaaaaatgagcagctctggtacccagagtgatagagtattcattatcatgtaatctttttgaatatcttggctgccttttcccggtgttttatccgcctgagcggtgcttttctggtaaggttcagatttgcagtaaatttgagttatctaacaccatgtaacaaagaaatcaacagcaggtaagcactcaagaaagaaaaatgatcacgccaaggtcagccccagaggaactcagggggctgacattgcgacagatagtgggtatccattttgtaaattggatccttagcacacaggttaaagtaggtaaattgtagtaacaaagatgcaagatggtgtggtgttttcctgggagccatttgcaccttagtgcgggctgtttcccatgcttcctttttcctttagaaaggatgatggatatttttcttctccactcagaaaaggggcagtgggatgataaggtgattaacctttgtgtgttcttgatttcatgccccaagtgtagtgaaagttcagtaggctgcagaaaccctgtgacctgcccattgcttactcagattcagaatgctgaatgaagttctggatgtttcaggggatgctgacaactggcttaagtcctctcataaatggaaatctctgtcataatgaggtttccacttactcagtgtgtctatttttatagactacaaaggatctgtaaatatgaatatctgtgatttcactctaaagattggtaatgatatgtgtcttgcatactatgggcacaaatgggcacaaaaaaatgatagagtagaaccaaaggaagctttgaaaataacatgttacacataaagaaactgaggctcagaaaatggaaatgatttgagcaaaatcactggacaacttaaaggcagaactaagattaaagatattctgaatagtcaggtcttctgtatttatgggtttctatgtaaatgtataatcaaataccatgaagtgttatatgaatatgacagatactgttatgtatgttattcttaatctagtggagtttccttcttcatcaagggtcctattcatgtgtacattttgtttcagaagcaagtcttcattactgcatagtcccacccataatgtttaccagggatttagacccagatttggctgtaaatttggcttcatattaagtattttcttgaatgacaatcacctgggcccctagcaagaaaagaggaatggcaaagaagaaccagttttagataattttcagctgaaaaaaaaaaaatctttattttaagaagggaaaatacagaaacatagaaagaatataaagcattcaatttcccatgactttcaacgattaacctttgagcatattgtattgccgtaaggcaggtcagcctggccagcgagtgacttatctccatgtggtagttcagggcccagtctccatccttcctgtgcctcacaaggccacatctaactgcaaggagcatgggaaatgtagtctagcagtgtgcccagcaagaggaggaaatggattttggtgagcagttagcaggctctgccatgcttagtaaacatcagtcctttttaaagcatattagccactaaattgctcagaatgccacgatatctggctgcgttttttttttttgaaagtgtcagtggtcttggtgttagaagatgtttgccaatacacttacttcagaagcatgactttcataaaaactcagctcccatttttaaatctcataatgacttcccattacttaaaacaggcttggcattgaccatatcttacttctcttttctcatcctagttctgtttttttcccttttttttttttttttttttttttgagacagagtctcgctctgtcgcccaggctggaatgcaatgatgtgatctgggctcactgcaacctctgcctcctgggttcaagcaattcttctgcctcagcctccagagtagctgggactacagacaccaggcacccgccaccatgcccggctaattttttgtatttttagtagaggtgggatttcaccatgttagctaggatggtctcgatttcctgacctcgtgatccgcctccctcagcctcccaaagtgctgggattataggcgtaagccaccacgcccagcctttcctcttaacagttttttagatatacatgttcctcctgaaatgcctttaactttcttccttctttcttttcttcttcttcttcttttttttttttttccggctgttgtacgcaatttattcttcaagatcaaactacaggtcatctttttttggcagccttcttccgtctcagaacactgaattcatacctgtgttttagagcttagactttattgtaattgcctattttcatgtctctttcttcccaaactgtgagttgttagagacaggatctctgaataatttgtctttatacttaaagttcttggcacttggtaatcccgtaggagatttatgttaagacaattttgacggagtcctctaaaatctgtcgctcagtaactcacctgtggatcatataacgttaacttgcctttagtaagagattcgggtatttcagaaacaaacatattagtgattaagattgatacttacaagaatgtctttttttaagagaaaggtttgcttcacaatgtctttgttttgctatttggcagcaaacctccactctgataaaagaaatctttgcttagataatagactcagactaaaatccaaacagccgcacagtaagagaactagaaagtcttggagacaatgatatcaaaaccccgagaggcattgcagtgaagaagtatgcccaactcagcacaccccagtttcaacgttctgctgtttttaagcagcggtacctctacaaggttgctcacttatcttcttaagtctctattttctcatccagaaataggattacatgtcatacagggctgttgtgtaggcatttgagatttcacatctgtgaaagtaggcaccttgaaaagggtcttgcaaacatgaggaattaatatgctacagtgaatatgttgctgatacaactcacacttctacttctgaagaaacgagaaacaaaaataacacaaactattccctttcagcacctcccaccacaaatattcaatcgtgttttattacccatacaatatgctagaagttgcttattaacaaataagttggacacagttgttcatttttcttaggaggtattgagccctaaacactatcgagagagaggtattagagtaggtctctgattatgacagtaagaatagtactggattactgcttctaggctcgaacactgaaagttttaagctgtcttctttggtgtaagagacaactcttaacggaggaaccctgtgtttctccatggtgtattccacaggtgttaagtattctgcactgggttagtgacagccgtggagtggaggtggaggctgttctctagccaaataaacttcagaaatactgaaagaaatggtctctcagaatctttcatcataagaaaaaaacaggaatccataattagcattagataaaagagtagaatctaacagaaaatagcctttccaagtgttatttcagaaacagcatagcaagcaaatagagtattcagagaacaaaaagaatgataacgtttttctcaaaatctgtgaaatattgacaaggtaagtactttgaaattagatttatacttgaaatgtaagtgctaggggtagaatctaaatttctggcttagatttataaaggacaggatcggccttcttgctgccttgtctatattgaaagggaaactgatattaggttgagacaatgataaattgtgtctgttctctgagggtccatcctaagactgaagacaggaattatcaagttttctctaacagtcgtttggcttaattaaaacaacttgcaccattattattagaggtaatattttatacttttctagcactctctgtgggaagcatcgtttgcttggggaaaaaatgcatggcacttggagacaggtgacaccatattttgggctcaaggtctccctgtattgcaagcctggagaaaaggtgtaggtcacttcccaacctcattttcaattccactacctgaactgtaataatccactccctcagaggcagtttgagagattcaaagagatcctctttgttacaattgtctgaaagtagttaaactctatttatcatgaaatgtgggttatctcactttaattcttacagagactgtgaggtaccactggcaagtccattgatagaagagaacctgaagttatgaaaggttgacaagctcacctaaggatgccaagtgaaggtcatagtcaaatctctgtctctaaccttaatgatactgccgtataatgtattcctttatctctggccaccagtatattagataaactcaccatctcatttcagtcttgctgctctcccattcaccctctacttcagcgggaactttctaaatatgattagaacactcttctaaaaacacttaccgtggtttctaatgcctggatgttcctaattgagaacatgcaaatatattccccgtggtctgtgaacttcttgaaattgtaagtaaattttgtgtacactgcagatacctgttttgttgttgttgttgttgttgttgttttgtcaaaagacagtttaacacattagattttgagacttgtccacgttcttacccaaggcctggagcccctagctcaccgagaagccctaaacatctcagcatggcatggaagcagtaattaactgacccttcctatttttccacctgtccagaccgaaatactgaaccacttgtagtttttcccactcacaccaaactacgtctcaactttgaaactgtgctcctctcagggtccttcacttggcctgggttggaagctccaggatagcgggtcatgtctagcatatctttatcacttgaagtcatcatgtttaaaaagatttatattcatggattacaaaagtagaactacttgctgtacaataaagaaacaaatgtagaaagtgaaagtcccctaagattccacctgctagaaagaatctcctttaacatttccgtacctggtctttatatagacctgtaaataaactgtagttactttatcctattctgcagttggatttgttctttatgaaacatgtcttgttcatctttgcaggcttgttccatagatttacaatgtacgtatctgtcattgtctatttaggtgattcttttgctggttagtttaccttgttagtccttgttcctcctctcaaatatggctcctgtgaccaaccttcgtcatttaattttattcacttgtatgagtacttctgtacaattttcctggaagcaagtcacatgtatgcaatttaaagtttaacaatactggcaaccattcatccaatattcatgtttatgcaaatacctatcaatatactatgctatatatatatataattttttttaattttttctttttttgtgtggggggaaaatagaatctccctctgtcaccaaggttggaatgcagtggcacgatcttggctcaaactgtaccaccgggttcaagcgattttcatgccccagcctcctgagtagctgggattacaggcgtgcattatcacacctggctaatttttgtgtttttagtagatacggggtttcacagttttggctaggctggtctcgaacttctggcctcaagtgatctgccagccttgatttcccaagatgctgggattactgatgtaagccactgtgcccgacctgtgctttttataattaatcatttgtgcatgtttcttacccccactagactgcaaaactctcaaaaacaaaggttgtgtgtaatatatcttcatgtccctcctgggttcttacagaaggtacacaaaataaaccctgtaagaatgagtggataaaacaataaacaaaagaataactgaataattcagtagcttctctaatcctcatatgacaggtaatgtttacagttcagaggaggtcctaagtttaacctttaatgtttgctaataaataagtcagtcaaggatgagctcttgtcctgactttatcaaaactagccctccctgatttttggggggctctcagtttccctgtctcacaaagaggagattagcataatggttcttcagatcctggcaagcaactcaattttttttgtctgtaacctgagcatatgccatagtttactcatcactgtctcatctctaatccaaattgttcaacaatgcaataaagtctcaggctaaggttagtgaccagcataaaatatttttggccttttcagccttctgcgtgtctgtacttcaaatgtctgtatattttgggaaaccaaaaaaaatggaaattattttagagaaaaggccaaataggtaccaatcaaccttcttgactatgtttagaagacatttaacgctttagacatcacacaaatgattaatacccatcttggagttgtagtaaatgttgggaatgatagcatgtgttcagagatttgtactttacaggattttcacgtccaagagctcacttggtgtagtgaagataataggagaatgaatatgtagctttcagttttgttgaacttactcttgtaaacattctgaaaagagaaccttttggccaactattttaacaatgcataaatatcaaggcaagagcattcccaacccacatctctgcccattactcatggcagacatcatcatcagttctaaatttaaataatagcatttctgtttttatcacacttttattaagaatgttggggtgagatattagaaatggtcaaatttataggcaatggaaaatgtgataaattcccttttaatcacatagcacaaagctactttaaatctagtatatggcctttattccttttttacatactttttattcttcattgatgatctcaagtactctctcaattgatatttgattctcttgcattgctataattctggctcgcccgcctatttattttttaattttttttttactgcagtatgttttggggtacatgtgagttttggttacatggatgggttctatagtggtgaattctgagattttagtgcacccatcacccaagcagtgtacactgtacccataagggtggaatgaagggggaatagacaaaggccccagtggccctgcatgtcccatatgggtacaggggatgagggataaaagactatacattttatatggagtctttgatccctgcccccctgcccaacctggccgcgccaaagccccaaagtccatcattttgctctgtatgtcttcacatcctcgtagctttgctctcacccacccatttcaacaccaacccagtgtcaatgctactgacttatcatcactatttgaaatctggctgtttgcagtgctggaaaaatgaaattactcaacttccttaactggaacaaaagaactagaaccaaaatgttcgctttctggactcctgtactcgataagatttatctcatttcctatctcaaagtttatatgtggtcccgaagtacacaacttccacaagctctttatgctgcttgacttttttcacctgagtgtgagaaacttctacctgtatgttttctcccttttagctgaataaggcctagcctgctctgctccctctcttcaggaagtccgtcgcgggctatgcgagaggtcccaccttatacccttattttgctcttcctgcagctgtttttctttaattattaatgtgcctgtatctctcacttcactgtaaggttcataagaaagaaagactcaatttatttttctcataaatgtataacagcaaatagtgattacttagcaattgttgaacaaaatagattcttcctattgtaaacatggatttctaaagcctgatagatgactcatctagataaggcaaatgagtaaagagatgtgtccaaggttagccactgaataagtgataaaactaattctaaaacccaggtctcctgacagccacgtccagtgctttttcctctccagtgcaatcgctgcttgtttaggctgactgccttggttgatggtctaggtggcaattaaaggactgtgtgctttctgcctttcagggtggccattcagggcaactggggccttcgtcagttgccccttcattccgcccagaggatgagcttgagcacctgaccaaaaagatgctgtatgacatggaaaatccacctgctgacgaatactttggtgagtggggcctagagctgacttctgaagtaactatcttgctctgatttccttccttagtaattggaactattatcagctccactggtaaagtatttgagtccagatgcatgagagttgatatacatccccgcacaactaagtaattgtaggatttgcatttgcaagactgccatagatgtgatgtctacttagcttatactaaaatttcagtggtccttagagtttccttagatacaaattttattgttgagacttattttttaccagtctaggcaacatggggagaccctgtctccattaaaaatacaaaaattagctgagtgtggtggcatgtgcctgcagtcccagctactcagaaggctgaggctggagaatcacctgagcctgggaggtcgaggctgcagtgagctgtggctcagtgagctgtggttgtgccactgcactccagcctggacaacagagtgagaccctgtttttttgttttttgtttttgtttttgttttttgttttaaaaaagaagacattttttgacaacttattagcttcccattaggcagaaataggatttctgtgtatgttcccatttctcactggtctaaagattcaagtaaaaaatgtggaattggatattgtctgatatccaatttccagattgtactcttaatttttttttctatctcagttgaagaaatgatgttttctttgtagttttaattttcccctcttcaaacttgttaataactaggaatggttaatccttccaatccatgaatataatgcaaatttatgaattatatgccgattgtgaggttctgtggacgcataacctgtcctcagtgaggttaaaattgttcagaaagaggtaagacaagcatacaaataattactagtctaggtagaaagtgataaaagacatgagaaggcttaggtcaattgttgcaaattttatttttattttattttattttatttatttttgagacagagccttgctctgtcacccaggctagagtatactggcgtgatcttggctcactgcaacctccacctccggattttgagcaattctcctgcctcagcctcccgagtagctgggattacaggtgcccaccgccacacctggctagtttttgtatttttagtagagacgaggtttcgccatgttggccaggctggtcttgaactcctgacctcaggtgatccacccgcctcagcctcccaaagtgctgggattacaggtgtgagccactgcgcccggccagaagttttaaaagctccatttattaggagcatccggaatactttggtaaagaattggtggcacttgaatctgagccctttaaaccagtgcctttcacattttctgtggtagaagaccattttcctcccaatctgttggagaccagtatttttgttgagtcagttaaaattaattactagggaaataaaagacacaaaataaaatggaagatgaaattttatcattattagagttaactgttaacgaattactcttttaaatttttatactagtttctaaatattaatcctttgttcctgtatttatctcatccagggtgataagcatttcttagacacccatccatggaccactttttgagtggcactgctttaaggacaaatagagaaacgacatttggggaacagtattagtaaaggcacaaagatggggaaattgcacaggatttttgcttcttcaaatattttctattttcatgtcttttttgctcctatatgggaatatgtaatgacaggtcaactgaccacaccagtccaaaaacacacagtagatgaagtaggaggtattaggatatgaaaaccctggcttttatttgtgttggggtggcagtttagcttagctaaaagagcaaaaagagtgggaatgaaacatctggttgtggtctcttctctgtccctcgctggccaagcaatactggcatgtcacccatctgcctgagccccatttcccacctcactatatcaacggttggggcaaatgttctctagcatttctttcaacagtaataagttcaatgtacaaacatccttaatctaaagtataacaataaagctaaacataaattgatggagattaacaacaatgcatggagaacagtaaaacaaaacatagaaaatccacgaaggtttctagttacatcaaaatacacaaaaagtttattaatgctcttgtcattgccatgtgaggagggtttataatggggtctaaaatacattttttaaaagtgaaaaataaggtctctgtatttaggtcctattaaaaaggaaaagctgacttaccaagtatatatgcttcaaatatcatagcaacaaaatatattgccacaaaaaaaaaactgaacatagatgctaattgcatgaatgaatatatattgaacactctgggaaacagatataaattattacctttcccttcaagaactgtccaagctctactacttagtagcttagaaaacttgaacaagtattattccctctaaaccttcatttttgttttgttttatctgtaatatgggaataataactagcttatactgttgttttaagaaatggatgaaatatttatacaaagcacttagccaagttcttggcatgtagaatatgctcaatacaatactcaaggttctcccatgctcttggggcttatagtttatttaagacataagatatgctcgttaaaaatccattaataatgctcaatttaagtttaagttcctagcaacaatagaacgtatgtcactggtaagtaatcattgccaaatggggatgaataaccatttgagaatttggaaaaatggctaacttttattgagtgcttatgatatggcagcactatattttatttacattataggaattaactcatttcactcttataggaaaacataaccctgtgaaatagatactattatcattttcagattttgaaattaaggcacagaaatattaatttgcctaatgtcaacagctaatacattgcagaactgaattagaatgcagatctgtacatttacacaccacactgtaaaagatggggaaagctagccaggctacatatttagaagagtgtttatggtggagattagctttggacagatgggaaataagagatgagcattctcttctaggtacacagaattaacaaaatataagttgaggccaggattatttaaagaaaatttacgttatgtagaaaacaaaaaaaaaagtgcctatggtaatattcaggctgctctgctaggtggtggtgggggtagatgtgggtcttacctttgaagttcttatagtctaataggatatgtgtacagagttatggtgttataagcacaaggcagaaagtgacaagtgacttaatcaatgttcaccaagtgttctttgagaattcagaaaaaggaaagagaaaatcaagagagagaaatggaaaagtatttatggaatacttagcctttgagtaagtctttaaaattgtgctaattgagatttggaagtaggaagatagtagagaagtgaagtcatttctcatgaggggagtttttgacataacagggaataaaaccactggagtgaagtgtccacgtgagaagtagcaaatattgggaaataaggttcaagtagtaggttaggaccaatctagggaaggctgtcaatgtccggctaaaggctaagaacgttattgtctataatgagcccttgcacattgagatcacatgccatgagaactgctctgtggatagtggttaaaaacatgcactccagagccaggatgcacttcttaccagcaagatgaaatcaagaggcaaaggactagtgaaaagaactgtcctttattgttccgtgctttaaacatttctcaagcaccttctctgtgcctgctactgtgctgggtgttcaggacacccaaatgcagaggctctgccctcatggggctcacgggttcctaggaaggacaagagagtcacagatgtcaaggattttagtgcagatattagcactgtgttgggtgtgactgagctgctatgtgagagtccataagtctgcctgaggatgagcggaaagaatacatagcagtgtgtttgcatcagcagggcctgacccaagagcgataaagtcttctcttcctttctgtcagagttttacctttggcctattctggactgcaaatagcattgccaagcacttcccttaaataacttctcttttttgcaggactatcctctcagccctgccaaaaccccatcacctactctttctttactactttgcctatttaatgctggaatttttatttaaactgtagctgatttactgaaggtaattaagtgctttcatgctgtagatctcctgctagactacaggctgtacttgggagtgagagtgaacaaaatgtaaataaatgatgtcaacagagtaggttcctttgtggtcatgttgctttgcttccaagacactcttttttttttcataagtagaatgattcatgaatatgttattatagttcttgtttctttgcggagcccctcatcactcttaacagttttatttatattgaattataattatcgtatgcttaaaagtactgggagaggtaccagaagatcacctcacagatgacttaagtacaaaggagaaaaggaacttttataatggagaggtctcctggaagccgtcttaaaccaagtaatgaaatttaacatcctcaataatgggacagactggcatgtgccaactgaatgtaggaagtctgcagcatcgtctaggcagtggtcttgctaaaatatttcagctctatccaaccatgaggaagtaaaaaatgcagatgatgggacatgcttcaagacacctgtcctgaattctgcaacactgtcaatgttataaaacactattctagattaaaggaaattgaagagacatgccattcaaatgcaaggcatgtgtcttgattgaattctggatgaaaaaaaaaaaagctgtaaaggattggtagcaaacttagagaaatttgaatatcaatgatatattagataatacatcaatgttaatttcatgatgatattaatggtgttgtgattatgtaggaaaatcttatttttatgagctatttgttgcagtataaggtgaggtatgattgtgtctacagttttattttgaaatattgatagagtgacagaaatagagagagagagacagaaagagagagagggatgattgacagatatatgtagacaaacagagatagagataaatgtggggaggcagaatcacctcaggttaaaacagctagagatgctataactgcaacaactataaggactcccctcctctctaaaagtgtactgaagcctgtcacaaatgaattaccttaagaatcccttcttgggtgggtagagagattgacatttctgcaccttctcaactttcctgttttaatgactacagtgggtctttgaaatttcccgttatcgttttctttttttcttattttttaccagacatacacatcttctattgctggtgagatgaggacaattgtggtagtgatgacaaaagctgatatttacctagagctccatatgtttaaaaaaccaagtcgcagccacaacatgactggcagacctggcgatgatgtcttcatttcattttttggatggggaaatagagattcagagaggctcagtgagttgttcaagctcacatagctaataattttggaatttggcctcactcttctgatctcatgtctatcataatacattaccattacagaaaggtatataaatgctgttcctgctgaatgttagtaactggctgtttctctcccatgtcataacttttccttatgaagttatgatcttcaagtgagagatggagggactgcttctgcccaagattacatgtttgtaatctggacttcgatgtcactgatatgtttcaactatcttaaacatcctgaattaactgctgtgacatggctgaggtacatacattaggaagaccgtctaccgaatacctacctatcagccattttgcagtctgtagttcttctcttgaccatgggagaaggcaaatcactaatagccaccgttcttattttttcaagtcaggtttttttataaaatataacaaacagggacccttaactgtctcagctgggtttttttttaatgatttcttctggaaaggtgatagttttagtgtttccatgccttcttttgtccatgttcattataacttgtgactgtcgcattacagtattaggtaaatgccacagatgttgaaccatgataaagcagttggatgagtctatatctctaaagggaagatacagtctctatactgtgggcatttgccatctacttggacttaagttttggctataacagatttccttaccatggacctgtgtctttccattaacactggtgtcattgagagggcctctaaacactaccctgtagaggaaagggaggaaacatagtagaaagttgggggtaggagaaaattcttacccagttcaataaaccagacagtgagtgtttagcccagctcatctacaggaagccttggttcaagtgcttgcattttagagcaaattttttcctagacaactagaaaaatatgttgatactaaaggaggctctcagttctagtgatagatacttaaaaagaacaaggggtggctcatgcctgtaatcccagcactttgggaggctgaggtgggcagatcacgaggtcaagagatcaagaccatcctggccaacatggtgaaaccccatctctactaaaaatacaaaaatcagctgggcatggtggcacgcacctgtagtcccagttactcaggaggctgaggcaggagaatcacttgaacccaggaggcggaggttacagtgagccaagatcgtgccactgcactccagcctggtgacagagggagactccgtctcaaaaaaaaaaaaaaaaaaaaaaaaaaaaaaggaacatggggcgatgaagtagctgtaaattattataatttagagtcaattcagagcttataatagaaaatggaaaacttttaaattgagtattaaaatgaataggagagaaaggtattattctcagaaaattgggacatctacagggctagttgccagttttaaagtttgttttttcaaacagttttaggcagctaaaggaaagcaaagttgagtttttctccagataaccttgagatatctctttgaaattgtccaagacttttctgtgttggttgatacagccacagccttaagtaatacacccagagcctctaagttttatgctttcattcattttgtaagagaaagcgtgtttgtatatgaagcttttcatacatgcatgtctgtgactatggcataattttttccaaataataatattctggctgaggagccctcaaggctgaaggcaacactgttggaagacagtatctctggaaatggatgttgtaatacatctaaggatggactggaaatatctgacagtagatttttaagcatagagctgtaattatcttgacattgtttatatgatattgtcttattccttctttaaaaaaaagcagaagtatgtgagccttaaaattattgagtgagctatttgaagaatccttcagagcagtgccaggtaaattatcttctcagaacttagcatttatctaaggaaactttttgttcatctctgagtattgttagtaggagtttttgagaatttttgcagaaaaccaggagtttgttccagtggaactaggccttcatttttcaaaggacagctagacaaaagtgaaggcatgaggcagcagggacctagcacatgctaagccttgagagaagaaaggcgttaacatgaacaaagtgctatgatcggtcactttattggttatgccagctcattgtatttggtgccttggtatcaactcaattaagatgaaaatggagggccagtgaatgttcatgaatagaaacagaacaaaaaaaacaatgaggaggatggtccattttctttctgcactagtgggaccagttgataagtgagcttgtccagaggacttgactaagatgcttaggaaattagaaaccatgatttgaggtgcagttgaaggtatggagagaggaaaacctagagccctcattgctgttgaaagactatcatgtggaaaaggaatttgacttaatatttgtgattcaaaaattagcaacaaaggcaagtgaggggagtctggccagttcccattcagcgtaatgaaatcactttcttaagagacagaagaaagtctttgtaaaattctaggtcagaatctaataatcccttgttggtgaaaatggtgataggtactcaagcaactgatggatgattagattatacttcataagtgctgtccaattctaacattttgtgacttaggcacaaacaagacgctaaacttgtttggaagttagcgtcttgcatccaacttctaggtctacccctagattatcattattattattacatgatttcaactaacatttatataatgctttttaaagcacttttctacatgttatatcacttgagcaagacagcagtcctacaaaatagacagtgtgtttatttccatttgggatatgaagaaatgaaagatttcagtgattaagggactccccactccccagggctctccactaccctcacaagtcataaagcaggtaagtagcagaattgccctggggcacaggcctacagactttaaattcttttcacttttcaccccattgtgctgttaacaccatgttgctgaattggtcatgggccataagatagatgagttaacatacttcatgttttagctttttaatctgtataaggaacgatgtgattactttgtaaagtgcttagaggatctcaactgagaggtgtaaagtaatttgtatttcatagtttgtgttattatgtgacaagaaaatggtttccaaagtgcttctatcaattacaaactgggaaatgactccaggtaggcagctacctttagtggatcttgttttcacagataaatgacctaattaatgaaaaaccccaaaaccacaatggaagaaaaattagacaataagtggcttagagagaaggttgtattgatttggggggaaaaatgggttttttggttttgtttctctctaactttttgtttagggtatctttgagttgtgggaatagaatgttctctagttaatgaggcatattagatatattttcttttgtggtagtgacttctggtaatgtttgttcagagtagtatatgtttacagcactaaataaataataattctgagcattttatgtgttctatcttagcatacattaattttttattaatttggctagtgtgtttgtttgtttgtctgttttgtgtcagagtttcactcttattgaccaggctggagtgcaatggtgcgatctcggtgcaccacaaactccacctccaaggttcaagcgattctcctgcctcagcctcccaggtagctgggattacaggcatatgccagcatgccaggctaattatttttgtatttttagtagagacgaggtttctccatgttggtcaggctgatctcgaactcccgacctcaggtgatcctcctgcctcggcctcccaaaagtgctgggattacaggcgtgagccactgcacccggcctggctaatgtgtttttaagcattgatttggaatcccagacttagagtaaagaagaatgtgatcttagaaattatctaggaaaatccttcattttctagaaaactgtatcccaaatgacttatccaaagccatgcaactaggtgtgttttgaattctatggtcaaaattttctttctgagtaatggacagtctccgatggcatgaagaggaatggcagggctgtttacaaaggtgcagacataggtcgggcctgctacttttgtgatctcagaccgtagatccaccttattcaaacataagaacacattgtccttaaaaagaataaaataaataacttttaaggaattttgtgtatgtatttttcaaatacaaaagaaccaaagttttcttattcaaaagaaacaaaagagattcccagtatcttttatctcagtgtctttatccaatttacttgtaatatttcctatctgttttcttcactaaatgtaagtctgcgtgagggcaacaatttatgtttagttcagtattgtgttcctatcattcctggaataatgcctggcacatcggagatatttaataggtgttaatgaattaatgaactaataaatgaaaactgtgagcagactttcacacttctgtgacaggacatggtatatagtaaactatagggaggaaatacttcattcatttaagatatatttatttagcaccttataaaatcataaaacgttagagctggagggaatcttaagagactaggaaaacctcttcatttttagagatcatgaaaatgagtgagatttttagggtcccaaatttgttagtgacagagccacagagtataactcagattttctcattcctttttttaattcacttaagggcacaggaaaacatataaactagagtaagacatggctgctacatttattgaacttaaatttaaattgttttaacacctttggacttgatctcttttgcatgtatcttctgtgaaatttaaaggttcaactggtcaatgaagagagtacttggttaagattttattttttaagtactgggtcacatttcctccacctgtaggtttcatctatagtctttggttcccaggaccatttcgtaccaccacaattttcttctgttctaatctaattggattggatggatagggcatcacattgaaagaaacattcttttcttacgtttacttgagttgtccatagcaacctgtcctgaaagattgtccgtttaaagtaagcctcttcaagactgtgaaccaccacccaagattggtgtttcataccgtcttgatacaaacagcagacatccagtcattcagctgcgttaggatcactatctctttatcagaagaaagaagagaaaagtagaagagagatttctacttcataattgaatgttctttgcttattaactgtggaagcaaacttgaaattctgggagagaaagcactgatggggcacacattgtctgtggtgcaaagaaagtctcagtttggtactggtacctgaacctgcaagtgctaattatgcatcttctggtattaacacacaaacacaattaactgtgaactcagctccttttccctttcaaaccaccatcattcccccaacctgcactttccccaccactttctctaaaacacacagataagcatctccttacagactttgaagtgacattaggattgtcagaaggcataattaattgactgtcagcaaagctattgtttgaacatctctggagttgtacttggtaggcatcttgtttttttgttgttttgttttgtctgagacgtagtcttgctccgtcgcccaggttggaatgcagtggcgtgatcttggctcactgcaacctccacctcccaggttcaagctgtgctcctgcctcagcctcccaagtagatgggactacaggcacgtgccaccacgcccagctaatttttgtatttttagtagctatggggttttaccatattgatcaggctgatcttgaactcctaaccttgtgatctgccagccttggcctcccaaagtgttgagattacaggcgtgagccactgcacctggccctgttgtatttttaattgaccgattctttcctctacaaatatttattgagtgcctactactcaccaattattgtagtgtatactatgggagataatggaaatgatataatggccaaggagagaaagcatttgtcaaatcctctagggccaagggctttgatagagaacagatttcacaactggcagtggaaaatgtattcttttccatcccggttcagaggattttgccactgtacttgtgccatataaaatgctgaaatagttcatgagaagaggtacaggcatacatcttcctggtgtgtgaagatgagtggcaatgcactgtctctggttagagttcccaccaaaaattgtaaaatacttaaaaagaaaaagcaaaaaatatccgaggcaattaaaaaaaaaaaaaaaaagggaaatcacagaagcaggtccaagttaatgaccttatcccaattctgttcctaagtctgactctgatgttagtcatgttgtatttaattcttccagatttcctatagtactgtacagctctgatctcagtcctcacttggttctaaggtttgaccatcaaactttgagcttgcatgagccttgaacttggctctactcctatctggcagtgagcatcatttgttaaaattcaacaagagcaaacagaaacagtgtacactagtgacttgctgaaagagcctaagaagatacagtaggcaggagtaatggaaatgagtttttaacctccactgactcaccctttctttcctagtcacccttagggtcatggcaaagttacagaggcatttagaaatcatcttgcttgaaagcttccctttcttcagtcattagtgagcatcttcataattttttttaccatatatgtaaactatccatagtattatttgcctaatatttttatttaaatcaattaactttttatccgactttgtcttccttcatgtcaataacatctataatttgattctgtgggttgaagtactaagttgcttctttcctgtaaaagatattaaactgaatactatatttaaattttaaaaatacggctggaattacagatcacatctgtaatcccaacactttgggaggccgaggctggagaattgcttgagtccaaaagtttgagaccaacccaggcaacagagtgagacccccatctctacaaaaaatgaaaaaaatattactaggtatagtgatgcacatctgtggttccagctactcatgaggctgagataggaggatcacttaagcactggaggtcaacggtgcagtgagccgtgattgcaccaccgcactccagcctgagtgacagagtaacagtctgtctcaacaaaacaaaacaaaacaaaaaacaaagttcatttcatgcaccagctaatgtttgaaatattgagaaatgtggatatcattcaacaagaagaaaaattgataggataccatggtgaaagaaatggtgtcctcaagcttacccattaagtgtataaagcataattttttcttttttcttttgcatgcggagtcatcatgttcttgtgaaggatcgtgttgtgttgttagatattgttccaggcatccagcactgagaggcattgccggcctgatactgtcccactgactcactgtgacatcttaggccggtttctcttccataggtctcatctctcatatcacgagattagaacacatgaactattgtgatccttttgaccttaattcctttgcctcaaacacttttcatatattgtcctctctacactgttaaaatgtaggtgagtaagaaaagcagctgccccatataaaatttcagtgctgcttgcctcagagttctggagaattgtaaacaaacccaagaattatatttcctagatcactttatgctctgcttgttactgttacccatttcctgaggtttatgagagggtcactgccttgaaagtagctttcaatgccaggtaataaaagtggaataggatgttgaatatgatgaagaataccatgcactaagtgttgggtacactagcagcgtcactgtgtttcagcattttcagtaatggtgttcagtcatggtaattggcataccggctcagtaatggtgtttactaatggtaactggcatatgtgagtgatattagtgtgggtaaccatcaacggagcaatagtctaatgtagatgatacagcagtaataaaaatgaataattcatcttttgtcagatagcttagtaaagtgagcactagatttggagtcaggaaatccaagtgtaagtcatcttttctgtgtgacgttagtgacatgtgacatttgtgctctccttagagtattttgttatacagtcttgagaactcttcttttagcagctttaaaatgagtgttattttgccagaagaactaacatatccatggacaagtcagaagttaaaaccaaattatttcagttttcttgtttagattagctcttctatagaacctcagagtcttcctgaatttcaggtatttcacttattaaaaagataattatccctatctattttatgtgcatattgtgggaatcaaattaaataagtcggtatgaaaaagttttctaaaccgtagcagaagaccaaaaatttaagaggtgttagtatctccacctagtgcagcatctggtttgatttgtgtcatttatgattagtgtgtaataatcattcctctaaattgttaacgtcagtgtttatctctatttgaattaacactttgtattttcttatgatgttctgttgtaattggaatatcgctggagaatacaaaaagtgttttttagtcattgtgtgtgagaaagcaacacaccaagatataccacaatgttctcgtttgctgagcaaactactcttgctttttaatgtggaatgtagaagaactaattgaaaagagacaaaatgaattttgactcaaattgaacaggatgaatcataacccactttctcatctgagatgtgaggaagaaaatgtaaaggaaaccaaccaccacacagctttactgtcagtgtcagcataatcaatatagagtgtttttcaacagaataaagaatacatttctgcaaggctgagagttgcaggtagtcggaaacctagttatttttgctttgtctatagtctgctaaaattgtctcgttctgccttggttaaagcattctaatcaagagagtttggggcccctcagtaattgcttctcaaaccattcagaaatgtacctgtgatctctattgaacagaggccaatcagagactggaccctctattgaacgtctggtcccagtgtcattttgtcagatggtcaagagcagggagacggcagacatacagaaacctggacaggactgaattgctgcttccctgaaaataacttacttgggtttattgatgtgaatgattaaacaaaaacactttgtcctattggattctagaatttcgatgcataatccacttagcttgtgaatgtagcttaaaaaaaaaaagattttacacaaataaagaggcactatagcatatcccaggaaaaaaactctaattcctaagtcaaaatttatttctaatttttgttactattgtatttgattcataactcttatgatctttattttcctcatgtgtgtttatatattttctattttactgtaaaattactaagatgggagagcacatctttcttatcttactcttcctctcttccccaaaaagaaaaatgagaagaggagatagagctggatgatttttttaaatatctttgtgccactccaccaagagttttgcttgcaatagaggttctctagtctgatttgatcctaaaccattctcactaatgattctgcttaaaataagactagtacatattgagcactgactatttagtatgagttctacatgcattacttatatctggactataactctaggcagtagatactgttttttacaatgagaaagctgaagccaagatgagttaaataattttcccggaatctagtaattagagttgcaatttgaacacagaacccagctcttaacccctgcatataccatgcctgtgactatagatttcagaaaatgagctagccaaagcctggaaaaagattagactcacaggatctgtgctcattccatgacttttctggtaaatcctattctgttttttcctctactttccttgggggatgtttttagtatgatttgattttctctgattgaaagctctcactactaataagggagcaattagaaatacaggtacaccatctctttgtttgctctgtaccagatgtctgctgagacagtgtctttgccctcctacatgggtagtagtgcccagttgggctgcttagtccagataacaaaaggcgatttctgaccgtaattttttttgttgttaataacacttgaaatatgcatctttattcctccattccttcttggacttgaaacttggttattatgattgtagcaatatttatgtccagaaactctcttctccccacaatttgcctcaatccagtactgctttctttcacacacgtaaatagttttaacttttaacgatccatgcctatggcatcttctagtctagtgatgtgtagaaaagccaggcccagtctcattgcccaggtggaaataagagagagcaaggaaaaggggactgattttgaaaataaagtcaccctgttgacatgtcatcagtcaaaagagttcagtgcaatagctagcaattggctcactcagtcggaagttgatgctattttaggccgtcagcggcagtgtcaatgtatctgtgaattttgccattttatttcattaagatggttcaggaagtcagacactgattaactgattcttcgacttagttcccactcctaattttggatgtgtggtgtctttaggaagctgctgtgtcaccttgattctaaagaaaagtttcgttgtgcctctagagcaatccggaacagtttacccttgtgtctggttatgctggaacctgctgtgttctacctctctggtcacaggtggtatggggatacttttgcttctggttctcctctggcagatcaagcaaatacaatccaagtgcgtgcagcccgttcccattcaaaatgtatccgtcataataacagcattctcgctgacgcattagactcaaggtggacttaatttggagatcacctatgaagacatctgtggaaggaatggcctcagcattgcagtcactttcgaagtcaagaggtattctagacagaccacacagcatgtataggtaagactaggaaaattctaagttttgtgttgttgctaggggcttgtaatcttattttatttgtaaacatgctctaaataagaaggataaggatctctagataggaaatatatgttgttctttgtttctccatttattcaataattattgaaggcctatgatatgccagacaattgttccaagcatttccattaaacattagtccacaaaatatagacagaagtgcttacaaatagctcaattccaatatgatacattgctggagtttggtgatatgggaggaaagaagttagaatggcttactatgaatggaaaagtggagaaagattttctgacatagatcatgttaagactgaatattaatggaatttttcaggtaagccatgaattcaagggcatttcagacaaacaattcaatagggacaaaggtatagagaccaacaccaaaaaaagtgcaatatgactgccaaagaatattggaaggagaaatgagactaaatgaatgattagtggccagatcaagagggcctcttatttcttactaaagaatctagagtctgtcctgaaagtgtggaaactccatgaagggtttcaacaagggaaccacaagatattgattaaagatcactctgggtactattgtggggagaggtgttcaatgggacaagatttgggggatgaagatcagtctgggtgtcatttgtacttgtctaaggggaataagggctggaaccaagatagtcatcttgtgacaatttagagaagggtttcaaaggggcgtaagagggatgggctgagacttattcctgggcctctatcttgggtgggtaatgacatcactaagtgatgtgagaaaaagagaaggagttcagtaatggtgatgccatcagtccacagagatcctctctttatcaatacttattgagcacttgctgtgtgtacacactgttctaagcattggtgctacagcagatgaaaagcttcttttatggggcttacattccagtgagaagaaaatgatgacacataaataaaatacatagcaggtcagatagcagtatatcctattgagaaaattatgcaggagaaagggatagtgagtgatacagtggtattggagtggaagtattatggtgaatagtgtgaccgctataattgtgaggtctctattatgggtgaaatctggtctgcctaattttgtttcttttccattttttgtttgtttgatgaattattatttctcgtaaacaaggcaaataaacagcaatagcaacataaacatttacaagcacatagatgtaggcataatagtttgtgttgccaacataacacatgccaggaaaaacaaaagaaaacagcagctaaaaaaagtaaatatcaaaaaagggagctttctcagacacaaattcttatcattcaaaatgctgtgtagtttgaattagaaagtcacagaatgggaccttagatttaatccaaatctcttagtttaggcagaaaaaccttcagccgagcaaggaagtcagttattcaaggacacacaggtaggtctacaatttaggtgctctaacttcatgtctaaggatcttacccttatcaccatcccagaaaagcccaaagtagcttgggtctgaatttccactttgccacagtaaccttgagcaagttttgcttctctttgcaacagtttgctcatttgcaaggtagggatgattataaaagtgtctgtgatagggggttttggaggattaaataagttaataatacatgcaaattacttacagatgtgggctgacacacagttaatgttcagcagtactgagagtattgaaacgttatgatacaggctacttaggttttgtgtatttgaacataaacttcagaccaatttctggtgatgaccacgggtaagatattctgtgttttagttaagatgatttccagttaagatgttgaaatattaaatacttttcttgggtcactgaataattataaaatatattaaaataactttgatatttatttcattcatagaagttctagacaatccagtctagagaagagttatgtaaaattctacaccagaaatagaaccctaaccttgaaagacagggacacttattcatatatgtatgtctaacacaaatgggcctcataattgttgacagccacttattgagcattgaccatgtgccaagcagcatgctgaacacttcacatagctggtcttacttaatgctcacaacaggtaagcattcatatccggatttttcagatgagaaaattgagtcttaggcagttcagtaccttgtccaaggttatacggatatcaagagcctagatcttcataagccaagtctctgttctttttgctcagcaaatacctatttttaatgaggatgcttttctcaactagctactatattctgcaaccagtctgcattttacactgctatcctttctgtgtcattcctaatactcattcatagaattataagatcatagattgttaaggctggaggaaacctgaggagtttcttggttctcagcataaagactcagaatcacctgggggagctttatcacattcaaaactacacacccacacacatctaccttgtatttacaatgaaactctgatctactgacataaccctagatccactgagaaaatattattactcggagaaaatttagctgatggagtgtgccataccccacgtgtgatgagataacaaaaaaagttgacaattactgatctagtccaatcttacatcacaaacatgaaaacagaatgaagagtgacaatcactttctaaagatttttaaaatgtcacttataactatctgcaaaagaacctgcgtcttttgacttataatgttaagtgattttcttgtttattccttaaaactgcctttgtagaatgcactatgttatttgatggttctggagtaatacaaaagaagagagtgattaatttgcctgggatcctacaacaaaccagttgaccaagagataataagcttattatattatgcagatctatacctattcacttcgtttagttaagaaacagctcatcaatatggaatacacattttcatagtagatttgtgggttgcatagcttttttgtgtctgttttcaatttctgttcctttgataactgaacaaataacagagatggtgaaacccagcaagcaaattatcttccagattttatgtgatctcccttctctagtgagttggtatgtctactaatgacacagtagattataaggttatttggtttaagtaaatatttatgcagagcctatgatatgtccatctctgtcttaggtggggtgaattagaattactataagtgctttctgaaaaaaaaaaaaatgtaccatgaacaaatttagaggtctctgcccccaagaagtccatagaccattataggttagagaataaaaaatatatgataatcccttttcccatgtgataaatgttataaaggagctctgtacctatgattatgagagggaatgtttgagagctctaggaaaaacctccctagggagattaagaggtgatatctgatgtcttcatgaaggaataaaatgtttccaagtagagaaagagaagaaagatgttagatacagaagaaacagcatgtacaaaggtatagaggtaggaaaacatggtattctgggaacaggaagatgttacttcctaacagaacttctctgtggctgaagccacattgagttgagggacaagtagtgggacaaggaaggatagagagtctggagttcagtgataaaagatcttgtgtgatagtcataggaaggatgttttggatgtttacctgtgcaaaatgggaaattgttgactattgtcaaacaatgggtaacatcagattagtgatttatgtaaaactgaagggataaccatttctactgctgtataccacttggataaccttataaagccacttaatagggaataatggggctggaaatttaatgggaatagatttaaagtgcttgtgggataagaaacatgatattgctctcttttgttctctttcagttcaaaacaggaagtgcctaggtatgcagaaatgcaaatcaagccagctatatttttggtgtgttttgtgtgtgtttagattttcacacatcagcaatactgtaagaacactatgtggccaggcacagtggctcacgcttataatcccagccctttgggaggccaaggtgggaggattgcttgagccctgggagttcaagaccagcctgggcaacatagtaagaccctgtctgtacaaaaagtgaaaaaaaaaaaaaatggatgggcatgatggcatatgctgtggttccagctaatctggacgtggaggtgggaggaggatcacttaagttcaggaatttttggtggctgcagtgagctgtgaccatgccactgcactccagcttgggcaacagagccagaccctgtctccaaaaaaagaatactattatgtgaataatccaccagattcaactaaaaaatggccatgatgttttaaaagtacatatatacacacatatagatttaaagattactttcaactttctaagaaattagtagatctttagaaaatcattgtgcgtatgtgcatatgtgcattgtttgtgctggtcccaccttcaaggagaaaatatttcaagatcctgatgcttacttaagaggttgtatgtgtttaccatggaaaggaccttggaaatcatctcctaattctgacttcattatttatttattttgatgaagcaaatggtgcccagattgaaacaggagtgtaagccacagccaccaagtgccagtgcccaggctaacacttttctccattaactctggaaaccttatttcctttttgtaccacgtatttacagtgtttggtagttatgaattgagtgaattatcccaaggttggagatatcttggtactcacttgtaagtggagaaacactaataggaaaatattctgggaatctggtaaggaagtatgagtgaatttatcatatttaacctttgttcaaatacattaagccctttcttccctttgtcattctcaaactggatcgacatgataggaggagaaattttatcaactaaaaggggttgtgtcaataagtgtttatgatacctctaaacttaggccttaaaacaacacaatctgtgatctgacagttctgtaggttagatgttcaacatgagtctcatctggctaaaaccatcatgttagcaaagctgcatttgtctctgaaggttctttctaggggagaatcccccttgctttttctgacttctaaaaactgaccacattccttgacttgtggccctctttttccatcctcaaagcctgtaacatagcacctctgaccatttttttcatagtcattctgtgtctggccccagctgggaaaagttctccaattggtaaggacctacttgattagatatgacccacctgaataacctcacatactcttcctatctcaaaactcttaacttaatcctatctgcaaagtccgttttgtcatatacagtagcatgttcataggtttcaagcatttggacatggtcctctttgggaggcattacgctgcctgtgacagtgctcttctgatacattttcagtgatcttctagacataacaatcctggtcctgggaacatgcatggcggggacctaaataagtctattttttaagaggccctaccctttgcatagattctaatcttggggtaaaggaaagtttgagatttcactccacctttttttttggtgctggtatttccactgtgggaaagatcattcggatttaacaaccacatgaagctcctggattatctggggcatgtttgctgattcccaaggaagcttgatctttttgatggagcacttgagctggtaagttattagaagctgagctataattttccttggcattggtcatttttgtctaatcttttatttttttttgttttttttgttttgttttgttttgttttgagatggagtctcactgtgtcccccaggctggagtgcagtggtgcgatctcggctcactgcaacctccgcctcctgggttcaagcaattctcctccctaagccttcagagtagctgggactacaggcgtgcaccaccatgcccgggtaactttttgtattttcagtagagacagggtttcaccatgctggccaggctgatctcgaactcctgaccttgtgatccacccacctcagcctccaaaagtgctaggattacaggcatgagccaccgcgcctggcctgtctaatcttttatttaatgcatctaggctcctcctttcttccttcatggtttcctttttcctacttccctatctcgttttctttccttcttttcatttacagagaaatggtgttagaaatgaatgagaggagtgagcaaagaaagatgagggaaaaatagatgtgttaaggagtatacgcataaagaaaagaggccaggaggaaaagctgttcaccccgactcccatcctaatcttgcgtagtctttcgtttcctgagaatagttaggtcagaagttacagtagaaactttcatggaatacacaaaagggaattaagtaaggaaacttgtgaccgatgctatgggaaaggacatgtttgtcaaagcaataggttcttcctgagttagagaacaattatggttcccccatggaaatgtttatctgacgcaatgagaaccaggtcagacacaattcagaaatgaaatgaataaaattattctaagatctagatgggaggagacataagggattgtgttttgatagtcttaagggtgcacttacatttacatccccaaattccctcttccatgaaccactgtgcactgtacattgccacattaatgctaactgtgccaattagattaactaatattggtcaaaaaagaatatcctggccgggcgcagtggctcacgcctgtaatcccagcgctttgggaggccgaggcgggtcacggtgaaaccccgtctctactaaaaatacaacaattagctgggcgtggtggtgggcacctgtaatcccagctacttgggaggctgagacaggagaatcgcttgaacccgtgaggcggaggttgcagtgagccaagatcacaccactgtgttccagccctagcgacagagtgagactcttatcaaaaaaaaaaaaaaaaaaaagaatatcctaatgaagagaaaaatgacagaaatttctaagataactgtttcatatttcttcattaaattaaaatgaaaatacatcttcttagagtattggggtataaattaaactgaataataccagtgaaaatgctctttcaactataaagtattagagttgagaaagttctttttgtttgactattcattctgtcatctcaccttagtggtaatttcttctgcttggacaatagagcaaagttgggccagtaccactttggcaatgggcatcaaagtcgaagaatcccatgtgcaggtcgaactcagtgaaaaagggctggaactggctgctcctgcccgcttcctgccatagtcaggcccacatttgaactttattatttcgggggtaattaccttgtgtagtcgtaaattttaatccaagtctcatatgtgactgtggatgggtacagtctaaagggaacatttctttatttctctgctgcagagtgactacgtctacagtcaaaagttctcaacctatcttaggaatcttactttacttcaccaaaaacgtgtgtgtgtgtgtgtgtgtgtgtgtacatttatataccatacatgtacacgctagtatgctttagttaaaatacaaagcctctgtagaaaacagaagaattctgcaatacccctgaaaaataatttattttctacatgctatctcataaatctgtactaaaatcaattttgaaaaattaagccccccttctctaacatggtactctctctctttatttgaattgtttcatgcacttcaacaattatttctagtttcatttcttttcatgaggactttattccaagataattcaatttttgttgctactgtgcaatctttttgcttgttgttgttgatgtgtggttattgctagtttaaaggaaactcttgactttgcttgctcatatccaaacactttaccaaattcagttgttaacaaacttatattaacaacgttttcaggttcttcagtgattattaggctactgaagtgtttttgtggttgttttgttttgttttacttctattggaattcatgtggctgtttatattttgctagaaaattatgcattttgtcaagattgtctactgttgttactatgatataggcgtatttctcacttatactttttaaaatatctgtcttgtccatattcatagcttccttttgctttgactgtttttcctttttcctccttagtggaactttcctaagaagtgtgtatatgtgtgtgtgtggagtttgttttctaactcattacttttaacgtttgccttattattttatatatccttctttaagtttatttagttattcattgttgtagtatcttactctgaatgttcatttatatttctctgtctcttctgtttactaataaaaagcatttaaattgatgaaatgcctctccttgactttatctgcatcccatttggatatcttttaaaatttatcataaaggtgttataattcagtcattcttccacataagaattattcagaaacttatttctaaattatttttatcaaaaaatgttattctattttttaatttgaaagaatttaagtcttgaaatttattagtgacatgtaaattcctgactgagcattatgaaacttgtttagttcattgctgaatttggtattttgtcagctgggaacactaaatacccccacttaacttgctatttgtgaagctcagagtagcattggggttcctgtacactttggcaattgccccatggctaatttggccaacttccaattcctcagggagcaacaaagagttgtctcattgccacctgctattaactaaatgcttaggattcagtgtcctaggggtgactgggagacatgggaatggattattgtaacagcctgtggaacctccttccctggggaattttgagaacagcaaagaaccatctgtctgggctggttttaggagcagccctgcctgaaggcaggtgcacggattagatgacctgtgaagattgtcatccatcccaatgacttcaatggaaaggatgcatttgctgaatttgaaaagagtccaggaggaacactgataggtttggggagcatatggtcaagagcctgagggtattgagcccttcttgaaattggagacactcggtgtcaccccatgccctgaattccagaatgccataatctacacgtgaacccagcagtcattcacccttgaaaattatgtgcagatgtggttcacattggagtattcacgtcgttgttgatcataagcagaattcctttttaacacatagctcaactgatctatacccagaacatactgttgaccctgattcttctggttaagccggatctgcctgtataatacatcatttactgacccactgacattgagttttcttagcttgtttctcagtggttgttctgtgtttgtttcaggcaattaaatatgttgatgcatgtttcagaagagctctcctaattatatcaacaatagctttattatagttagaaaagacaaaatgctaaatgaattagccgggttaagtcacatttattgtgatttaattcttactgtatgtagtgtaatataaataaaataaaaattttattttattattattattattttttgagacgaagtcttgctctcatcccccaggctggagtgcaatggtgcgatctcagctcactgcaacctctgcctcctgggttcaagcaattctcctgcctcagcctcccgagtagctgggattacaggagcctgccaccgtgcccggctaatttttttgtatttttattagagatggggtttcaccatgttggctaggctggtcttgaactcctgacctcaggtgatccacccacctcagcctcccaaagtgctgggattacaggcatgagccactgtgcctggcctgtaataacatattttaaagttacagagaaagggcaatgtccccaaaatattttcatgatgatatgtcagacatatggagtttcaaactaacactgtggtaattgttgtgtgtctaaacaagtgacaacggggctgggcagcaaaactagacatgggagaagccaactgatccattgagctgtcccagcaagagttagtgggattatgatttatgaaagacctgtgtggacaaggtagtttggaggaactgaatggagggagtgaattaattagaagaatgagacaggactagccacaaacttctcctagaagtttaaactattttaaaaataagagttgtggctcatcaaaaaagtagtgttttcaaaaaacacagccccttcacttaaatgatacgcacagtccagatagactgcaaaacttaatgtttagaagctaacaactttttaaaaactttattgatctgatctgtactgagaacagattttctctgtgctttataataaaacataaagatcaatcacaaaataatttatcaataaattttaaaacaaaaattttaaagtgtatgtaaatatcatataaaattaagaaaaaatatgtaagaataatatttgcaatgactatgataagcaaagggttaacaactgtatgaaaattttcatgcaaatacaaatatcccaacagagaaagacaaggaatgtaaataattcttaagtagataaatacaaatggatatttaacttaaaaaaaattttattcacattagtatgaaaagaaaatttaaataattgaaatctagtttttcacttatgaaattagcaaagatttaggaaaagaaactactgtcatttgctgctggtaagaccgtaaattggcccaaaacttttagaaagttattttacaatatttctcaagaactttaaatgtctcatatctgtcaatccagacagatagatggatggatggatggatggataaatatcagatggatggatggatggatggatggatttatcagtaatagatacatagatggatagatagatagatacatagacatctatagagatatatgtttctatataaatatatatctatattatcctaaagaaatatatatttgaacaaaatctatttatgaaaatgttcactaatgcaaaacttataatggcaaatagaaagggaatctgctgaacaaaatattatcaatcccaaataatgagatattgccaaaacactatatttaaagaacttaagtgatttgggaaaatattatcttgtgagggcaaatacattaaatttgtatattcagtattgccaaatttatataaaaaaatgggtagaatttctttttaaaaaacaccttaaaatataaacggagtacttcccaataatcagattacatgtgattttattttcccccctaattttccttaattttcaagttccgtacaatgaacatgtgttattttcataagtataaaagacttttttataaaaagaaatatatagaactaattagccaaataggaaagtttctaagaacaagggaagaaatttgtgaatggagtggtgaagagatccttggactgagagctgggcaatgtggatactaacactggctctgtcacaaagaaacaaggagacttattgaggttctctcttctggctcaaagattttatgagccagtaatttatcaaagagcccatcctagtgtacccatgggcctgtcaaccctggtagacaggttagtagcccagatgaaatttcccgtggatgaattttagaactccgctccattgatcacccttttttgttgttgttgttcttttactcttctggaagagagctaagaaacttctgataccatccccctttcccactcgccctcagttgtgagatggaggcagcaaatattcagtgtgttctttttggtcttaagtagttctagactcagataccacctcagcaccaggctgagtttgggctggctttggctacggtttgctgctgaatgtatcagtgatggacttttgaatgtttaatagccttagggaatgtggcagtgtcccctacatagagaactgtagattctttagtccaccatttccaaccctgtgatttagattgtcattataagcatcacaggatgccctgagttgagaaaaatctgtgctgtttaaatggtctttaagcagcctttcctttctcctctttctcagctctattctgcttaggatatggcttatgccacttaatcaacatgctatcatatgctttctgcattccagacatatattgaaatatcttggttgttatagccatcttctcccacatacatcccctttctctcttcccctctacatttttttctgttacttgttatttttggtactgatgtgcttttatttgagtaggatattggaatgcaattgtcttcttagtccaccatcccctgacctgtcattattgaaaaacaaaattctgtagcaaatgagtccccgaaagtgttttttttcaaatgatgatgatcggtcacgttgtgaatctgtagactcctttgcgaaaacaacaataaacacagtattatttatggtggatatgctaggtacatccaaagctcttcatatgtgttgccttgtataatttcctcagcaactctaatttaatagaaactattgtccatgtatagatgaggtagtttatacccagataggttatacaaacctgtaagtaacagagccaaattttaaaggcagacaatgtaactgcagaaaccttgttcctaattgtttaatggaatatggtttagaattctgtgtggagaatcttactctaccctagtggtaaacttaaagctctttaatttactgtggttatattatatatgtgcaatggatccctattttcaaacatagtcgtttgataaagtgtgggctgcttttcatcacgaatgtaaaaagtctcttagttgctacacccagcaactaagtgtcctttaattcttaactttgaatacttaattggatccctggtgctatgtgtatttgatttttgttgtgaaagttgcattcactgtgtccctttatttgacatcagcaagatgtaatttctataaaccaattaatgatgcacctttcaactcttactatgagaatattagctggtgtaaatatcggactccttgtgaaggatgactcgctatctgattggtctttaaaaaaatactttaggaaataatggcttgcccctgcatataccaatttgaagtctttctaatatcagccattagctgggatccacatggagtacatagacaaatgaccatagtttctactgtaaaaatgcctcaagatcttgtaggtgagattaggcaattagataaatgcctatagcacaaaatgaattaacatgattgcttgaaaagaattaatttctgtaataatttgaagaaggaagaagttatgtatgctttggggggtatacagaaaggctttataaacaaccctatgaaaaaatggaccacagttttaaacgggcaatccacagaagggaaacactgcaatattcattggaaaaagaaaaggaaggaagggagtgaccaagagaagaaacaagaaggaaaggactgaaatcttgtttgcctttttggagaagatagcatttgaaatgggccttggataataaggtgtgattgtcgttggtggaaatgaattgcatccagaatgcagaaataactcaagcaaaggcatagagattggaaaacatggggcaggtagaaaacaagtccagagtctttgctgcttcttagaagatgtataagggttttattttatagttttataatgaagggcttttaatttcaagtgatgggtcagtgtataattccttaggagataaaattccagggaaaaggaggaggggttataagataaatctagaaatctaactcataaaaattagttcccttccagggagttagttactccaaaaatatccttgataagctaactctgcatggatataactgtgttatctgtgagctggctacagacaagaatttacaattgtctgtagttgcagtctttgagctgcagtcattcaatctctgtctactgctaaaagccagagtttggaaagagcccttatgcatgcttgataatgacacaatttgactgagaatactgccattttataataatctctgaaagttacttccttggtctactgaatctcatattttgtgaagttaaatgaccaatgactgtcattcattggccatgattgtcttgagtttgttgatactaaggtgttatttataatgtgccttttgtttctcaagaatatgttcgcagaaatcaccagtagtgttatccatgtgtatggaaggccagactgtatccccttatgtactaacagactgtatggcaagaagggagccaggttgtcaatgtgagagctaatgttgatatcaacacaggcatcagaaagtcaattactctgtttccctagtttactaaatggtgcttttgcaatagggaccatgttgcctaatgggctgtgaactttaatttgttcataacagtgccaatgagtaaatggatctacctgtggactttagagtgtacttctaacattttaggactgcaagaaagtagtgtgttttatcctctgatacattcatattctctattggagcatacctatccaagcccaatatcctacatcagttttaataaagagaaattacatttaattgtgtctctatcctttcatattaatccattatgaatattttattccacaatgttagaaaaattacattaacttattagtgaagaacattcttttataagaagtgctttatacttcagaacctcataacttactttaaatatttcaggcacaataactggtaagagatgaaaaataagcctgaactcatagggtaaggaccatttagaagtcttttgtcttcagcttgtgattgttcagttaaacttatttgatgtgtgctcagcaggttgtaaaattcctatctttctggagtgatccataagagattacttcatagtgaaacacttaagtttgattcttatgagttgcaaaatgattttccaccaggaaaaataaagaatatgggttccatcaaaagtcaggcatgaattctcatctcctgataaaatgtgaaatatctttgctgatcctgtgcctattctcagtttccatgaccatgcacaattattatttttagcaaataagcaaatttgaggcaaaaacattaatttgataagatatctgcaaatgcctttctggaggagaaaataaatttaaaaagcatcagtgtgtttcactgatatgcacaatcccccacttcttataagaaattaaaacactagtttttaatatcttcagagagaaaatgagtaaaggaagcacagtattttccgaaacgtgttatttaaactaaaaccatgaaatttatgaaaaaaaaaaaaagtagacccttccttgatacacttggtcccaccgaggttcaaagtttcctttgaattggggggggaagggagattctgtaatttaagttttaaacttctgtctttgtatctatccttgtgctggtactccgctatcttggttgctatggttttagagcaaatcttcatatcaggtggtctaagttctccaactttgttcctcttttccaaaattagttgaactattgtgcatcctttatatttccatatacattttagatgtggcttgtcaatttataccaataaaggattctgttgtacatgtaaaccaaattagggagaactgacactttaacaatattgtctttcaatgcatgaacatggtatatctctccctttacttcatttttttttttttggttctctcagcagtgtttttaattattattgtaaaggccttgcacatattatggaacaaacacatattatggaacaaataaatgtaaaagctaaatctataaaacttttccaagaaaagaaaagaattcttacaaccttagataggcaaatatttcttaaggagtatacaaaaaaccccacaaaccataaagttaaaaatgataaatttgattttataaaaactctaaaacttgttttttaaaagacaccataacaaatgaaatagcaagtcccatacagggagaaaatatgtgtacagtatgtgtatatgacaaagattttatgccagaatatagaaataattattaaaactcaagaagaagacaaagaatgcaatttaaaaacaggcaacagatttgaaaataggcaatagatttgaacaggtacttctctaagaaaatacacaaataaccaataagcaaatgaaaaatgctcaatatatgtagtcattaaagaaacaaaataaaactctgtaaggtacctccatacattgatgagagtggctaagactaacaataccaagcattagctaaaagacagagcaattgaaattctcatacactgcagttgaggatgtaacatggtactgccactttggaaaacagtttggtagtgtcttaaaaataaaacgtgttcaacatatgacccagcaattctcctccttgacattgacccaagtgaaatgaaaccttttttttacacaaaggcttgtacacaaatgttcatagcaactatatttataatggccaaaaactggaaacaacccaaatgttcattaacaggtgaaaggacaaattatgctatatttatacaatgaaagatgactcatcggtaataaataaatgatctgctaatatgcacaaatacatgaaaaaaatcttaaaaatatgatgctgaataaaaggaaccagagctacctccacccctaaaaaagactgcctaccttagaattatatatttacaaaatcctggaaaagacaaaactaatctatactgacacaaagcaatcagtggtttgctgaggctgggagtggggaaaggattgattataatggggactgacaaatagggaactttttggggtgatggaaatgttccagatcctggtaatggaggcagttacaaagtcttataaatgtattgaaattcatcaaagtgtacagttaaaatggttttatttattgcatttagattatacctcaacaaaggtggttttaataaataaacaagaaaaagtgtttttcaccaattggtttgaaattcggccaaggcatatttgagcgagggctgtcagccttgtatttgttgcaagtcacagtgagtatgtcctaatggatcctctacaaggtccaggttaggtttctttaaaggatggcaagaacctgaaacagtgtgagtgcagagaacagtgaaacagtgtgtgtacatagtgctttgatttttgtgcattttttggtcctaatattttaaagtttgctgaaccatacctcatagaacatttacctgctttttctgagggaaatatctttatagaacttttccaaagcattctgcatagattttattttaagaaattaaaacattttatttgtattaatttacataataattggttaactcacataattacaatgacaagatcatacagtaggagcagacttgggatcaaatgcagctgactctaatagcaggtgtagcaggaggcacacagctgaggggacatttgagacgaaattgaggccaggttccacttcacattgtactagggttaagcgtgtccacccagaggaagagaatccttaggcctaaaagagcaaaagtgtacagacatactcaagagtaagagagtagccaggaacaccagccaagccataaactccagtctgtgtgtgttaacagataaaattaagagggtaatctagggagtctattgctaaatgaagggcacattaagtctcaacagtattcctatgatcaatcaagcaaccaatgaagtgtacaagcagaagtgatttgtcatggaatttcagagccagaaagatccttaaaaaggcagtgtactccaacttcctctgaagcttgtgtcctacctacagaattcccaaccactctgcttgaatgtctccaaagaggaaaaaatttagaagagaagacaaggaaaattaatcacaagataggcaatgaataggcaagtggtaagaggccagttttcccatcctcatttactctaaatttgattcatagattattgagcctcagatatctgtttgccatctggtctggtcagtctggtttggcatgcgtcttctttctctttagagtttgatgacgttttaggctgtgaggggcatttgcattgtagtagaaattggatgatgtcagacttgctttatcacactttctcaataatctcttttggtgagtttgatattctacttacagctgctaaagctccttataaccatacgcacaaacatacacttccatatagtcatacatactcacaaacatatatacacagccatttacttacacacgtgtacacaaaggtgtatatccacacacttacatgcacaatgagagatgcatagtaagaatttttccactacccctagtttaactggaagctgtagaaaatctgaactttattatattgatctctgggatcatccacaaaattgcccaaaatgggaatgcggaagctgtttcttacctttcattttctccacatccaatgtgtcctcttcaactgtgtattttgaaacaacctttgaatctgtccccttcccgcaactgcactgccaactgctgatatcattttttgcaaacaagtgtaatgaaaagagcatattctttaacatcaagcaaactaaggtgcaaattttagctctgcatgtattcattgtgctatcttggacaagttatttaactatcctgagcctccttgtcttaatgtgcagatagaagaagataatgcctacctgataggtggcataggaaaaggtcaaaaacattattttctactcccattgctccccttgcctgaaacattataatggccaaacaactggcctcccaacctcctttcccctcttcagtttttcctctacattatagctagagattttgctaaaatgtatatatggtcatcccattttttacttgaaactggtatcttcctgcctataaaacacattttgtttcttagtctcacataggaaatcctttttagtctgtcttgggcccaggactccagtccgattttcctcccattcctacctgccctcttggttttgaatgttccacacaacttcattcctttctttgttaattggcttttcctttacttagaatgctttcccccttcctgctttttagggagaacagggtaaactgttctccctatccttcattgagtctcctttcttttttctaaagttttttcttatcagcatccctcccccaatttgagctcattttctagaaagaattaatagctttcttatatgactctcaagatatttctgtgtggttctctaacagccttcatttattttatatggtaattatagatgtccatttgttctagggaaggcaggtgtcaggtcttactcatctttatattcctggtttgacatacagtgcctgatgtctagtaagcacttgatatctgtttattttaatgtttatgccctacattatctatcacaagtattaaagattgataggtgctctgtaaatgttaaattgagttaattattttcaatcttacaggaagttacataagtcattcctgtattcatttgtgaattttcgacatcctatattaagagttgcacttagaatgtgagttccatgagggcaacagcacttctgtcttactgctctgtctgctatgttggcccataattaaccactcagtaagccttttgtgaaaacaacctcaatgagtcttctacctcaagtcttttgaataggaatggatttaaagctgacccctaatacatctttcaaactttaagtcagtaaattttttacaaacttttttaagttgataaatccctcagaaattattctgaggaagctgatgggatagaaatgaaacagactaaggggctccaggcaatcaccactccccttcgttctccttcctctgttggtggggatcaatagagcaggatcctcaaaactgtggagttctttggagcatactttgaaagcctctaattctattccacgctctaatttccaaaagagggaactgaggcccgtggtggttaaatgccctttccgaggttacacagctatacatggtagagccgacccatgtcttctgactctcatcccgttgcacttacaactagcctgcatgttccccttttcccatatcgcatggatagcatcttacgcatctaagtttttttctttaataatgatcttctcttttctttaagagacaccatcactccgagttgtaccacttgcaccaggctaaattattcctcagtgtttacccctttcagatatttatagaccatcattatggcactccctagtcacctgtcagcttcctaatatgtacatatatggtttctttaatctttctgtacagtcggcttctctagtcccttaatcatttgtaccattctctctctaatgcctataagggaactgtttaaatatagtccatatgggaaaagtaacctcaacatgttgtaacagggggcagaaaaacacgctgaatagatgaaaggaacaatctacaggttaattagtagtatggccacaaatatgtgcacagttttgtttcagaaataaagcaagctgtatttgttgttaactatctcttctttgaacttaacagaatgctgataatgccaagctgtgtttacagtccaaatttttgctgaagaccttcaactttgcactctccctgtgtggtatctcttgcccaagacagaacttcaaataaaatcacatagctgatgcaagaaaccgttactgagcgtatccatttttatgcagtttctgtggacttacatggtttctgggagctccctataagccttagtaagggaaagctcttgacttatctcactagttattagggatttggatatatgtttactaaatgtgataatctaagtatggaaactacattagtacaagaggaatcacccagaaatactctactggcataaataaaacattacctattgcccagttttctcatttgtttcattttgtaacttttataatgtgtcaataagtttgaagtcttgaagggctgcccagaaaccaccacagagtggattttccttaccctcaatctgccttcatcaaaatttagtttgtgtgtttatcctataaaatttatctcataataaaaactgaagactaggacggtccttagaaaaacacttgattcggtgtatttattttataaaagggagtcacagagagaaaatgtggccagctcaggtacatggcttcctaggcaatgttccatttcccaaaactttcattggtccagaaagtgtaccttcattcccaaccaaatccttcctataatgctttccatgcctttcttctgtggctctctctgatgatctcacaggtctataagctcttacaggtagaaatatgatttcttgctgtgttcttattataaagcattgccatgcaactgagaagtaatgagagccagtggattttattagaatggaattttaacttttctactttaaaacccagtgattctgctagtctggaggtagcaaagaaggatgactattttctctctcacacaaagtaagattctgaaggggcttattctctgaatgaaaaacgagaggagaaaagtaagaaccttctaatgttttattcaaatgttaacaaagaaatttgagaagcgtgtttccttaaaattgacaccatttttatcccaaacattctggtaagtgatagcagatgactgtgcaagcttctatggagagagagagaggaatttttccaggagcatagtcccagtgggaagtattacctaaaagtaatacactaatcactttcaatcttgcatatttccacatactgtgtgcacacatatgtgtattaataactgttccctagacgtcacttcagcgctcagacagcttagtgttgctatgcgaatgctggagatggaatcagatgcagactacagtttagcaatgagaattcttcagagatacaagaatggaaatggccttaggtcctgcctcatgggtctccctctgagctccagtgtaacatcgggtgtcaagtatttgtggccccatctgcccactccactgagaatctaaatggcattgccagtatttgtgaggtactcatatcttaaaagtcagtgtactcaaatcagtcttgcattctaccttgtggattttgcatggaaattttttagaatgtcattgctgatggaagccccagatatataagtacatctgctccatcgtactggtgatttttatagatattcataagaaaatttattttacagcagtttattttagaggaattctttgcattttatttgtatgtgtgtatacttattttactggcaggatacacacacatgtatatacacacacacacatacatatatacacatacatacatatatatatgaatgtatgtttgtatcctgtcagtaatactttgaggtacctagggctgagattactatttctcttccacctatggctcaaatgggtaaaatagcttactcaaagtcacagttcatacatgtggtgcagcttgaatcaaaactcaattcttctatccacagatttaccactacttgagtagtctgtggtgtttaaaaaaaataataaacaacaggccgggcacagcggctcacacctgtaatcccagcactttgggaggctgaggcaggtggatcacaaggtcaggagtttgagatcagcctggctaacatagtgaaaccccgtttctactaaaaatacaaaaaattagctgggcatggtgacgtgcgcctgtaatcccagctactcgggaggctgaggcaggagaatcacttgaacccgggaggcagaggttgctgtgagccaagattgtgccgttgcactccagcttgggcaacaagagcaaaactctgtctcaaagtaataataataataagacgaagaagtaacaaagccaaactggaaagtttctgttaaatgaatgttctagataataccaacgtataaagcaatcattttataccagctatggtcaaacagggaccagagccttgacttttttttgcctcaacacagctctgcagaacccactcagtaccccatgtcctactgccattcctttggtttccagaacattgagatgtacaaatccaaaacaccacagtgtttcagagagaaatggcatgactctactggttgcaattgtaatggagttcaccttgttctggagtcatacagaagccatgttgtagacttagtgtcccacgcaatactcctaattacaatgaaaatctactgttaggtagaaggagaaattcctcacaatcaggcaacagcgcctactagtgggaagaaactgatacttgaggtagggcacctgggagatagctctgtgcatcttgagagagtgctacactgagagcccaaaggctctcaggtctcatctctcctgacagcttgctatgacatcttaatcaatgaattgcctctctcttaccctttgttattgagtctgtaaatgaagagtttggaatggctactttctaaattttctacacgtcctatgacccttgaaatcctcttaacaatgtattatggatactttgctactaaacggtaaaacagaatcccgagtaagatgaattggcttcctaaggaagtagtgtcaggggagaatagcaccatctttggggccagttccatttatgcaggtaatatggtatggtccagctcaaagatcactggactgggctgagttgcaactctgctacctacttctcaagtcatgtacaaggtcattcctatgttaactcatgtgttgggaagatgataattgtctcatttagcttttagttattataagattcatatgagaatatagaaattatgaagttttatgtgaatctgcaaatttattttcagtctttatatatcacaattttaatttaggctaattataatttttattttcccctttttgttctatattctaaattcgtatctcccatggaggcaggtactgtatggacaaaatcttttattagtcacatattgttttcatccattttgtgctgctatagcagaataactgagactgggtaatttataaagaatgaaaatttattttatcacggttctagaggctggtaagtccaagatcaaggcaccagcaggcttggttttctggtgagggctactctctgtttccaggatggtgctttgtgctacctcctcacatggcagacagtggaagagcaagccagcagaatgccgcatgaagcctctttcacaaagggctttatcccattcatgacagagaagcccgtatggcctgatcaacactttttaataaaatcacaatatctactgctgaattttggagggaaccaattcaaatcatagcacacatcttttctaaaatggaaagggtaatatgatcattggagaaatactcattcctttgcatattggtttactatccaagccaggtgtggtggttcacacttgtaattccagcactttgggaggccgagatgggtggatcacctgatgtcaggagtttgagactagcctggccaacatggtgaaaccccatctctactacaaatatcaaaaaattagccagccatggtggcacacacctgtaatcccagctactcaggaggctggggccagagaattgcttgaacctgggaggcagaggttgcagtgagccaagatcgcaccactgcactccaacctgggcaaccgagtgagactccatctcaaaaaataaaaaaaaaagtttactatccagagaatcttgtccaggttaacactcttttttgtctgctttcttcttttgtgaaacaagaaggtaagagggacactggagaaaacctaatgttctttacaaaatgagtcatagttctccatctgcaaactgtggctcccatttatgtcttggtgtcaatatgactattacatgttatgtacatggattccacctcatttgcaacatagtcttctgcctgagctctgtttgttggatctgatctaactttacatggtcttaagtcacacattgaactcttaagttctgtaggcctctaagcctttttaagttttagtattttcatcgttaaaatgagagtgattataacccttgctttgctgcctccaaatattattgagggatcaaatgcattgataaataagataaagcactagacaaatataagggatgcttgatgacttcacagagggaagattattctgttgctggctgctgaaatacagtagctttagaaaaacccctttgggttcccttattatcaggtttggtctcaaataaccagaataaatttggagatttcctaccacaaaagctaaaagtacctgggcagatttaccctttgagtggacctaagggaaatgcagattcccacgggagagatcacggagcagattcaaaccataaggcaaaaataattgttgcaatagcggttctaactgtactagtaaatattgatttttctgttagcagatcaatcatgaaatgaattctaaatatagaagactggttaaaaaattaagacggagaatgtgaaaatgtccatgtgtaaaaattaacttaaagagaaatcttgctttggccaaaagaaatactactgtttctgtcaggaatgttctgtgatttaatcaagtttcctgcctggccagataattttaggaattgtggacttttaaagtagtaagtcagtttagaaaactggttaagtggacagatgtaaagtcagactgcctaagccccaattccagcttcaatatttaactctgtggttgtgggcaaggcacataatctctttatgctgccttttcatcaactgttatggagataatgatagaacctacatcatagagttgttggggtgactacatgagataatacaattaaatacttaacacctggtccataaaaagcgctgaataaatattgactattatcatcaccccggggtctacaaatttttgtaggattaggattaggattgaaatttctaccgaaaaattccatcagtaaaatattgataaatataaatcttaaccaactgcctcagagacatagggacctctattttccactcattgactgtcatctttagagaacagtccaaagcatgtgcctttctgttctagttgttatgagctctttattttgaagttgaactatatacttcctatagtttaaaggagaaagaagtaggtctcatgctggacaccttctagatgttacctcctccgaatttcatagccaagtatttaaggcagttatgatcatctccctcttagagaagcctagaaaaggttactgcagtgcttgacagcaaatagaaactcaccaagtgcatttgttgagggattgacagaatggctggataagtgactcaactaagaccacttatctagtgagtgcgtctactcagctgcttgttttgaagacaaggaaattcgggctcagaaaatttaggaaacttgtctaggctgccaatagctagtaacaaaggcaagaattgcatatctgattttctttacaccatgttacatctaactgttcaaaagataaccatgtattatactcgaaaatgcaaaacagggttgttttttgttttgtttgttgtggtggtggtgatggtatttttgttttgtttttgctacttttcctgagagtggaagttgttatcaaaaagttactgtcatgactactatgtgtatagatgctattagtttcatcaaggttgggaatagggtatatgttgcccaactttctgcccctctccgcctcatattaaagttccagtttcctagaatatatctcctgggagatttggcactagccatcactgcattccaataccccgggacaaactactcttggtggaacacagaagcatacagtccttgttacagcagtggttctcaaactcacattcctgatggaaagctagagttgaagggtcaacacccaagagctgcagtggaggaccatcacctgtcctgattcgccacctgtggtagatcatgactttcactaagatcccctgaggcttgtggggatggagaagtgatgctggactggcccttcctctttccctgcaggtgttaatgggttctgctcctaaacaatactgatataggtcagagttatgattgaattgtatacatagaaacatgtgctgattgagaaaatgggctttacaagtcagacctggttccagtctcagccacactacattctgcctttgagactttggccaggtgatggaacatcaggtttcttatctaaaaaggagaataattggttggtaggactaaatgaaaaaatgtatgtgaaatgcttaggacagtgctgagcacagataaaaatgcacaataattttctattttttgttagtttccttcacaatacatatatttacatcagcgaaacatgcttgcttttgcaaccttctgtgggactccccctcctaatttaccacctcacctgaagttctaagctaagcaaatctctgtctataaatgaatcacatcgtggttagactttataacaacttccccttgccaggagatcactcagccttcacttcatctcatctggtttgctgcccaggcctttatccactcattcctgaactcctctccctgacaaccttggggttttggcttgttgtgtgcgtgtgtgtgtgtgtgtgtgtgtgtgtgtgtgtgtgttttgttttttgtttttttttactttaccttaatttctctttttggactaagatgttaaaatgtttcttaatgtgactgtctccgaaactgttttgtgtctaccactcatcctagtggcagtcattgatccttttcttgttgcgagtgtttgagtgtgggtgtgtgtgagtgtgtatatgtatttgtagagggaaaaacaagagagagggaaacagacattggagccacctttcccccactagccacgtacctgttgaaccttcaagcctctctatagaatcagatatacacaagcacagtgacagaactacatgtgtcctacagtccagcttttaagatatgataaaaactcttgtattcacagagctaaatggcaataaccataggagattgcatattgctacattatgtaaagacagagtcccaagaaaatagtgagaactcagtttgatgtatgatgtgatatgtgatatcttactttacatggctaacagttgacattctttgtggattctatattgtctaaggctacagaagagccatatgataaattcatcggcaacccaaaagaagcctgttctatcgcagtgcttccaattaatataagtaaaccactttctctggctcaatgctaccaaaatattttatgagaaaatttagctgattctgctcatgtatattttcaatggatggaaagccattgcaaacttttcaaactaaaatataaagatagcattagggagaatactctctctggtgaaaaacaacatgtattatgatgcgttaggaatttctttttttcagccaactcgtggttgagcagtctgtccccaaactgttttgcatgcggacgaaacctgtttgggcgatacttgtcagcttttcttctgacaagcaggacagaaataggcacccccagaacactgagtttgacttgactcaacatagaatcacctggagagttttaaaagtttctctcctgtaatatcccacctccagaccaatgaaatcagaatctttggagttgggaaccagggatcaatatttttttttttaagtttcccagatgattgcaatatacaggcaagattgagagtcactgtcctagagtataagcagtttaagaaacaagttgtctattattacatgcatcaatactacagagtccatgaaataaaagctttggtgataagaaaatgccaccatcctagagccttcagttaacatcatatgggcctgtcatataaagaatgcaaactcattctgttatctttttgggccttcagtggaagataatttttaaatcagcttaatggaaactgtgcttcaggaaaataacttcagtagccatatgtaggataaactggagcaggttttgtttctaggaatatgttgccatcatttcactacccttatataatcttattgattcaacttttagaaccaagactttttgcagaatatatcgaagaatgtgcttaatgggaatgctgatatatcatacaattggcatatagagcttcagttcattatcatatttaaaggtacaatattaattttgcttgtgcttaaaatgtctattataattcaagtagcaaggaagacataaagaaaaatgtgacctggctttacatctgcacatatttaatactttacatttgatggtgaataatgggaaagtttgggagtatgtcatgctcagtcaccatgcatcaactcccaaaatggctgtggacagctttggtcctgcctcaaaacaagcactgcttgcaaaagagggtctgtggcttatttttatcagttgtgtggtgatcacaggaaaaacattttaaataaaaagtttattttgccatcatgaaagaaacaaattcatattaccaaaagagaaaataaatatgacaacccagcctggtgcagtggttcatgactataatcccggcacctcaggaggccaaggttggagggttgcatgatcccaggagcttgagaccagcctgggaagcacagcaagaccctatctgtacaggaaaatattaaaaattagctgggcttggtggcgtgtgcctatagtcccagctactggtggcaagggctgagggaggaggatcacttgagcccaggagttcaagggtgtagtgaaccatgatcgcactactgccctccagcctgggcaacagagtgagatcctgtcacaaaaaaaaaaaaaaaaaaaaaaaaaaaaaaaaaaaaaaaaaaaaaaaaaaaaaaccccaaaaaaaaaaccccctttttcccttttcccctttttttttttaaaccgggaaatttcctgggaaggccctttttccccccgccccccccaaaaaagggcggggaaaaatttaaacttttaaaaaaaccccctttaaaaaaaatttggaaaagtttttttggggggaaggggggggaaatcaaaaaattcaaaaaaacggggagcccttgggaaaaccctttaaaaggaggggggttttgttaataccccgggggggaaaagacacctttttcaaaaaattggggggggggtctataaggggaaaaaccccgggggaggaaaaaaaaaaaaatgggggcggggcactaaaagagccccccccccaccttgtatttaaaaaaaaaggggttttaattataaacccccccctttttttgggttttggggggggaaataatttaaattttcctggggagagaaggccccccctgggggggggggggcccctcttggaaagggaaaattttttttagggacagggcgggcgccacaacaagggggaaaaaaattttttttaacaccccaccccgggggggggaagaaaaaaaaaaagggggggggtccttttatagccccaggagccctaaaaaaaggggaaaaataacccccgggggttctttgtgtaaaaaaaggggggaaaaactttctcaaaaaaagggggcccaaaaaaaggggggggggttttaaaaaaggggggggaaaaggccctttaggggcgcccaccccttggtgggggaaactttcctcctctagaaaaccccccaaaaaaacaaatttaaaaggttttctctgaaaaaggaaaaaaaggcccttttttgccccggggggggggggcattaaaggggggccccccttttttcgccgggaaaaaaggggccaagaggtacccccgagggggcccctcgttccaaaaaaaaagnnnnnnnnnnnnnnnnnnnnccccttttattttttgttgtttttttagaaccacactttttccaataatattaaaaagaggtgtttgagaggaggtttatattcaccacggggggatagaagagcccgcggtgctctctattatagagggacattattatattgtgcgtggcgtaaagagtgtttttattttcccggggcggaggagggcccataaaaaaaatgtgggcccgcgtcttccccgcgcacattattaatcctcccccttgaggggaaaaaaagagaaaatttgggggttatttattttcaattcccccaggccaattctcaaaaaaggattgtgggaagattttggttctcccttaaaaaaaagaatgtttttaaaaagaggggggggggctttttttccagagggggggggcccccggaaaacctttttaaaaaaaaggttttttttgccccaaagaaagaaccaatttctttttccaaaaaagaaaaaaattatgccccccccccctggggcagggggttaaaacaaaaaacccggccccccagggggcaaaggttgggggggtgtattatccccgggggtttggcccacccggggaagacaaaaaaacccctttttggccggggaaattttaaaaatttctggggggggggggggggggccaaaaacccccccccttggtggcaagggttaaggaaaaggattccttttggccccggggtttaaggggggggtgacccaattttccccaatgcccccccccccgggggaaaaaaagagattcctttcccccaaaaaaaaaaaaaaaaaaaaaaaaaaaaaaaaaaaaaaaaaaaaaaaaaaaacacaaagaaaagaaaacccatatcacgctatgccacttctcttgttcaacctgtagatttccctggaatgccactattcacccatgccatccccaaaaatgacttgttaaaattctaactcttcagattagctccattattaagacttctgtaaagtctttctgttggtaagaggaggtaaatcagagatatcagaacaatcaggaagccattgcaatagcctttgaaaggaagggtgattaggtagtaggcatgtggtggaaagcaggcatttctgacacattgctgaggttgctatagatgggagagcagaggtgaaggataagaagaattgttggctgaatctagagtcagtacaaagcaatatataaaataagtaataatatataaacaccatttttggttttgtttggaaatcttaattcactgacaaagttccccatcggctgccggccctctgtcatcggatcttttgattgactgactgctcagcattggcagcaagctcttcacaccagccctgggtctgagctaatcagctgtgtttccttcatgctctgatgccttgaagtttggtactattctcctggtttctcttgtttaaaagtgctgagatacttgtctaaaagatgggccttaagattgtggtgtgcttttaataatgtgtggggtaagtgcctctagaggcaagcatacactatgcttgagtaactttctctccattctgaatctctccctaaaggacacagtttgtaaatgtttgttcatgtgaaaagggaagattcaggtaccttttctgtcctactgatgtgtggggctatttttatgttttgttcttcacttttttctgtacttgtgatttaaaggtgccagactggttaccctcaaggctagtgtccccactgtatcccaagaatagaaaaaataatgagaggcagcaaaactggcctgtgtctgagtccagcatattaggctgacccactctagaggaatattctccaaagcataaagtagaagatcattccttaggaatacaatacagtccatctgttttcatagctgagaaggcaattccgtgtcatgccatcatggagccactgcagtgttttggtatccaagccatagtcactcattctctccgtgagggaaaactagaatgtcttttcctcttccacctttacctttcaaaattccatccttgaaggttcggctcaaatgcttctttctccacacaacctttcctgagcccctgtgagtgtggttttccttccacattccatagcactttcttctaagacgtgttacatgctttgccatgtgactattgcatgtaggttgtcttgactgtgagaggcactgacatcgtgacatcgtcgaattcatttttgtatatcacacagaaggagaacatagtcgtgggcaagagtagatatttgaggttgaatagatggaccatttcaaagcttatcttttcagcctgacctttaaggctttgctctggccgttccctctaaatcagtgattgaagtttgctcccagatcctcatgagtagctatcaaactctccataagccatgtaggctcaggttcttggattccaggtattacacttcgggcatcatagtctgaatcaaaattgctacttttagctgcttagtagactgccattaccaatagtttaatgagaactacttttttaggggacggggggaagtgtggtccacagatccctgatagcccttcgtgtactatgtagtgaatctgcttgacatctagaaaagggaagagtaatatagaaaaagaattttgttgacctgcctgcatttaacaaatgtaaaatgtaaaattacagctttcacaggaatctaatatgcttttaataatcatatggattggtaatccatttactcctaatccctaattcgttttctgcaatgaaatgttgtcaaagggtggcatgaagctgttagaatttaagcatgattttcaaacatagcacattttttttgtggttttgtttttttggttttttttttttttttttttcagaataatttcaaaaatagtgccatatgaaatagttttgttactgttggcaggaaagtccaaaatgttatctcataataaaaacaggtacaagttcagtcttggataaaaacttttgaagtctgccacaaacaaatactatacaaaattttttcatcaaatgtcaagactgtggtatcaagactttataatgatatcaactgtagtggtgacagcttagtttccaatactttaactctttttccagcacttcatatttctttttggtttgagatgaagtctcgctctgtcacccagctggagtgcagtggcgccatctcagctcactgcaacctctgcctcccgggttcaagcgattctcctgcctcagcctcctgagtagctgtggttacaggcacacaccaccacgcccagctattttttgtatttttcatagagatggggtttcaccatgttgaccaggctggtcttgaactcctgacctcaggtgatccacccacctcggcctcccaaagtgctgggattgaagacatgagccactgcacccagccttcatatttcttattccttaggaaaaaaactaagatgtatactttgggttatatttaaagtcacattcaaatcccacaacaggatataaagaaatacttttcagggccaaatacaactggagaggattagaaataaatttacctttttttctctcacgttgaaacatctagccctcccatgtttgagtgtgaaatggctgtcaatccaatgtgatggagtgctgaaagccgtcttcagtgagaagtctctccataatgctccctaacatcagatccatgttaatcctgatgcacagaactgggaataggtaatatagcatagtgtttaagagcacagatgctgaagttagactgcttaggctggaatttagttaaccatttgtgtgactcagtttcctcatctgtgaaataggcataataacagtacctgcatatagactgttgtgaatatgaaatgagttaatatatctaaagcccctagaaaaagtctgacatatgtgaagcactacatttgctataccttatctatcaaagcctacagcttctggctaacattcccagtgttctataattattagatagaattttttttaacttagtagaaacaaagactaagaagggaaactagatgtggacgtgacgtctagctcaagattcccatgatggagccacatagagatatggatggcaaccagcataatgcctctcactgacataactatttgtctgaatttatattttattgttattatttaaagcttactgcaaattttaaaaactgaaacctgatgtccatatgtaggccagatgccacattaatcaatttaagaatgctggagcttcgcagaatactgcatgaacaacgagaaccgtggccctgaaagactcaaaaccctacagtatatgaaactattgcaggatgtgtggatgttcaaaggaataacagacttggaagcaatgcttactgaattttgatgtattaaaggatgtcaagtccaagagagagataaggtctcagaagacagaactagaaccatggggtaagcagttagaatgaggaagcactatggctcagtaggagaaagaaccttttagccatcaaagcgatctagaaattaaaggactgccttgggatctgcctgtcactgagagctggctgcagaggttttacaatcagggcttttgtaaaaggaactaaaatttgagtttggacccaattatcttacattctaactggatgtgtagaatctccaagaagaaagactcttctgtactgttttatagattttgccttccactccaaacatcctgagtcatgttccttttatacttgcatgtgagatgagagtcagagcactgacctcaaagccagcgaccgggttctactgttcctttctgcaagaacttagactatgagactcaatcccctcaaccgattaatgtaaaatcccctccatgccaatcttgcagaggataggggtggctgtactggtgatcttgctggggtaatggggtaatagtactggggtaatgacggcaggagtggtggttctattgctgctgacgttatgaacctgctttctcctccactttggctttagcaggactgaagtactccttggtgtgttcttatcaaacccttttttttccaggccgctgtgctcgctgtggagaaaacgtagttggggaaggtacaggatgcactgccatggatcaggtcttccacgtggattgttttacctgcatcatctgcaacaacaagctccgagggcagccattctatgctgtggaaaagaaagcatactgcgagccctgctacattgtaagttccagatttgttcctcaagcactttgcaaagatgtcttctgtggctgaatgccagtcactctagatagaatatagccatcagatctttgcttcttcctagacttcaaaatgtgtgtgtggggtgtgtgtgtgtgtgtgtgtgtgtgtgcgtgcgcgcatgtaaattagcatattgtaatttttttctacacatcccccattcataagcagtcagaaaggtgtattagcatgggactgccattcagttagtggtctgctgggaagatcatcagcctgtggctttctagcatgtatgtacaagctaaaattttctttcttaaagcatcagaaagctttccaagtagctgagtcacacctcttataagatctcaccctacatttgaagtgcccagtagtttcaaggaaactttacagaatctctggacttgtcagtcctcttccagaatactgggccctttgagtccatttttatctaccaaaatgtttcttccccctcttatccaacaggtttttaatgatgcaaacaggggaactgtttattataaagcaccttaaagagaaatgaacagtaatgctgactgagctaatcattgttttcttttattacagaacacaaaaactatattttaataatatacctgggtaactaaaaaattctcagtcatgttaccttagcgttttacaatgctacttacttaatctacctgttaaactattctctggtagagtaatttgatgaatgaacacagacttttttcatctattgtaaatttctttgctatccttcagcatgattttaatctttgtttaacacatgttgatgggaaaagtagtgttttttgtttgtttgttatgtaaacccacaaaacagtcatggtttgtccctcagtgcccagagatttcaacataaaagacaccttggtttctttaccaaggtattgggagtcatacttggctttacaaggttcacatttattgaagacgtttttggcctggttggtattttcctataacttggcagctctaacccattgtaaccttggggtctgtagcacagatctgaaagttcatcaagattaaggcttcgtaggattaaatatggctttgcatctgtcttaggttcaattttatttcgttttctttccaaaggtaacttaatacatgtaacatcatttctttccaaaggtagcttaaacacatgtagagccatacagtggtagagttggaaaaaaaatcttaaaatcatttgcgtaattactctctttagcaatgagaatgccaagacatacagaagaggaaagcgacttcgtatgacctatcattagtgtcagaaccaaggctgcattccgttattcacgctccacagtcttagattctttgcagatgctacatggttttcattttcctaaacataaagataaacaaagtaatgtactgttgatctggaaggagcaattatgcataagcgaaagtctagtaaacaaaagcttacctctttagaatataagaatatttcaaatatctttgaaatctttattgaaaaaagaaaggcattacataattccttgcctttttaaacagactaaaccgggtgtcattcacaatggcttggcaccacgtttatgaaattatttattgccacgagccctaaggtagtgatgttggcagagtgtgtagaggcacccagggttgtccttacaccaagtaaacacatactgctgtgtttttttatagctcctgtctattttttatccctttttgactccatagttgatttttgctactttaatgatgctactgtggcagcagccttcttcagttgttttgtttcaacccttgttagcttgaaatcatatagacagtattgggaaacagtgtaacagggtgggaagaacatgaatttgaatttcgttacgtcacttagtgcctcccctccttgggaaaattatttactctttctaagtatcagttgcctcatctatataatggggacgatggcagttattttccatgaagaagaaatgagacaatcctagtaaagcacactgggcctcttcaggaaaagtagtggaataaatgttattctgggattaactttaatgatgtttctgaaactgtttaatatttctgaatgtgggaaccttacatgtgcagtgaaattcactgggctttaggaaattattataacctttcagacatactcctcgcatttttacatgtttgcttgcttttctgagtgcgtaacaaaactggagaaggtctaatctgattaaataataggtttctacagtgtgtgggctcaagtttctatctccattccaggcataggatgggtctctgtgattctgtaggatgccagccccttcttctttggtttgttgttactatactatgcttatgagaaggaaaactatccgggagatatttaatcgcgtacttggaagaactgggtgaattcaaataatggaaattctaaccatttttttttttttacttctttccctcataagaacatttaatcaaggtttttctttaatgagatctattcgtggtgactctaaaatgtaatttaattcttatcagaattcagttaagctttaccaaagacccttgttcaatattgattcgagttcagcacagtcctcaagccctcagatggatgtatcagaactttaatttcttctgaacttttatatgtccaataagctgcatactagaagtgtaaggaggttgaggaaattgggcaaatgaaataaaacaagttggctttgaagatagtttgcattaaggagaatcctagaactgtgcgtctctcttggaaccaaaagccttagaacaggaagcatattctgtgtgatccagcaaaattgcctttggttacactgttgaaaactgatgtctaaaaggtattccatacaaaccagagcaaacctagcccttggccatcagtcagtgtgcctgtcttttttttttttttaattgatggaatgagaatattcaagatagtggcttaattatttttgtataaggaccagcatgtttgatactctgagttcaggaatgagaccagtctaatgtaaattaaatttacttctgcctaaattggttgttgatcaacttaagatcctattaaaattaaaaatttacatgattttgagggaaaatgcaccagtaatgtctgcagctttggttcaatgatttttaatattttcctgtggtttattgagtttgttcttaatctttgtgcttaagtagttatgattaaacagtttgattcagtatagcattgtaattctctttaatcattttacatattttgttttctattttttatttattaacataatacaaatgttcatatagttttgcattgttagtattcatttttagatttttatctgtttagttttacatttagattacacacttcattttaaaaccatttgccagtcaaaatgtattgtgtgttttgcaatcttttagaattgtaaataacatgcctatagatagttaataaaaattttattttttattttgaattacatccttagcataaattctttgatttatattaccaaatcaaatttaatctggaggacttttgcattaccttgctagatttctttagaaatatttttctaatttacagaaccatcaacaataatgaaactatatgttaaaatgcaaactatcccctatggcagaagtttatttatattttctgaactaatttaataagcacattatgtcttagttattttaagtttgtgtaattattagcaaaatcaatgagatgcttttcttctttggtgatatgtctcttgaaagcctagttttggttattcttatagatttgaatatgtaaacagattaaagtaaagatcactaaaactttgttaggaagtgatataaatagaatgtatttatcctaattctagctctcctggtgtgaccttgggtaaatcatttagcttctgagtatcagtgtcctcatttactaaagggagatattaatttctcccatgtcttcacagataaggaataagcagttgtgatattttgtatacatgaaattatttactaatataagtgcttaatctgattaacagaatttttatcattgctttttttttcccctttagtataatgtgatacactatagaaaccctctaaatctggggcaatttcttggctgtagttgctatggaaatactgaaataaataaatgtcatggaaggaatataaggacacatattaaaagcggaggttcatgctttgcttaagaagatttttatgttggtatgaatatgaagggcagcaacagtgcctcctgcttatgtacccttctgcacataaagagacagccttactcataagtatagttttagaaaaagaattgctgttttattcctagcattaccaaggagtctgggcctagggacagagtgcatcagaaattctcagcaaaagtctatttatgaagtggcagccaaggatcctcccccaaaccagtgcttttattcccagtggatggactccaggtcctaactctctgacagcagaaggtggtacagacatttttactagagttgaaatccaaatgactaaagggcctctggaaataggaggccaactccacaggaggctaaacactttaaggtacctgaaacttggcgcattagtgaccaacccactagcagccttttgctcccttatgtcatcaaatggctacagttaaaacattctaacttgtcagcctacattaagaggtagttttgtacctctgcaggaaagctgttcttttatatactcaattcttcttaataaaatgttttaaaagcacttatggccagtgctttatgtggatgttggaaaaggaagcaagagtttggactaaacctgaaaaatccacatgaactttcttcctttttttctaattgcctacgtctgctctctcacctccaaggagtgtttgtctgtgcctcttgtctctctttctgtctcacacaacacacacacacacacacacacacacacacacacacacacactttcttcttgctgttacatcatcatttcaccagaactctcctaggaaggagaaaaatggttcaagaaagagaaaaatttgtcaagcactctcttgggaagttaagcatgttacccactgggaatagttatctcttccattcatacagccccttacattttataatgctaccgagcatctgttgttgcatgctgtcatacctagtagagccttgtgaaatagatcatggggagattattagtctcattttacaaatgtggctcggatgttttcaaagtaaatgacaaaacaaagactatgaataacttttataatttacactttattgcttggcccatactaacatccgtgctaacattcagcaactaattttttttttcttttttgagatgtggtcttgctgttgttgcccaggctgaactcaaactcctgggataaaatgatcttcctgcctcagcctcgcaagtagctaggactacaggcttgcaccaccacgtgcaacgtgcaacttaatgttcaactcttttttttttttttttttttttttttggagacagggtctctctctgtcgcccaggctggagtgcagtggtatgatcttggctcactgcaatctccacctcccggattcaagcaattctcctgccttagcctcctgagtagctgggattacaggcgcccaccaccacgcccggctaatttttttattttttcatagagacggggtttaaccatgttggccaggctggtctcaaactcctgacctcaggttatccactgccttggcctcccaaagtgcttggattacaggcatgagccatcacacccagcccatgttaaattttctacgtgaagatcctaaaagcccccaactactcagatttaaaatcaggtataattatagccttttcccagaaaattttaattgataaccacctgactcatgctttccagtatcacagaacctgaaatgctaaacttctactgatgaaaaaccataagcccttgtattttcttgagcatttgaggccttaaaaagcaaaaaaaaaaggttaaaaatatttataacaactgacattgacattaacatttgctcagtgctttaacttttatgaagcacttttcttttatcatattaccctctaattaatgatcctagaaaatagttacagttatttttgccttcatttccagtggcaagaaactgaatcttagaaagtgtcagcttgcttagttccatagagtatgagtgtcagagctaatacttgaccctgggcctctgattcccaaggccggctatctctacatctaacagaaaacactggaaatcccatttgctgttgctaggttacctttttcccatgatggtaattcttttttaaaatcctaagtttttcattaatgtacgcccattagagaaaaattagcaaatagaagaagaaaggtatgtaattctctcatctcagtataatagttcacattttgtcatgcacttcttttctgttatgtttacctgtgggtatggaaggatgtatacaaatgtaaccacacatctgtatacatgtggttacatacacacacacacaatgagatcataccttaactattggttagtaccttgcttttgttacataacagtatatcaaactttgccttctatacagtccgttttaaatattcttgaaccactgaaaaagaatatatgtcacctacatatgctttctgaaggttgattcaaggatattttccaaaaggcaaataaagtaatcaaaataatatgcacaagagatgcatagcaaataaaatggtgaaaagcaatgaagtaataaaactactggtaaaaaaataaaggggcaaagatgtagtagtaaactcagaccaaaataagataatattaattacctactaactacaatattcatagaagaaaagtaccattcagtacaaaggtatcaagcagtctgaagaacattactttttgataaatgtcacagttccccatgaagaatagccctgagctttccttcattaaatatcattatattgaaatgtataatttaaaaatactgaagtaagagataagaagggtgaaaacatattctttataaaacctgaacacattgcttttagtctttgataaatcataaaaaggagttaaataatatgattgataacgttaatttaatccacatacactgatctatgcaaacaaagagtttctatcttctgtctaaatctgcatgggagatttagaaaaacatttatcatatcaaagtctaataggaaattgtagacagttcctactgtggctggcagaattacatgtagccatatagtagaacaagaaatgaataaatacataagcgcactcttgggttaaggaatcttagaaagtagtgatgatgctaacactgcatagcaatgagaacgggatggagccgacatagtatgccaagtaatactagtctcattaattgcaacaggaaacagtgcatatgtattaacttaaaaaactagaacagacaagaaaatcaaccttaaagaaatccattaaaataaaacattgttgataagttgaaaaatactgcaatgtttagatctggggatgattttttgaaaagagcagtgaaataaacatttggttaagataaccaagaaagaaacaaaaactacagaaaattaggaatgaaaaagacactcagcatagatacagatgacattttaaaattattgcacttaaaattttatatgagagactatgttctatgcaaatctaaagtacaggtgaaagaaacttgaataaactcgtaaagacagatggaatgtgaagctactacttgcaaaagagccagaaaatttcactaatcaaagttttcagatctccaaagaacaaatgatttctgtgctatttcaactttaagagcctagcaaaaaacgagatgcttaccaaatcattttataaagctagcgtgctcccaataataatacctaacctaggttacccccagaagacaattctgtgataatctaactttcataaatgcagaaatcctaagtgaaatattagcaaattgaataccacataataaaacattccagttattccatattcagtgctagaacaattaggaatcttttagcataatttgctatattgatatatcaaaattttagaaaaactagtaatctccatagatgcttttcattaaaagggcatttaataaaatttttcatgcattcatatttaaaaacaaaaacaatggcaatgcaaaataagctctaagtagtatttacatatttcgatttattatgcaacatttctaacatatataaagatatgaagcataatgacaaaggtccatgtacctgttatccaatttaagaaataaaacattaaaaattcagtagaaatcccttgggttctattccatgatcatgttcccccagagagagccactattctaaatttgttttttatcattttatgcatttctttaaacaatatgtagtgttgttagcacatagtgtttcttaattttaaataaatggcattctattatttgtattagtgggagacttttccactcaacatcttaagactgtatgtacatatagtcatttacaaatgattgattattcttctagagaacctgaaaaattttaaatattggaataatgaaagtttagtaagctgacaatataaaaatgacaattttaggtttagaatatataacagaaaagtgtcctcatacagaagcaataaaaaatataaaatatctaggtaaaactttaaaacgtataaatgatctaagtgaggaatgctaaaaaagttttgcatgaataattaactcatgagcaaaaagggtattttggggattgaatgtgctttggaaagcctctctcgctttaatagacattcgtattatcaccctttattatacaacaatgttttcagtgggggaatgaatagttactacactctcctttgctagtggtatttatttagccctttcaaccaaatatcccccagccctctgctcatcttagttactgctcaccacatccttgcacgttccaaggcagcccttacttggtaaggaaagagaggcacagacctgtaagtggattgcccagaacaacaaagaggcctagctgaacataaccctttcttcccagttcctgttgcaaaccgtattaactgctgttgtcatagaattagaatgctttttaaagtccagcaggaaccttagaaattcaataatgccattttatagctgagaaagctaaatcccaagaaagctgagtgttttgcctgaggttatacgatttattaacggcagaggtgggactagaaaccatgagtcttcatgaggccttcaaagaactactttctttgggaccgacatgaagggtttaaacatttgtggctacaggtccagagagacatccctagaaaatgctgagattagtaagattttggttggagagtgtagaaataggacagcgtttgctttcaccctaaccagaatgaagggtctcagatttccaggttaaatgcctctgaaactttattctagaaccttcccactgccctagtttgtttaagtcaagcatgaactcaccactcaatgtttgccagagtttggatgaatgtcagcatcaggctactgtaataatggtttaagattatttaatcccattagttatacacttcattaggctgagtgaattgttggcagtggttcagtaaacttcctcctttagagataaaaggacagaaagaaaataggaaaggagcctattcctcattttctttcatagttataattctttttttttttttttttttttttttcccgagacggggtcttgctctgtcacccaggctggagtgcagtggtgcaatctcggctcaccgcaagctccacctgccgggttcacgccattctcctgcctcagcctcccgagtagttgggactacaagcacccgccaccacgcccagctattttttttttttttttttttgtatttttagtagagatgggtttcaccgtgttagccaggatggtcttgatctcctgacctcatgatccgcctgccttggcctcccaaagtgctgggattacaggggtgagccactgcactggccataattcttaatggataaaggaatgataattacccagctgtagcgtggactccatattagtacggtctcctaaactactcttcattctcaggagaaataaatgtttgtaacctaatattctctattagaagaaaatggacagtggcagagaagagagtgtgtgtccgtgtgatcaggccataaagttaatcttaaaagtaaacctgaaaataaattcaaagattctagatatgagagtcttttacgtagtggggttggtatgaggcagtaaatgattttaaggaaagaatatagaatttaaagtgagacctggttcacactcagccagctgctattctgcattcttccctttacttttagcttcagtttcctcacacttagaatgaaaacaaacaataagagcaaaccagtttgttatatgttctcacatctgactttgtaaaacagtttgaaaacattagcgtgctcagctccaggattgtcccatgcaggcaatgactgttacatctttcccttctttgtagtttatttttgcccagatggatctgcattcatttgtactatctattataatattgttagaattcactattatactgtagaattcattaattctattatattgtagaattcactaattctataatattgtacaattcacattatatattataacattgtagaattcaccaataatattgtaaaagtcactaataattcataaaaggaatgaattcatttgtgatcttatcaaaaaaaatttaaaaagaaaaaagaggccgggcacagtagctcacgcctgtaatcccagcacgttgggaggccgaggtgcacagatcacttgaggtcaggagttcgagaccagactggctaacatagtgaaactccatctctactaaaaatacaaaaattagctgaatgtggtggcacaagcctgtaatcccagctactcgggaggctgaggcaggagaatcacttgaacccaggaggcagaggttgcagtgagctgggatttgtgccactgcactccagcctgggcgacagagtgagactccatctcaaaaaaaaaaaaaaagtaaagaaagaaagaaaggaagaaagggagaaagaaagaaagaaagaggcacttgaatgaaagtactgtttcttagctcacatggttatagggtgaaatgaggattcggagaggacaggactgaacaaaaatcagtgtgggggctttgagtcgtaaataactgtaccagggcttagccccagttagacacataacaaatctgcaagagagaattttgcctaacttgaatcaccaaaggacaactgtaagtcagcatttcaggctctggaatattacttgcatacccacttggtttgagaacttgtggagtctgagagatggcaagtcatgagactaggagctcggttttctcaaaatgtgtcagcggtcacctgctttgtaatcactgtgaactcctcattaaaaagtaaagttctggactcctccccagaatttctgcacaaggagacaggaactttgcatcttttgcaaggctcctgggacagcagggagttgggaggtaaatttttatgcacagtcaagtttgaaatccactagtctgtacttccagtcaagctcatgcaaaaattggtcccaaaatatgtttgcattcttatctcccatcagctctcctacacattctttttacaacacttgcccaaggtgaggactcttctcctggacattgatatggaggtttctctgtctattcccatgccattggttgcctaccttctgccttttccgatctccagccttaaaatgctttcctggaacttaaccaactagatgtaaccatttctgaacatgcaaggttttcatttccacatctctcataggattgatcctcaccacaactggtattatcaagtcactggcatccttgacacactccagtactgacaggaaccccttgaagactgtgcggggtgcggggaggtcacccttttttcttttcttttcttttcttttttttgagacagagtctcactctgtagcccaggctggagtgcagtggcgccatcttggctcactgcaacctctgcctcctgggttcgcgccattctcctgcctcggcctcccgagtagctgggactacaggtgcccgccaccaagcccagctaatttttgtatttttagtagagacggggtttcaccgtgttagccaggatgatctcgatctcctgactgcagggaggtcacctttaattcgtctttgtcttttctgtagtgcttatcataataggtgaacctattgctgctctgatagtgagggggatttggggggagcctgtgtcactctagcactatgtctccccacagtcattgactcacataccctttgcttgccccttcgtgcacctaggacctgagactatgtatgtataagaaggaaggaggagaacttggctctgagagactatgaacagagtcattgctgaaatgtaaatatcaaagattgaagggaaagatgtgagagtgaagccagctgtctagcttccagccgtagaatgatcataagagctactacactcaaggtcaaacacactgactcacccatgaaaattgccaaggagtttgagtggaagttctctgatattccaatgactttgaatgggacacggtaattccttcccacagccagggcttacttaaaataagtaaatgaataaataaagtctactccctggatcttttttttgctcttgtccctgcagagtaaggggatgccagccaaggctgacatcatcattatagcaagacaggtgctttttttgaatacttcacaaggacaagggcctggtattatgtaggtcttcaaagaatatatatatatataaatttttttaattcagtctcctacatttatagtatggggaaataagacaagagcgaggaatgccttgcttgggatattgcaattggatggctgcactgaggactatttaagcaaccttaaaatcacaaacacacatctgtgatgactttttaattatatctgtcattttggaaaagatattaaacatcttcctcagaagttatttttactttacacactctttaataatgttaaaagatatttgatgcaatttatattaataaagctcatgggacgtgttagtaaaaataaaattgaatcttctaaaatatattcctttaaaaatgaatgtctataattttatgctagtttaagcaaataatctgaataaatcctgtttgtttagcataacacatgtacacgtagtttctccacaaaatggaacgcgctaaatgtgttggggcctcaggaaagaactagtggaagggggcataggaggatttgggggcaaaaggaggaatccaaaaagaaggtcttcatggaggaagagacctgtcccaatgtgtcattcggtagatctcactttctcctagtacctcatagtcattcatttttcacccccaacagacaagtggagactgatattattcccttttacaatgtaacaaaatcaaagcttagaaaaccagggggtttggaaaataaggaatttgtgtaggattaaaatagaactttgagctcctggactctgaatcttagcttctaccttgcacttaaataaatttatgctaacagatgtcctgtcatcagataggacttttttttttctttttaatgtcggcaagtctcattgttacagctctctggtctgcccagtttggttacacctgttttgagattccttgcctatacccttccaactgaagacaagcacttcctactgtacttacagaactttcatctatgtcttggtttaatcttttgcctttgttttaaccgtttaccacttctgctttatattggtaggtaatcttacccccaaatacatagactatgagctccttaggagcaaactcatttttttttcctgttgttctttgtgtctttttttccctatccacctccaaatcttactccacatttctgaaaatagcacccaaagcaatacctctcactttggggagtatttagtacattttttaaaaaatgaatgtattatacagtctggatcaccataacaaaaatacaaggactgagtgccttaaataacagagatttattttcttatagattgagaatggaagtccgagatcagggtgttagcactgtaggattctgctgaggactgtcttcctgacttgtagatagccaccctctcactgtgtccttacatggtgtgtgtggggagggagcaagcccactaagtgtcttttcttataaggtcactagtaccatcatgagggctccatccttatgacctcatctaggcttaatcacttctcaaaggccccatatacacatactatcactttggggttaaggcttcaacatataaatttataaagggactcaatttagtccatagcaataaattaggccttttgactatagatctgtaagtgcataattggcactgattgatggattgcagatcagaatatcctatgcttctagttatatagaaactacatgcttagtgttttttttttttttttagacagagtctcactctgttgcccaggctgaagtgtagtggcacaatcttggctcactgcagcctccacctcccagattcaagcgattctcctgcctcagccttctcagtagctgggactgcaggcatgtgccaccacgcccagctaatttttgtatttttagtacagacggggtttcaccatgttggcccggatggtctggatctcctgacctcgtgatccacctgcttcagcctcccaaggtgctgggattacaggtgtgagccaccacacccggcccatgcttagttatttaacagaggtttattgagcactgtgttggctttaaacaattttgctagacattcagtagggcctgatgagtgtttaagacctcgtacagttcaggtgcattttcctttaaggatacatttaacctgctagatgtcatctcattttgaagacaagagaaaaagagaggaagacttgttttttcagagggttattatacattcctattagatcattaggaaattggcacaagtggcaggaagccaaactgacctgagtctggctgggcagtgtctgcaggttactccagcaaagctgctggaataacgatgtgttcttccataaagtgctttttgtcaaagtctcttctggaattaactcctcatgcacagatcgataaaccccaccaacttgccaatgtaattaagaagtgacaggttaagcataaccattaattaagttcaaagtaaaagaaaatgaagaagattgtttttgtgaaattgtgctgtcagatttttctcaagggtatttctgagttcctataaaggggaatttaggaaagggaggagaagattgtctccacttccttgggaaaagtgagtgtttaaacacatgtccattgaatatttttaactgaaaagtgaactatttgccagttttaagagacattgagtgagcaccttctgtgtgcaaaagactgtgctccgtgctatgcggaatacagcgcagtgtgagacttgttcacgctctcgtggagccctgaggtgaatgagaagtatcagacatgtgaacaaatataacacaaggcaaagtaatccaacttatctgtgagagattcgggcagttgtgagagctcagaggaaaggccatgccccatcctacagtggggagaggaggggactggcatcgagaaagacctcccagaggatgcagcatttgagcaaagccttgaaagtagagtaggaatggataagggggaaagaatgaatgagaacagttccaatatctcaacatttttttatgttgaattccattatagcttctaggatcaaaggaaaagaaatcagcctcttgttcagtaaagatttgttgagcattcattatatgtgcattattctgcagaaaatttggggctgggagaggtaaaaaaataccttcaggataacaggctttttcacaaaagtatcaaatagtcttagactcattgtcttcctctgatggcatcttaatggaattcaatacaaaggccaaaattcctttgttttgaagccacaagaaaacacagccaatggaaaagccgtgttagtgctgcctgtcctattctgataaggtgaatacttaaaagctatgaaagaagcactgagtactgctggacagtttgagttcatttggctggtagaattgagtggaagtcaattctcatgccatttaaactggaagaaactgaagattctccaacccaagctcctctttttgcagatagtcaactgaagccctgtaagactgtagttttatagataaaaaagagccatgtgaatttcctaaatcacataacagtcagtttattatttgacatttatggtacattcacatggaagagaatgattagacatttccaggagagaataacgactcccaattccctgagttaccattagatggtattaagcaacttcacttaattatgtacctgttttccagttatgttaattatacatcctttagcatttaccacctgtaccaatcatttagcataataataccttatacttaaatgcaagtacccagaatacttttatagttgttttcatttgatattcacaacaatcctacaaggcaagtgttatttctagattagatatgagagaactgaggcatagagaaggtaacccatatagccaagaaactaaaacagggttctgacatccattttctaactatgcatctaggtttttttttttttttacctctgcgtctaagttgcctgcctaaatcgccttcagtccattgaaatccatccaatcaatatttactgagcatcatctgtatttcaaatattgtagtgggcattgggggtatgaaattgcaaaagagagaatcatcagtatttgggaaactcactgtttgaatgagatagaaagccaaacagataaatgggaattattttaagtgccataatgggtctatgcactgtctttggagattggatggacagggtagcaaaagattgaggagctaattttgctgctgtttatctaagcatgtcagggtcctgtcttttcacgtagattatgagtgtcttggcatgtcttttgtctctctgcatcccccgaggctccttgcacagtcctcacactccactggcgttctgttaatatttgttgatgatgatactggtgattttttctctctgacatccagaacactggagagattttctgttggcccttgggtataacagatttttatttatacatttgaattagccttttagaaatcattcttaagtaaaatagatatctttttagtgagagagtttctaaatacgaacttattcaaaacagtaatgatattctattttagccagctaatactcaactacgatttgcaatttagagagttgtgcttgtatagattgtccctttctgaagtgagtgaattgtaactttaaataagggctgttaacacatcaaaatagtttttaatcagcctcaaaaattccccttatttccaagtatcttatttttactatttcattgatgtttcaagtggaatcaaatattccaactgttttccactggaagaagatgaatttcaggtacaattcagtagcaaagaacacccatgttttcaaaataatggagaaatttttttctcatatgaagttatgattaaatttgtgaattgcacaagcttggaattctgctgcaggatgcctacattctgtattgctttattttggtcatatattacaaatggaatatttcccagctcatttatatacagttcctggttgctgaaattttactggcaagctttgtgaactaattttacttctcaaagatactaggaataaagtgaaaatagggtcttttctctcataggtctaaaagatacttctttcctttaaccattacattctggaggtgtaattaatccaaccctgctgtagataggatctcattataaagattctaggtaaacagtctttctagcagaaatgatctttttggttcagtcttgcagcatttcctaaaattgctagtgtacgtagtaaatagggaggtaagtggggaaatttcctaaaaatgccagtgtacagagtgaattgttaggtaaatgagaaaatcaggcttgatttaccaaccaccccatgtgcacatacaaacaaacacacactcacaccaaagccaggaaccctgcaacaaagttctatttaccctgaggagatataaaactttgtgactgccactaaattatttttttgaaaaataatacagaaatttgtaagcagacacaacagctctagtttatccaccaaataacaatataaatgggacaagcaaagagaaactgtaatttgaagatttttgagtgtgatacttataaaagtgtgtgtgtttgtgtgtagaaatgtattgaatttgagagtaatttatggaaagtgctgtcagcatggtatttcaaatgcttcacaatttgaatttaaactagtcaatgggatcattaagattattatgcatgttttccaaagagtttgaattcaaatgacaacttaaaagaaaaaaaaaaagatgtccttgaaaaactaaggaatgttagtgcacttatagaaattcttgcagtttggagtaatttgccacctccccttctgaaaaagtacctgatgatagtgtgcttgagagataggggtattgcagacatattccttaggtgagtaaaactgaattgtaaagtggatgctatggaccatggattatttcatttagtacgattgacagtagaaaatcaggaagggacgtgcatcagtgcgaggctgacacacagatctgaggatggcagaagctcactgaatagcacacgcaaggacccttcaaactcatcacatgtgccgtttggttccctttcaatgggtcggtcttggaatatggaggtctgctttcattttgtgccaagtaaccacgtgagcagtttacaaaagatacaaacagaaggctgctcattcatttttcaaaaagacttttttttttttgcaatggagtttgcaaagtgattttgcaatggattttgcaaaaaaaatggatgccattttttttaaataagtgtaattccaatgatgggaaatttactagctctcaaggcagcttttccttgtgttgaaatctctaaaggttaaaaagttactttttggaaagaagtctatttccttacaacatgttttcattggtccatagagaagacagctaatacatcttccacttggcagccttttaagtatttgaagaaaattctcaagtccatctgaatcttctgttttggctaacttctagttccttcatccatttccaacctaaatttgagcctaacgaacagatttcttctttcttatttaaatatatatatatatgaggaaataaaggcacagagggcttaagggagttgcccaagaacatagagctggttggatgactggaatgtaaggctgtgtggctctaaaccttgtcatttagactagagcacctatacgtcagttagcttcctgccacttcttgttttctgcctggataggactttataaagagtttggaagaagggagagttccgacgaggtacagaaatcagaacttccccttcttccaaactatatacaaataatcagttaatcagattaaaggactcttagtaacattgaaatcaaacctttgtgtttccaggagctctgagaacaacaatttttttggagcattgcaatctcttgagtatccaaaatgattctgtaatgatgtctgtgaggtcagaattggagcagcaaatggaattcctttaagggcttcccatcaatggacagctgattccagaaatggaggaggcacagtttgtatccaaattcataagcacaagtgggagaaattaggctttggtaaagagggtgacattcccaaaggaatcatctgtgaagttggggaaggaattcaagctcagggctgctgttctctaccaggttcttcagccagctggacatgctccccaggtttctactcagtctggaatgttagtaaaagtccacttcctctccttgtttctcccttctagtgaaaacgttcctcttctctaccttcctgacctcaagaccattgttccacacatcccccctcaggatcccaccccgccattctcattctcattacattgtttctggatccatgtctttatcagatgcagcccactgtccctttcagaagatgccagaaaatttacatatgtgatcaaatgttcccatcacaacagttctttccagtaatcccagtgctgggcagctgattccagtaatggaggagacactttcagctattaggcaatggatcacactttcaaaggagattgagcaatctcctcatcaagttgtacttagagcacaaatctggtgccaaaaggcactaccggattcagactgacagcactgagagttttgagtgaaagggaagttagactggtgttatgtgtattcactgggaggaactcaccgggagaaataaagagggtttccagtttattcattgtgtaaagcggctataatagtatttataggggttttgtgaatgtcaaataaaattatatttggaacagtggctagtgccataagtaggacttaacctttagcaatatgtactacattaaaaggaaggtggacacatgagtgatctctagcattttgtgactggaaggaaagagactggatgaccactcttcagagatgctatggacagtacttttgtcaaggactgggagtggagaaaatgacttatagtggtctttccaacatgaagtttgtattaatccgttttcacactgtgaggaagaaatacctgatactgggcaattataaagaaaagaggtttaattggctcacagttccacacggctggggaggcgtcaggaaacttacaatcatggtggaaggcacctcttcacagggtggcaggagagagaatgagagacaagcaaaaaaggaaaagccctttataaaactatcaccccctgcctcggtgcggtcgctcacacctgtaatcccagcactttgggaggccgaggtgggtggatcacgaggtcaggagatcgagatcatcctggctaacacggtgaaaccccatctctactaaaaaaaaaaaaatacaaaaaaattagccggacatggtggcgggtgcctgtagtcccagctactcaggaggctgaggcaggagaatcacttgaacccgggaggcggacgttgcagtgagctgagatcatgccactgcactccagcctgggcgacagagcaagactccgtctcaaaaaaaaaaaaaaaaaatctatcaccccccttgattcacttacctcccactgtgtcccttctacttcacgtggggattatgggaactacaattcaagatgagatttgggtggggacacagccaaaccatatcacacatgaaacacagaaaaaggacatctttttacatggatcttctgatatgcttgtaccaaagcccacagtatatcctgtcttcttgaaagagtatcatagttattcatttgccttggatggaaataatgttgtaataccagttaatacttttttcaactaaagggaatttggcttcatctccagttgcaaattcacatcaggaaatatcaaatccaaagatcaaaactcagtatctcatcactttcaggaccatccttgccacttgtctcaggcatcatgtacctggaagctgaaaagcaatgtacagaacctttgaattggagagatatcaatttgaacccagatcctgctacttcctacattgtgaaagggatcaagtttctttagttctctaaagcaaaggtttttcatctataaaaggaggttaataaaagggaatacttatcatgttgaattaatgggaatattaaatgagtttatgtggtttaattgcctagcacagtatctgcctcctaagatatgtttaataaatgctaactgtgactatagagatttaccctgaagatacctgtcatgtcatgccttctctgtcaaatagatcatgaatgcagttcctagcctctctctcctgttataccctcctagcaatattctgatgcagatgaacccagccacttgtcttttgcttgccagaacagctgaatgttgctgggaaaaaaaaaaacaaaacacagccgggcataatcatatcattataagttgtgaccagccttgacctgcgccttgaccccacccacagcctacattcttacaccctgctctcaactgtttcagacattctctactgtgacttctatctcccttccccactccttccttctcaagggatgccctggcctcattcttcatagtgaaaatgaaagctgccagaagaaactctttcagcttctgctctcaaatctgtgcccatcctttctgtcccttagtgcctatcagattatcagttgccaattggtctccatgtatctctggtccctttttcccctgtcttctgagtgccctggctccatggatcatccattctttatcctacccaatgggattcttctcgtcaacatccatttgtgccccagcttggcccatattttccctccattgactccacagctctctgtagctattgctttatcccttccttcacagccaaactctggaaagttggatattagaaatgctgtctccacactattcacaatagcaaagacatggaatcaacttaaatgcccatcagcgacagactggataaagaaaatgtggtacatataccccacagaatactaagcagccataaaaaagaatgagatcatgtattttgcaggaacatggatggagctagaggccattatccttagcaaagtaatgcaggaatagaaaaactaatgctgcttgttctcatttataagtgagagctgaatgatgagaacacgtggacacaaataaggaaacaacaagcactgggatctacttgagggtggagggggagaggagggagaggaatgaagatagctgttgggtactgggcttcatacctgagtggtgaaataatctgtacaacaaacccccatgacatgagtttgcctatgtgactaaaccttcacatatacccctgaacctaaaataaaagttttttttaaaaaaagaaaaaaaaatcctgcctccatttttctatcaagtattctgcctgctaccaggcccctatcccttcatagactagctgaggacatcagggacttccatgttgccaaaaccgtgagtctaatcagtgtttacctaacttgatatctcagtaaaggatcattcattcttacaaaactgtccctcccaacttccttggcaccccagcctcccgattttgtttttaatttttcaataggttattgggggcacaggtggtgtttggttacatgagtaagttcttagtggtgatttgtgagattttcgtgcacccatcacccaagcagtatatactgcaccatatttgtaatcttttatccctcgtcccccttccacgcttccccccaaatccccaaagtccgtcgtatcattcttatgcttttgcgtcctcgtggcttagctcccacatatcagtgagaaaatatgatatttggttttccattcctgagttacttcacttagaataataatttccaatttcatccaggtcactgtgaatgccattatttcattcatttttatggctgaatagtattccatcatatatatatattccatcatatatatatattccatcatatatatatattccatcatatatatatattccatcatatatatatattccatcatatatatatattccatcatatatatatattccatcatatatatatattccatcatatatatatattccatcatatatatatattccatcatatatatattccatcatatatatattccatcatatatatatattccatcatatatatatattccatcatatatatatattccatcatatatatattccatcatatatatatattccatcatatatatatattccatcatatatatatattccatcatatatatatattccatcatatatatatattccatcatatatatatattccatcatatatatatattccatcatatatatatattccatcatatatatatattcatcatatatatatattccatcatatatatatatatatatattccatcatatatatatatacacacacacacacacacacacacacatacccacacatcccagtttctttatccacttgttgattgatgggcatttgggttggttccatgattttgcaattgcgaattgtgctgctataaacatgcttgtgcaagtatctttttcgtatgacttcttttcctctgggtagatacccagtagtgggattgctggattaaatggtggttctacttttagttcattaaggaatctccacattgtttccataggaccagcctgctgattttctctttacctatgtctcagttacctttgctgttttgtattctccctgactcctaagttgtccagtctctctgggatcattttctttctcaattttctctttagtcaccctcatatcctcccaagcttttagatatcatcagtatgctgacatgtctcaaataggtaccatgatggttttgttactattttttatcttagccattctgataggtgtgtagtaattatctcattatagtttgacttgcttttctcaaagtgctaatgatattaaacatcagtgcaggctgggcccggtggctcatgcttgtaatcctagcactttgggaggctgaggcgggtggatcacttgaggtcaggagttcgaaaccagtgtggccaacatgctgaaaccctgtctctactaaaaatacaaaaaaaattacccgggcatggtggcgggtgcctataatcccaactacttgggaggctgaggcaggagcattgtttgaacctgggaggcagaggttgcagtgagccaagagcatgccactgcactccagcctgggcaacagcgtgagactccgtctcaaaaaaaaaaaaaaaaaaaaaaaaaaaccaaccatcagtgcagaagaggatgtggagtggagagactgcatcaattatattttgctgatgagaatataagatggaacaaccattctagagaaagttttgggaatttcttcttttaaaactaatcctgcaactaccatgtgacccagcagttgcactcctgggcatttatcccagggaaatgaagacttgtatatcccagggaaatgaacaaatcaaatatttgttcatagcagctatatttgtaagattcccaacctggaaaaaacccagatgtctttcaacaggtgaatggttaaacggtggcacattcttaccctggaatacgatttagcaataaaaggaaggagttgttgatatatgcaacaccttgggtgaatctcaaaagaattatactgagtgggaagggccaacccccaaaggctgcatactgtatgattctatatataacattcttgaaataacactatataaatggagaacagattagtgtttgtcaggagttagggatgggagacaagaagtcagggattaggaattgggggtttggggtagctgtggttataaaaggacaatagaagggatcattgtggtgatggaactgctctgtatctttgccatggtggcagatacattaatctatacaggcagtgcaattacataaatcaaatacacacacacctgcatgaacttacacatatatacagacaagtggagaaatctgaataagattgatagactgtatcaatctcatattctggctgtaatattgtaccatagttttacaaggtattattgctgggggaaactggataaagggtacttagatctctacgttatttctttcaacttcatatgaatctacaattataagaaaatttaaagtttaatttatagaaaaggcaattttagatttgaaataaaattcctacattaactgaaaaattaattaaatataaatttaaaatcaaaattaaaaaccctttgacaactttagatctctctctcttacacacacacgcacacacacacatacatctaagctttattgtctttgctctactaacagttcagctccctgtaattcagtttctatccccacctctccacttacaccacacttctgaacatcaccagtgacctctttgatgtttaatacacttaagactcttcagtccttatcattcttgagctcttgcagcatttaaagatgttgactctatctttgtttcatttgacttctatagcaccgtacactctgggttttcttcctatcgctgtacacaactttctaccgtttttaatagatttcctctcttcattccttaaattctccatttttcttgagttctgccctaatctcccttcttgtctcaatctgtactcctgagttatttcatctgcttccgtgagtacaaatatcatctgtgtgctgagaactctctggccaaaatctgcagctggatctctctgtaagctccagatatgtatctatcattttagcctgcagtcttcatagattggcccataggcccacaaatgcaacagtttcagacagaacccaaggtgttcccttttaaacctgctcctctctgtgttccttttccatgaatggcattaccttgttgctccaaccaaaggcacaggagctggcctgtatccttcctcttccttcagtatcccctcttatccacttattaaccaatttctgacataatactttggcttcctttatatcttctttcatttatgagacaagttccttcagtgttttctagtgacttttcattacttggaagagacagttcatactcctcacactaccatgtaaagagctcatagccacatgcacacacatgcacatccacttgtgcacacatacctaaacacacacccaaaacagagagattgtctcatgcctgtggctgggtaaacacttgtccttgatggaatgtgtagctttcccatctccatcccaatcacctagccaaaaactctcctccttcaggcctccatttagacatcacttttccctcaagtatgtgtgattcttgtgccttatcctccccatcatcctgtaatagcatcctctgcttttcctcatcatagcatttagaagactgtatttaaattacctatttgacacatacctcagtagctatacattttccctaaggggagggttgatgtcttgtttctcattgcatcctgcagtaagcaccgagtaagtgtttcttgactctggggctgtactgagttgaagaaggatgacatcactgactacagaaccctttgtataagcatcaaaggggtagcagtggggtaaatgatcacatcctggctaaatggttccgattcctacaaccctgcagcacgcccccccggctctaaaccttttagtcatttcctgtgaatcttgccagcactcatttcattttttgttttttccattttcttcatctttcccacatagtatagaccagaatgaatcaaggtctaacttatgctgactgtccgtgttgcatcatcagtctttggggccccttctcagtttctgtggctgctcttgtgcctgctgactccatccctgtagaccttgctgttcctcccagtctgtggccactaacctcagttatttttactgaatgtgttacctcatccatagtgagtcttttgttgttgttgggttttttttttagcaacaatgtattttttaattaaggtatgtacattgttattttagacataatgctattgcacacttaatagactaccatatagtgtaaacataacctttactgcactgggaaaccaaaaaaataagtgtgacacactttattcaatagtcactttattgcaatgttctggaaccctttttgttgttgttgttgttgaacggttattataacatgtctgatttagaggaaagtacactgaactgaaaatcaggaaagctgggcccagggggctggccttgagcagctgactaagcctgtacatttaattcaaaaagagctactcaggttattcccttaatcggtcttatactttatgacagtaagcacttacctcgttctgtcacatggtgtggccagattatgcatgtactatgattcaaaacattcacgtaaataaatcttcctaacatacaagaattatgtgtctgtggtgctttccagcttttgatgtgcttgcaaacccattttctcatttaatcctcacaaagttggaaaccagctcacttacttattcatgtttacaggaataatcaacattgatgccaataattttgattatatattttaaaaatctcatgaaattggttttaaaagaatcatttattagacaaaaagagtgaacctatcaacaggcaattcacagaagagaaaataaaaataacaaatgaaccaatgaaatgatgttcaaattatttaaagaaatacagtttaaaatattattttttcattctcagaccagccggcatttataagttcaatgcttggtattggcaaaagtatgggaagcatgtactcacatgggcttgtgataggagtacaaattaatacaaccttttcgaaacaaaatttagcactatctttcaaaattttaggtgtgcactatttttgaccctgcaactcgatttcagacagtaggcgtatttgcataaaggcacagtggtattctgtttcagaatacacattgcaacatttttatgatagaataaaaggactagtaaaataaagtacagcaactgcatgcaataataacatggaggctatcagaaaaataagacaaatctatatatgctaattaaagacaccttaaaaactattttaggaaaaaacaaggtacaaaataggacataaaggatctgatttgtgtttgaagaaaaatttcaaacatgagtgtttatatgtgaatgtgtgtgtggtgtgtgcgtgtgtgtgtgtgtacatgcttatacaggcatgtataagcaatctgatacatgcctgtataagtattacccaatcttttagtgattatctctggaaaagagttttacttttcattctctacccttctatgacagttgaatttttgaatttttaaatgaataaatgtgtgtgtgttgtgtatttttaaagttaacatacagactgagcgcagtggctcacgcctgtaatcctagaactttgggaggcgaatcacctgaggtcaggagttcaagactagcctggccaacatggtgaaacccttgtctctactaaaaatacaaaaattagtcgggtgtggtggcgggcacctgtaatcccagctactcgggaggctgaggcaggagagtcgcttgaaccaggaggtggaggttgcagtgagccaagatcatgccactgcactccagcctgggcgacagagtgagactctgtctccaaaaaaaaaaaatgttagcatatagcgtagaattcagcttttcttattctaggtagcgatggtgcttttcactgctttgcccaacttaattgacccaagtagaaaagtcttcaaaaaaaaaaaaacgctttagaaaaacactttagacactttagatttatgtgacttcaaaagtcaaaaatggtaataatcctgcttaggcagaagccttgccctcagtcccaaaacatgatggacaagcgggtgacttacctgtggcttttcttgtatcttgcagtctgtcagcaatcatgaaatgtaggcctcagagtggaagggcccctagagaccatccattgcctctcaggagcatggtcattctgcagatcaaggtcctgctctgggagaaatgggtgcacactcactctgcgttctgtccagcccttctgccacctacatttctatgcttttctcttactgctaaatagcttcctaaaggaaaagtgaatggtctttgtgaattcaaacctcattctgttgcttccctatttaaaactcttcaatgagtccctcttcccaatgctctgtctctagttgttctgtatataaaagctaaacttcttcacatgtttctgtttctcttgtttatgcgatcgtttgtcattggccttgtgttggtgatgtatgttctgaatgaataggctccagcaattaagtgactgagatgaaatgcttttgtatctctctagcctcatttcttttttttttttaccactgtgatgcaaacacatggaactactgttctccattgcaccatgattagtctatccgtagtcttttgtgtgtgatctttctgtacctagaacactcgtcttgggcttttgcctggccagtacattgccattcttcaggtctcagctgatttttcacttcttccatggagccccctctgacttcacaagattgcgttgtcctgctcatatgtcctgctcagagcatgctgcatgtctcacttcatagcacctgttatttttttagtatggattttggttttgtttgcctgcaccccattccttgaggacagggaaagtttctgtccccctgttgtgttgaggacactattaagttccctgccattacctggtgcttaacacatagtagatgctctattagtgttggaatggatgagctctagtgagtaagcgcctaagacaacacagaccctaaggtcttctgaacccaaccaagtgccctgtttttgctgctataccaggctgtccttcttcccactgccatcctcctggttctgttctctcagcccaagcaccgtgtgtagcctaatcatgtatatctattctcagagtttgtaggacaggatacgagttaacgacttaacgcccttcaagattttgtgtaacagggaaaggagagaacacctggaatggttcccgcttggagaaacgtttttcatccttcttagtttcagctccaatcagatggattcagcctgtgacagtcaacatttacagcccttgggagcagctccatactcacctcctttgcctgcttaccgcaagctcactgcctcctcctcagattgtgccagacataccaggtttgctgccggtgagaagcaacaatccaaatcctacctttctgttcaggtcccagtaaaatcttcactggcagcattttagaattgccccttccctcttctctcaaagggctgctgttcagctggcaggaccagcttctctgatgcagtgcagttcagtgcaaaccaacggaaagcccacagtttttttgtttttttggttttttttctaggtgtaaacaaacctggttgattgtgaggcaaagaaaaataacaaaaacaagtgagaatacattagattaatttactctttcttttttcccgctcattcataatgtgattgaaatcagaagtaaagaaagtaaaatcagagtgagttccctctgctcagtcacccaccctgatcacaagacttttggaatactgggaggcactgcatttaagtaagtatcagctgtatggagagtatgaggttaagatgatgctggatttaatttaaagtctcctcactggtttgcgtgaaggaagatttttatcaagcagagtgaaagagacagaatcttgaagcttccgcagaggggaagaagacagggccgtgcactgcgagtcagtatgcctccagtccctctggtgggcaccggtccacatcacaggaagcccagctgtggtggctgtcagtgtcagaggggctggcagacagtagtagaggcccagagaagttactttgtacgtatcagtctagaaggaagagattatgaagattagtcaagcctccctttctcatttatcctttttttttttttttgagatgaagtcttgctttgtctcccagcctggagtgcagtggcacgatctctgttcccgcaacctatgcctcctgagctcaagcgattctcctgcctcagcctcattagtagctgggattataagcacccaccaccacgcccagctaatttttgtatttttagcagagatggcgttttgtcatgttggagagactggtcttgaactcctgacctcaggtgatcctcccacctcagcctcccaaactgctgggattacaagcatgagccaccatgcccggccactttctcattatactgatagcaaaattgagacccacatcagcgatctaacctgtcatttcaatgatgtcctgacataagagtaagcggccagcctgccctttaagtaaagcctactcatatgggagtatatgtgctttattaattagcagaagggtatccaggccttcttggaagctgtcttctctctgtatgggtaaatgggcaacttttctagccttccgtctaattgggtttaatatcagtgaaagaatctttaagaaggtgtgcccttaggtgctagggccagtattgtaggtggcaaccaggtacattagtctctgcccttgtggaactcatattcccatgtttgtaaaggagtctgggcctcttatatgtggtaaatgaagtgactgtctatgtagttgcctttgcaggacacaagtccttgccttagtttccctccagccaggactgccccaccgagactattcatagctccaacttaaggtgctttaataaagggcagaaatcatgacaagaaaggacgcttttcttcaggcaatgaattcagcctgattttagaagctgttttggagaggtctctgtaagcatattacattttattccctgcagtacaatatttatacatggataatttgtattgacagttgatagttacatagaggtatatctcactggttctcaactctagctgcattttagaatcaccaggagaattttctttttcgattctgatgcctaaatctctgccctagaacaataaaatcagaatctctaaaagtgaggcccagacatgggcagttttgttattatttatcattgtttaataataaatattacgtaaaagtcagacttttaatggctcatttgtagggaggagaacttgccatttcccaaagtatcaccagcataaaaggtgaatttgtattttgttctctaagtttctggcatattctgaaactgcaatttaagtgactctcctacctctgtcttactcccaatttatatttagctggattcatattagagggcaagaaggggcaaatagaaaaaaagtgatctttatcaaacccatttccttgtgttagaaaaacgatttgttggaaaaagccatcgaggagatttgagattcagcacaaaaaagaattcgatatcacctaatacaagctgagaagggctacctcagggggtccttgtgcacctcactaaggaaggtctttggcagaggcagagaccatgacaaaggttttttttttctttattggacaagagccagaaaaaaatggccccaagattatgctcagccccgggaacctacagaaaccatggagcagtaggaatgggtagctagccgtgttagaagtaaatttgaggccgggtgcggaggctcatgcctgtaatcccagcactttgggatgccaaggcaggaggatcacgaggtcaggagatcaagaccaacctggccaacacggtgaaaccccgtctctactaaaatacaaaaattagctggacgttgtggtgtgtgcctgtagtcccagctactcaggaggctgaggcaggagaattgcttgaacccgggaggtggaggttgcagtgagctgagatcatgccactgtactgcagcctggcgacagagcaaaactccgtctcaaaaacaaaacaaaaacaaaaacaaaagaagtaaatttgattaatgaaatctacctttatgtttttacccaaagtgttatcaggaaagataacgttaaaaaatacacgtgattttcttaatgtcttagtttgagcaagtaattctaactgctctagcaaacacatttttaaatctcagggatttaacacaatgcaagtttatttttgtctgacaaaaatcccccatgtttagccagtgcattccacgtgggattcagagactctgtcttattccatccagtggttccaccagtctctaaagcctagaggtcctatgccagattatgtgaattaaaattagaagagagtattaaggatcttctgggacagtggtgggatggttacagtttccagactcataaatgtaaaacagtgttccttctacaaatattctattggctggggctcattcactttcacacagtaacaaagaatgcttggaaatgtggccacactgtatacccccaaaagaagaggaattagtttggttcaaatttatctagtctctgtcatgctttcatcatcatcatcatcatcgtcatcatcatcgtcatcagctactgtggatcagcatactttcctgcaattttccaaatcgaattttgtggttatatattaacagagtatataaaattcattttccctacataatatgtattttattcctatatgtgttttctgcagtggtctgatttatatcaatgactaacatatagattcgatttgcaccaactagataatttaatctcttactcctccttgttgacagttggtggggtgcgccttatttttgaagaagaaaatgcttatccagttattcagccaatctcagttgacagcctatcacatgtcaggcactggaaattccgtggtgagcaaaaacagacaagtggcctgctttcaggaagtttctattctgttaagggagatggacagagtgttttaaaagaaaggagtattgtcctaagataattaaaacacaggaacctgacttagacagagattaagacaggcattcctaaggaagtgatacttcactgagttatgaggagtgagtaggagtttagacatctccagacagtgcagcacgctgatttgaggaactgaaagaaggccagtgtggtcagagctcagagactgagggagaagcatgatgcaggatgagttttgagagataaaccatgaaggacttaggccttgctaagcattttggcctttttcccaaaagtacaggaaagcctagccattttattattttataccacccatccattacaggcttttcctgaaaggtctttggcaataggggagctatggaagcaacatcatgagtaagtgactgggggaaccttttccctaagtgttgtggttgctagccacacaccatgtattcaacatctctccaactctcctcatcgtttcccagagctgaaagtaagatgagcacgaagaaaccatgtttagttaagaacatgacccgaagagtgaaaggtatttcctgttccaaataggagcccagtctgcattttctactacatgatttagtagaaagacacattgcatttgaaccatatttcttctgctagccaattccatcttatctacaactttttgataattattttgagaaatagatctagatcacagccttccaattcctaggccaggatactttccatttttctacacagaccccattgcagtcctcccttcttcacaatcttcaaaatatccttctgattgaaccagatatcttattcttcatcccgtttcctgccccctaaaatgacctatctttcccttctaaaacttccactaactttaaaattggagctcaaggcttccatctccacagactctgccctgacaacaaattggttggttttattttcttcccaatgaatagaatagccgttagagggaattgtcttcagctcttttcccccctcctcctcctcctcctcctcctcttcctcttcctccttcttgcaaatacaaacacagcagggctctatgcagctggttactctaggctctggtaacctaacatagcaggggaggacagaagtcaatagggtgagaagtctgtttttgtcacggatttgctagaagctattaaagtgttcttcctaagtctgttacttcataggttgagggaagtaatgcatcccacacaagaggactgggatatgtttaaagtagtaggaaggcatttgccactattctagtccatcctgcccatgctgcctaatgtttgttcctacagatcaaaatctcataatcttctagacttctagatacagaagagttggagagatcaaagccttgcctctgacccagattattcgatctcatctggcatatcctacactctagccatcctgacctgccgtgtgttcccctaaagctcccatccttttctgactttgcttttcctcattctgtcccctgcattgaaatgcctttcccacatctctatgtctaaatcttacatggccaattccaacgtaatctaatctctgaagattccctttgctccccagttagaagtagtcactccctgctctgctcactttttgacatatattaatttatatagctatgcatttatatgtgtatgtattatattccttacaagagaagcttttgagagaagggcctataacttttctttctatttgtgtttcccaaagctccttctggtgggaaaaatgctttgaggttgaattaagctcacattgaactctatgatgaaaccatttgcttatgaacttggacaagtttctttacaactctgaaccttctgaattttccaccaggagaatgggaatgaataagtaagaaaacttataagacagctcctggtgtagggcctgactcatgtcaggttcccaggaaggccactttatatccttcatacatttgtatgtctgtgttgacattgaatgtttgcatgacatataaaatataagtagtaatgacaaatttaatagtgaatacttacagtagtgcatttcatcctatgaaacgggcaatctggcccattctatataataggggagaaaatagaaacttagatttactaattagttcaagttggcacagatataaggggatctcagacttcaactcaggcagtcaggcagggcctatactcttgatattcctttcttgatactttctcagtatcaaattaccacataatagacaatgccactcataaatctagcccactctaggaacataataaggcctgttgagacattcagagatgtctccctgatcttcaaagatgaatttttattcttccctaagctgctgtctcttcagtctcaacatcctaagttcattttatctttcctcacaggtcaggttttcagctctaactgtgttcatcctggtggctctgccctggacatactgcagttcttttatgtacctcttatcgtatggggtacaatggctttcggtactgctcagtgaggggagagaaatagatagtgtagtttctgatgtcaaggaacactttagagagaccttaattaatgtagccatatgttgacttcctggagcactcataacaacatgggaagcccacgctgggaagatgctgagtaggaataagagaacaatgctaagagaagggaaatttcaccgtctgtgaagcgtctgtttagattttatgtttaaactttatgaactctgtcacttgctggtgaattttcttgctcagtatcttaaaatacagctgcagtgtgggttccaccctcttcacttaaaagggtgattaactgtttgtgatgaataattatttaattgccagttcagctacatgtgtgtagttgttttgcttctttcctcttcagtgtgagccaaatcttctcaataataaaaataatccagaattagtcaactgccttttatcatgttctcattcagcctgctggagcaagaacattccaattctacatcacctttagcttaaaaagtaaataaatagaagctctcactcagccagttgatagttttactctcacagcctctcctgtaactaataaagtcttgacttcatcttgaaccttttactctatctttggataaaaatttaatcagaaagaattattgctcttttaatacctgtttaacctttacattcgcgatgggtacaaaaccacttaagatttaaagctctcttgttatggacttgtatgctgacctacttttcctcagagatattttttgcaagaattgttgaagcttgacatggggatcactgcaaatgtctcagctttgccattcactgctttccattcctatgtcctccttgccctgttaattattttaacagagacttgctattttaaggaagctctttatcgttactaaatctttttttattgttaaactcctttttctttccagcatagaagtatgtcatgttttctgtcttcagaatgtgcaagtgcttaccttctcataaagtgtgcctgttaccttaattttatagtctttatcacaaaaaggtacgtaagtggggttcagaatagtgtcttgcacttaaggtttaacttaggttttagtttcttcatgcaagcaacttgcatatgtagagaggcagcatgctatatagtgcaatgttcttcttggtttttaattataaaagtgatttcttttctagtaaaaaatcaagttatgcacaaatatatagagtgaaagtgttttcaactcctctctctagaggaagccactagcagttggcatatttccttccagaatttgttgtgtattataaacctatatacgtgcgtatgtatacacacacagtagtacacacattgttctgcaccttgcttctttgttttccctaagaatgtatgcttgatatatttctaaaaataataatgtatatgggtctaagtatttttagtgatatagaattctataggatacatgaaccgtaactcccttagtcatttctctactgattagtatttaacattgtttcttttttttttttttttgccattaaaagcaaatatctttgtgcaattatcttcatgaaatgttgaagctttctttttttttttttttttgagatggagtctcgctctgtcgctcaggctggggtgcagtggcgcgatctcagctcactgcaagctccacctcccaggttcacgccattctcctgcctcagcctcccgagtagctgggactacaggtgtctgccaccacgcccggctaattttttgtatttttagtagaggtggggtttcatcgtgttagccaggatggtctccatctcctgacctcgtgatccgcccaccttggcctcccaaagtgctgggattacaggcgtgagccaccacacccggccaaaactttctgcaggatatatttttaaaatgggttttccaagtcaaaagtgtatgtatgtttccattttgatacctactgaaatagctctccaaaagtgaaaccaaatttattcttttcaatggtatgtaagaatgcctgattccccatactctcattaaccttgagcatgttccatcttttaaatttttgccaagaagattgtctaaaaatggaatctcattgtttgtatttgcatttttatgatttttggtggatttagcatcattttctatgcttagtaactgcttgcctattcatatcctttatccaggttttttgttttgttttgtttctttttggtttggttattcatgttttccttattagtgtattggtagttatatgagttttaaccctttgtcagtggctaatttggaactcctccacagatccctgggggtttcttagagcagctgactggctggcagagctctccatggccttacctccccttcctcttctccgaactcacacacacactgatcgaacagaatagaccaattattacctgcatttcatgttgggctttgtgcttgagattaaacaaaggttcccggggctaaacgtctaaaaaacattgccatggaatgaagagccctagattttgtcataaagtcatctgtcctaggctctacaatgtagcattttcaaattggaagagccttcagagattattttattaccaacacccatgtaatataaattatacagttaatatatgttgatatacatgcaatactgaagaaatctctaatgcattctatattctgtaacagtaatatgtattttattatttataatagcttcaacatatattgaaaactagaggcacatacgtctataaacagtgctcagggcgtattattttggtgtttatttatttattaggtatttattattttatttagtccatagatgatgcatttatctgagaactcctctgactcaaggcccagcaagaatctgctgcccacagttatgagtagctgaactgggccaagcttttaattctataaatagcgaatctatgtagacactcagctagttagtaccagagtggtacccagatccgtgatgtcttgactcttagtacagtgcacttttccccactttgccattctttgctggtgaccttgggtagatcttcttaactgctcagagcttcagttcttctctcttttaatgagagtaataatgcatgcattgatatcctgactaggatggagttggataaagactgttcttaccttttgtgaatagcatagtatcttacagaattgtgaggaattatccaagtagctattgcccctcatcatggtgttaaaagtaggattgctagtttgaacggtaactgcaggaattcaatgtgttttgattttagcatattcccgtatcatgtagaccagtgttaatatttttagtattttatcttagttcttttttttctgaaagtcttgatttttcccagttttattttttagatttgaaagaaaaagaaaaaggatgtaactatgactcttatgttttcaatctctctgaaatataacaaagtaataactctaaatggtcaacgtagtagtctgagggcattctcttgaatgcttagttctgtgttacttaggatccattcatagagcatattatttatattatgtgaggtttaactcttcattataactcatggaatcaatgatagaaatgcaggttatttatactgtcagtcccaagtatgtaatattaaaccaccaaaattcagtttaagaaacttgcaataagctaccacttggctcaaagcaaggaattaggatggtcaggttgaactttctttatatataaagaactgagtctctgaaaaaggaaaaagacttttaaatgacatccagtgaatgtctttttaaaaaataatagctttaatggctgggcacggtggctcacgcctgtaatcccaggacttcgtgaggccgaggtgggtggatcacctgaggtcaggtgttctagaccagcctggccaacatggtgaaaccccgtcactactaaaaatacaaaaattagctgggtgtggtggcaggtgcctgtaatctcatctactcaggggggctgaggcaggagaatcacttgaacccgggaggtggaagttgcagtgagctgagattgcaccaccgcactccagacctggggaacaagagcgagactttgtctcaaaagaaaaaaaaaagctttaaaatatatattgcatatggataaatttacatatcataaaagtatacttggctaagttctcaaaagtaaacacacttttataatccccaccctaaaaaagaaggaacattagcagttaattacttcagaagttttcttcatgacaacctggttgtatgcctttcttttttcctaaaagtgatcactatcctgacttataataatactatatattagattaaaatacttttgttgtatatgctttttttttttttttttgagacagggtctcactctattattcaggctagagtgtagtggcacaatctcagctcattccaacctccgcctccagggttcaagcaaatcttgtgcttcaaccacacaagtagctgggattacaggcttgcaccaccacagagagcaatttttaaaattttgactagagatggagttttgccctgttggccaggctggtcttgaactcctggcctcatgtgatccacctgccttggctaggattacaggcattagccactatgctcaacttgttgtatatgcttttatgcagttttcttttgttctgttatgttcatgaggttcttctaacattttaaatatggccatagtttatcttcttctagaagctttaataattttaggtgttacttttaggtgttttattgttttgagttaatttttatataaggtgatcaaattttgagtaaaggtatttttccccccatagggatgtccaattgttccagcaccatttgttgtaatttaattaatcttatgcagattgtaaatcagatgcatgttacagaccatataaaccatagatgggtctatttctggattctctattctgttccatcagtctgttaatatatgtctgtccattctccagttcacacactgtgtgggcaattatcattttgcagcaaatctagaaatcaggtagtacggtttgttctgctctttcaaaattgtttggctgttctagttagttcacctttgcatataaattttaaaattcgtttgtcagtttttacaaaaatccttctggggttttgattagaattgttgaatgtaggtgtaaatctagggagaaattacatcttaacaataattatgtcttccagttcatgaatatacatgtctgtatttatttagattgttaatttctttaattattgttttatatttttcagcgtaggaatattgtacatatttcctaaggtttataatgaagtattccatgttttggggtgcttttacaaatggtgatttaaaaatatgcaatttcaagtattcattgctactgtatagataagattgatctttgtatattgcccatgtgtgctgtaactttgctaaaattatttattctagtagctttttttttattcggggggaggtttaatgaaaaaaattatgttttcaatgtagtgcatctttatatatatatatatatatatatatatatatatatatataaaatggaatacaattcagccataaaaaagaatggaatcatgtcttttgcagcaacatggatagaactaggggtcgttatcctaaatgaaataaattagaaatagaaagccaaatactgcatgtggtcacttataaattggagctaaacaatggaaacatatggacatacagaatgaaataaaggtgggaggatgatgagggttgaaaaaatacctattggatacagtccagtactcactcttcggtttatgggtgcactaaaagcccaaatttcaccactacacaatatatgcatgtgagaaatctgcacttgtacccccaaatatataaacattttaaaagatttaaattacattttctgtgagtagaaacagtttcatttcattatttgaagtcatgccttttctgtttcttgcccaattgccctggctagggactttcagttagttgttgaatggaagtggtgaacatgaacatttttgcgctgttcccaatattaagagaaaacattgagtcttttgccattaagtgtaatgttagaagtaaggttattgaacatgctctttattaagctgagcaagtttccttcttttcattagttttctgggaggtttaatcatgaaagtgtgttgaattttgtcaattgcctttagacataagttggtatgataataagacttttgttctacagctggttcatatggtaggtaacactggttaatttttaaatgttgtatcagccttgcattcccaagataaaccccacttggttgtgttgtactactccttttgtgtgttattggatttaatttgccagtagtttgttgaggatttttgcatttgtgtcatgaggtatactaaactgtggttttcttttttggtaatatatttgactagatttgttatcagtgcagtgctggcctcataaaaggaattgatgagttccttcctctcttatattctggaagaatttgtatggaattggtattattatttaaatgtttggtacagtttgccagtgaagccatctggacctggaattttctttgttagaaggctttaatctacaaattttattcttgttaattgacagtttgcatctcttagaaaattggtccatttaatctcattttaatgtctgtaagtactgtggtattgtttccctctcattcatgatatttataattaatgtcttatttcttttttttcttcttggtaagtctgaatagagtttgttgtgatttttttttcacaaaagaattagcttttggtttcactgagattttctctattggttttctgctctcaattatattgacttctgctctttattattttactacttttgcttggcttgggttaagtttgctcttctctttctatttccctaaagttaaagattcagttgttgagttgagatcttttgtttttttctaatatgaacatccaatttcaaagtactgcttaagttgcattctacaaattttgatatattgtgttttcattttcattcaagatattttctaatgtatctagtaatttttttgacgcatggtttatttagaaatgtgttatttaatttttaaatatttggatattttttctaggcctttctgttattgtcttttagtttatttccttgtgatctgtgaacatgttttgtgtaacttaaattcatctaaatttgttgaggtttgttttatgtgctagaaatatggtatatcttggttaatgctctgcacatttcaaaaatatgtgtattctgctattattaggtgaagtgttctatagttgtcaattaggttaatttggctaacagtattgtacaagttctctctattcttactgattttctgtcttctttttcagtaaattattagagggatactgaaactttgagcataattgtaggtttgtctatttctcctttcacttgtatggtttttgttttaatgtattttgaagccatactgttaagtgcacatacattaggattgttatatcatcttaaccccatattcaattccttccttattacataatatgattctttaactctgaaaatattcttgttctgaattttagataatattaatttaactttcttttattagtttacaaagtatttttccagccttttgtttttagtctatcaatgtctatataattgaagtagcttgcttttagacagatacgtctttcattttatccaatttgaccatctgtattttaatttgtgtgtttacactatttacatttgatgtgattattgatatagttggattgaaattcacaatcagcttttgttacttttccatctgctatatttttctcttcctgcctttctttgaattaaatgtttttcacaattccatctcatttacactatttgtttattatttatactcttgattttaatgttagtattaccctttgatttgcaatatacacctttaattaactagagtttaccttcaaatactattatatcactgtctgagtagtttcaggaccttacaattgttactctcaatttacttaccatcttttcgtgttcttgttgtcattcattttacttatatatattctataaatacacagcacattgatactaattttgctttagaatgttatcttttagagcaattaaaaataatgagaaagctaattcatttctgctttttcagcactttatttttttgtataaatccacctttgtgtctgataccgtattccttctgcttgaagagctcccttcaatatttcttcaattctgtcctgaaacagtttttaattctccttcatttgaaaactatttttaccaagtagagaattggttggcctttttccttttatcacttttaagatgtcacttcattgttttctcacttgcatagtttctgacaagaagtctgctgtcaatgtctttcttgctttcaatgcagtatgaatttttgttttctgactgatctcaaacttttatcctttgtctcttttctaacagcttgaagctatgtttattagggtttttagttttagttttctggttttagttttagtgtttgtatatatcctgtttgtcagtcccttaatttcttggctcttctatcttcagttggttgtttattctttagaagatagccaatatctcttcaatttttattttgttttggtggtttgttgccttcattcttttatattttctctttggagttctaactacatacaggcttaatatttttctataattctttgatgctctgttctcttacttttcactctttctataaatttctattgacctatctttaagtttactaattctttccccagttgagtctgcttatgagcctattcaaagtattcttcttctctgttactatgattttcatttctagcattttcattttattttcataagacagaatgagaaatattctcatatgacagtctctatatctttgagatcatgcaaattttcttcctttttcactagagccttaaacattaatcatagttattttaaattccctatctgatcaatccaacatctgtcttatttctgagtctatttctgtttgttgctttgtctcttgacagtgtgttgttatttttacttcttggtatgccaggtaagtttttgttaaaagccagacatattatataggataataaagataggctaatatatttcacacctgtaaatgaacatgccttttcttttgttaggcctttagtgtggggtgtttgtgtcaatcttgtcagaagttggccttgatttgaattttttgttgttgttgttgctgtgattccccttagtgcaccacagatttcaaatatctctaatgttactttgtctttgtggtgaggagtggttttccaaaaggactttctcagtatttgctccaccctcagatttagatcttctttttgtgcctgtaccacagagacaacttctttttttgtctgtctcccaaattttgcactgttggtgggaatgtaaattagttttgtggttgaacttgattgctgttactttttacttgatgcttttgaggcagagggacattttctgctgttaccttcagttttagagaggcagtgtggctgtgagtctccgaagcaggctgtttcagtgatcctgcctctccccgggactaaaatcacttcttattcttttcccctacctatgatgagttatcactggtgccctaagagccacaagactcactgttattttcctggggctgaagacctttattccaaagggacaatccgggagaagtatatgggcagggcattaagcctttcccagagctgctgctgttccgctcctgaagcctgcaccacaacagatactttatcagtactcttttttgctttttattttattctattttactttaagttccaggatacatgtgcagaacatgcaggtttgttacacaggtatatgtgtgccctggcggtttgctgcacctatcaacccgttgtctagttttaagccccacatacattagctatttgtcctgatggtctccctccctttgcccccatcccccaacaggctcagatgtatgttgtgcttctccctgtgtccatgtgatctcattgttaaaactcccacttataagtgagaacatgcagtgtttggttttctgttcctgtgttagtttgctgaggatgatggcttccagcttcatccatgtcactgcaaaggacatgacctcattcctttttatggctgcatagtattccatggtgtacatgtaccacattttctttatccagtctattattgatggacatttgggttggttccatgtctttgctattgaaaaatagtgctgcagtaaacatacaggtacatgtgtctttatagtagaatgatttatattcctttggatatatatccagtaatgagattattggatcaaatggtatttctggttctagatccttgaggaatcaccacactgtcttccacaatggctgaactaatttacattcccaacaacagtgtaaaaatgttcctatttctccacagcctggccagcatatattgtttcttgactttttaataatcgccattctgactgtcatgagatggcatctcattgtgattttgatttgcatttatctaatgatcagtgtcattgagctttttttcatgtttgttgactacataaatgtcttcttttgagaagtgtctgttcatatcctttgcccactttttgataaagttgtttggttttttcttataaatttgttaagttcctctagattctggatgttagacgtttgtcagatggatagattgcaaaaattttctccctttctgtaggttgcctgttcactctgatgatagtttattttgctgtggagaagctctttagtttaattagatctcatttgtcaatgttagcttttgttgcagttgcttttggcattttcctcatgaaatctttgcccatgcctatgtcctgaatggtattgtgtaagttttcttctagggcttttatggttttgggttttatatttaagtatttaatccatcttgaattaatttttgtgtaagatgtgaggaaggggtccagtttcagttttctgcatatggctagccagttttcccagcaccatttattaaataaggaaccctttccccattgcttgtttttgtcaggtttgttgaagatcagatggttgtagatgtgtggtgtaaattctgaggtctctgctctgttccattggtctatcagtactcttattctgcctcaggtctttcgtgtgagcatctgctgagatctgaggaaaagagtataaattaaattccgcttctatctgcactgcccaaagattctgtgttttaatactaccctacaactagtctcttgcaactggttaataactgtagttttttttttctgttaccaatagtatggcattcagaggccttaaggcagtaaggcatctgccttagtgttctgcaagtgttcacatcctgtctctcctcagaggcatctatctttccttagatttcaggttacagtagtttccccaactcccacttatcagtagttttgccttctgcagtctcagttacccatggtcaaccacagtccaaaaataggtgactacattacaatagtcatgtagagactattgtctctctacaaagagagagaaagagagagagagagagagggagaccacatacatgtaacttttattacaggatattgctataattgttctacgttattattagttattgctattaatcttttttgtgtctaatttataaattatactttatcataagtatgtatgtataggaaaaaacagtatgtataggggttaggttgtatccacagtttcagtatctactggtggtcttggaaggtatcttccacggataaaaggacactacggtagttggttgttctgcagcctcagttctctatggattcaaaaccagttttagatttgcacactgtctggcttgttttaaattattgtatgggtgggagtggtgctcctttcattttctccatcttgtacagaagccataattattttcaattctatataatttttgattgaatgaaaaataccataatttttttgttctattagtagacatttgaattatttatggttaggttcatgacaacaaggaatgcttctatgagcacatgtcttttggtgtacatatataaaatatttctcaagggtatagatgtaggaatggaattcattaattgtaggagaatacatacgacacacacacatgtatgagttatagggtatatatatatgtgcatataatgatttcagtaaattattgatataaaaattttcaatgaagtataactcatagaaaagtgtacctatcttaagtggccataggatatcatttagactgtaacataagagaactatagatattcacatccccaagcattaactgagaacctgttatacagtgggcatttaggaaatgaaaagtgaaggaaaagttactgaccttaggggtcttgaaagcgagaaaatgattaagtgctgtatacacacacacacacacacacacacacacacacacgcacacacgctcaaagagtagggagagaaaaattatgattggggaaatcaataaaagcatattggagaagacatcatttgatattaacctttaagtatagcagtgtagatagtgcgtaagaattggattatagaacttagtcattatgttaggaaagaaacctatggccttgttttatagcaattactggggatatccaggtcttttgcactggaagaaataatcttagaaccatttattaaggacagacccttacagatcatggggtccaaaactgtcttggggtcgaaaactttctcatcttatagatgaggaaactgaggcttagggaagggaagggacttgcctggggtaaatttttgctagtaaatgtacttaatgagatctctcagttacactgaaacgtttgagtattggaacattgtgcttttgttgttttctttttctttaaatccttaaaaaagttgtggatacatagtagatgtatatatttatggggtacataagatgttttgatatagacatgcaatgcataataatcacatcacggagaatggggtatccatctcccttcaagcatttgtcctttgtgttgcagatcattagaatattgtcttcatcattcttttattccccaccaaagtttttgtaaggtagtaagaggatctttgtggaaagaattcttattcccttacgttcctcctggtctgttcctaggtcaaggttgagtacgtttatagatattctataaatatattttattttcaacattaagtgtagttcatatagttgatgatctaagcaataagaaataaagtaaaatctggataattttggttactctgcttttcctctgtgtgtttcaactacaaaattcctcactacaatgctccccaattccttttattggtgcttgcagtgccagtgggcaaactgaattcttcatgcaaccaaagaattccaaaaacgtatttcttgcagctagcataaatctccagttccacaatggtagcagtggtggattttacccaatgttttaatgatgaatgtaatcagaacataaaaagatctaaatgcatactttgaaggaatttgcaaaaatgactagaagaactgaaaaaagcacaattcagtttgtttctttagcatctgtgtttatctttccccttctcttgtgcatattgaggatgttttaaagattatatttttaaaaccaaataaatagtttccaaaatgttcactgatggggtaaattagcgttctctttgtagatgtaattattaaataaattcaaaggactaaccctagaatgacatttttccctcattcctgggtaatttttgagatttcccctcatgcccaggagctaattatactctctcactctccctctctctctctctctctctcgctgcagctttctgtatgtgtgtgtgtgtattatatctaagaaattttactccaaacatctaacattctgggtacgggtttgatttggggaaaaaattacacttttttttttatcctttagcttttctccttaaaaagtatcagtgagggcagggaaagggaaggagaatggacccaaactaataaaaggattgatcagtgattatgaacaaaatatagcttctgtatttccactcactcagtatgaagtttgctattattttccccaattcctggagccagttattgcagcaaatttagcatttggagcttatagactcatgctagacagacacatatagaatttacgaatcgaattagaaaaatggtctttgaataatataaattgtactccatgtatatttttatatatgaatgaacctactggactccagtgagattagcaaataccttagctatttcattgcaataaaaaccatttttcagtcactcatgtccctctgggttcttcagtgatattatttgatgtatgctttattctgtgccatttattgtactgagtattttgcatgaatgatcttatgtaatcatcagtaatctgttaaatcagtatcattattattcttgtttcattgatattgaaatataaaagtaggttatcataaattaaaaggctacgggtagtgataaaattttattccaggtagtatctccagaatatgaattcttaatcactactcgtgtttattcattccacatgtcactgaatgcctactatgtctagcaaagttctagattctcttgtagttgcattactcagttattggctagataaccctaaacactgcagaaagctgcactctgcccccttgggattgcctggctccataagattattaccgttgctgagtttggggacccacttgagcaaatctagcatacttaaaaggaagtttttattctggagaagttttgttaacaaaacatctattggctgggcagagtggctcataactgtaatctcagcacttcgggatgccaaagtgggcaaatcacctgaggtcagaagtttgagaccagcctggccaacatggtgaaaccctgtctctactaaaaacacaaaaaaattaggtaggtatggtggtgcacgcctgtaatcccagctattcaggaggctgaggcaggacaatcacttgaaccggggagacagaggttgcagtgagccgagattgtgccactgccctccagcctgggcaacaaagtgagactctatctcaaaacacaaacatacacacatacatacagacccacacacacatacagacacacacacacacgtctatttagcatctgtcccaggcagtgcttctcaatagcatgttaatagatgctaaaggacctttagttaggaggtcaactggtctacctctgtcacttagtagacaagaaggttgccctaaaatatacactaagacagtatgcattacaaaaaagccacaataaggacatagcttaggagaaatgttatgatctctcttcaccagtctccttatatgacactggttcaattcagaagtagaggtgaagatagttaatatcctaggaataaatgttaaatctcccttcccctttcctcacagtattatagtcaattctcataaggaaatggccctaagttacaacattaagcttttctattcacttctaataactgaaattccgcccaactgcctcctcacttgaattccatgtactttttttccaaataaattaaatgactttctctaagtcaaatgctattaaaattcttgttgttcctcaaactctgctttcttgtagtatcaggtttattgtgacttgaatgagacttatttgtaaatggatgtattttccattccatcttgctcttgcatacacacacatacactgaaattcagacttttctgctagctcttagaaaacaaaagcaatgtgtgattcatgtgtcacccactgtgggaagttggatgttgcattgcatttgtctctcagtcttaaaagtcaatatggcaaagtcattagcggcagagcccagaagatatccctgcccatgagctgtggagatctggacaagttactttacccaactccaagactcagtgaatgctcttatccgtaaaatggggacaatgataatatgtcttcctccctttgggtatttgatgattaaatgagaaaacacgtcacacagtcaattcagtgcttcgcgcacaataaaagcttaataaatactagttatgattatgtttagccaacatgtgttggcatctgacactaaataaatacttgtccaatggaaatgaccagaatttagtgcccctaacacttcactgtagtatttgccatatggataagcaatctttattatgctatttggatttagttccaaagctaaccccacctccttatattgaagccagctcctaggccacctggataacttttctggcatttcaatgaacacaccaatacaatacaagcataattagactttctggattttagatctattctcaagtatatattgtatagagaaccaagatgttcaaggactgtagagccagttataggtttggttttaaagcacttcatcttagactcatttcctttctggctgatgttagttaaaataatataagcctgggcttaagattgtatctctgagtgagacaaaataatagatgattctatctccctttagaaaaaaaagaaaaaaaaaaagcagcagcagcagtaattgactcttacgcttaggcaagaactccacaatggatttgttggggaaaaaaaaaatgttttcctgcttgtatgtgttggtttagattttctgttgtatgtgtgttgtgaaagaagactttggataattattgcgattttccaagcagctggtcttccaatggcattgttacagggtcagtctattttcctttaatctgaccataatgtcatagaacactggctgtttctttggcaactgttcagggaagactagctgttttctctacctcaagccaatggtggactgcaggcaggttctcctgcaagccacagggaagcagttttcattactggggtctttgtatcaacaaatcacttatttcactgtgattctgttgagacaggatccgaaagtaaatttcataagaaaaaaatgattatacatcaagctcaggtgactttaaaatttttcctttacattgagtaaagtttctggccacttttgaccttttttttcaaatgacattattgatatgaaatcagaaactataactgataaactacaaactgctgtatagacacttttctacacaatggtcattgcttttattctttatctaagcctgaattgtaaggcttccttctctttttttttttttttttttttgagatggagtctcgctctgtcgcccaggctggagtgcggtggcacgatcttggctcactccaagctccacctcccgggttcacaccattctcatgcctcagcctcccgagtagctgggactacaggcgcccaccaccatgcccggctaattttttatatttttagtagagacggagtttcaccatgttagccaggatggtcttgatctcctgacctggtgatccacctgccttggcctcccaaagtgctgggattacaggcgtgagccaccatgcccggcctgaatgattccttctcatcttctgggaggtttttctgacttgctttctcaattccactctcttaggcagagcttatacctcccttcatgtatgttacatgtacatgtattgagtcagtgcatcctcctaatgaaacttttcctgagatctctcttatttactttcttccttttctgaaattctctgctatttagattcagtgccaaagaaattgacatttttatttacttgctgaggaataaacagaactcgaaaggatttgggaacccaagaccaagttttatgaaataactaatcttgtcttcctaaatactataaaaatcttatataatccctaatacttagcatagtgctaagcaccgaataggaatacaagaaatattgcaatgatctgaattgcttacaaaatattgacaacaacttcttcattggtaaagaaaagctgcttttgacctttttttcttcctcaagagtaagtagtgagaagcataaagtacccaagagtttctttgcctttttgattgttgcatggaaacaagtatttgcaaataattaagatgggaaaatttggctccttgaaaaggcaggactgctttcagatatatttgaaatgaacttatacagaagccaacatggttatcagagcaattgggtctatttcctatcatctcttcatgatatcttgtaaaaatgccctgtgttgagagcactggtgatcatagcagtggggttggagtagaatctggtgcgtttcttcctctacagatctcctaatagcacttgccctgttttcacagagccttatcaaagtttgatgtagactccagtgtgtagtagtgggcagtgacctaccagatgacctctttgaacaagagctagtttgagccagtgtatagctctgaatcgatggaagatccattttcaaatttcaaaagggctgttaaaacacttagttctgtattatagagatacacaaatggatataacaaactggatgtctcttctgcagctgtttcaattcgtatgccatgttttctatccttcttgctcctggcaattttctttcctgaagcatatcacaccttcttacatttgacaagcattttcacagctactgccactccctgctgccaaacaaaacccagccctgtttgaattcttgagggctgagggatggagaggagacctgtttgactttgaaatggttttaacgtcactttgtatacagaacaaaaatggaaaaccagatcctgtgtttgtctaaaaactaaaatttcaaaacctaacctgaggtggagaaacagatactacagggcaaggaaatgtctgggctcaccgcaaaggaatgcagcaagggaaccacctgcagacacctgtttaagagtttacgtttttgttcttccacacgattattatcttagtatctcaactggctatacatgcttttaggaaagttgcagggatcatattctaaggcgtatcaaatatgttcagagtgcaagcatgagcagaatctctcctctctgctagtgaggtcctgtaggtctacaagttactaacttcaggcttacagaatgttagaagtaacgggtgcatatcctgtaatcaatcccggtattgagcaaacaggcacaaatgacacccagcaagaaaaatgacttgctcaagacaccacagcaagttcatggttttctgaactgaattccaagtttcataacttctaattaatcctcctttttttcccccagtacagctaatatgctttttgtgaataataacatataataggtgtaatctgtcagaactatttaatagttgatagtatgtatcctcagtttattgaggttcaagctcttctgagtattataatactttctattggtattttctctcttgagctattccctaccttgaatctttcagactagagatttcagaagattacgtagtgtctgtgacttcaactacacatggatagtccacaggactctggactttcacggttccatgtcagttggacaggtgttactctaaggccctgcaaaaatataaagtagtttgagaatcactctcctgttaatcttcagtaaaattctgagctatttatatgtgagattgagaggcagcttggtaggatggaaagagtttagactttgtagttctactgccccaggtttgtatcccagctttatttcctaacagtgtagccttgggcaaattgcttaacctctccgaggctcagtttcttcaaataaaaaaatggaataagccttcccttgcagagttgttaatattatatgaacgttatatatgtgaagtgcccaactccttgcaaatacctaatatacaccagcttccttcccaggcttttgctggtcagatctggtttccacttaactttggctgttggaagataagataatttattatgaagataattgtctggtaattgtcatgagaattcagttgatgataattgaatgatttgtttacctttctgtctaaagagttgcaactcatgggggtcgtgtgtgtgtgtgtgtgtgtgtgtgtgtgtgtgtgtgtgtgtgttacttacaatgtttttgccatctcttcctgtatgacagtatttgattagtcaggtcttaaaatgctaaacactttatccttttcttttaatttcaattttagattttgggggtacatatgcaggttcgttacaagattgtattgtgtgatgctgaagtttgggcttctatcgatcccatcatccacactgtgaacataatacctgacaggaagtgtctcagccctttctccccctccttccttccttccttttggattcccaagtgtctgttattcccatctttacatccatgtgtacccaagttttcgctataaagaaaaaaaaaaccctgaatacctattgcatgcctcactgtagaggctacaggattcacaaaacaaggccccataccctgggcattgataaaaggaaggaaaaatgtagctttcaaaaaaatgaaaattgactttgttgaagggtattgtaatagaatcataaaactgagtgaggaaggaatgtattctaactacacaattagggaatactttgtggaggaggtgggttctggattttgaagacggagtatgatctttgacagatggtgttcggtgggaatgaggaaaaagaaaggtgagcttcagccagggattggaggtggaaaaaatgaacacatgggtggcgatgattcaggcagaggggcaggaatgtgaaggaactaagacataaaagtagaaagacagtttaggcctggtttatgagggggtctttgaatggcaaactcacctttggtggtccacgggaaggtttgttagaactgcaggagtgtgcccaaacctatatgtcaagccactaactgccagccatcagtttgaaaaccgaagcaattaagatcgctgtccatcttacctgaaagggaagctttgcactctaacttgaagtagcctagaaatttcagaaggttacatagtgtctgtgacttcagctacacatggataatccacaagactctggacttattttcactgttgtgtaatagggttagttttgtttttagcagattctcccaaggaagtgtggtaatcacatttctcaaaccattacattaactgctgttagcaataaattattgcttatgtgctaaaagtcaaaaaaagcttttcccctttggaacttctttactatactccctgatatgttttgctgtcctagaaactggtgtttgtgtgtgtgtgtttgtgtgtgtatgtgtgtgtgtgtgtgttcaattgagtcaagaacagaggagaggagactcaggctgaaaatgtcaagttattttgagtcaaatatttgtacatttactttggaagttatcactaaaaaacaaaaagtgtgtgtctctttgtgtctgtatctgtgtgaatctgtgtgcactcattggtataaaaggaggaatactcttctcaaaagtacacaccaatgttcttgtccaaaagcctactttcatatatgtgaatgtgaattcctacattctgtgtgtttgcttctcctcactatagcccatttctaacatatcccaacttaatttcctaaatctgtcctatctacataccacaaagtgcttaactgagaaattaacttctgtgttacagataaatggaagttagattaaaaggataatacattttcatttttagtgttcttaaataatcctttttattgtaaataaatataacgttaactccgataagtccagactacttcactgagttcaccaccgaaatgttttcacaaaatcagcatcgttataccttggcttttataagaagttagtatacgaaacttgtataggaaaatgtctctgtattatctatgaaactgttaataaatatgttttccatcatgtccatgtcatcgtttacatatacgagatgatttcctcttagaattcattctaaacttctttaacagaaattatctttttttgattcatattctcccttttgtcctggttaccagacagcacaagtgaccatcatgtttagatttctgatacagttctctcttccattcctctctgtagcctctgatttttttttcagacttcagttggaaaaatcctaatgaatgtaacttttagttacaggttgaattcttttgaatgtgtatatttaaaataagtaatgcacatagttaaaaagaaacatgtttttaaaacagtggttctcaattatagctaaatatttagaattatctggatggttttaaaactctgatacccaggcagcatcctagatcactcaaatcagaatatctgggtttggtcacggacatcagtattttttttttaaagctgcccaatgtcattccaatgttaagattcattgttttagatattctttattatgatgttcatcatttttacagaaacacatttccaaaaggataaatttcaaaatcacctgtaaacccataatttattataagtcactcttaacacctaaaaatagctaacctgctaacctttttcttttgctttttccttcttcttttaaactaaaattacaataatatatgtgcatatatagtgaatgtattcatttatatattagacacaatttacatatttatgcttatatatatatggcatacatgtacacgttacaatatgtgtatttgttttattccaaatctgttttattctcagagacattttcccatatcttcccagatatattttctgagaacctggtttttaatgcttgtataacattaatacttgtagttagaccattttttttactcattcttctattcttacatattaatgttgcagacaacatccttaaacaacttttgtgtgactaatccaatttttttccttgggaataaattatgatctattgatttatttctatgtgggctgaattttgtccataagaatgaaaatggtagccccctaagatgctgtttgctccctgatatctcatttttctctagaatacgaaggaatggctgttttctgctcttcctaaagattcaggatgtaataatatactgtcacaggtttcagaagcatgggaccttggcaccgaaagggtctctactagctaagttgtcttggaaatgagtgggtccacttcctcttctgatacaggaagaacagggaggtcattaaatgatgacggggctctttgaagtgaaatgaagcaacattggagggtgtagcatgtaaaaactctcttctcggatacaaaaaaaattgagctacttgggctaggagaagtgagcctggatttggaggcttaaggtttcaggaaggtctgagacaaacttaagaagaaatgcatcaagagggttggaagggacagacgattgatgagagcactgaaattccagtgtgatttgggtcacccgtgtgacatggcatatatttatgggatacctggaaaataagggagaaacaagacatctatctctgtcacactttggggaagtatacgattaagttccacactctgtggtggaaagaatgtcctggaggcccccagtctttctcactgtgatgccatgctcatttgataacctcataaacacatttctgttcttattgccttacccattctgatgcactgatcattttttaggccatgtgaacagggcagagcttgtcattatgcctgggacatagtgggcattcagtaggtgtttgttgaatggaagaagcaggcacaatcacagctttcccttctggtgatctgctttatgatacaatttccaggaatgcattgtgtctaaaattggggaccatatgtacaggaaattctttcttatgtcagtgtgaaatccctccaaagtaaatccccctttatggttttttattggtgtttattcttttttaatacagaaaactgtaaactttttattagggcaggtttttttgtgcaaaagccttgtcatgggctagatgacatttcttttcctgtagagatacttggacattttacaattcaattacttccttccaaaagccatatttagaattccagccaatctgtgagccagaaaggagtgagccagtataataatcaaggtaatgtggcaagaaggtgtgaaatttcttagcctttctagaagagatgggtgaaaataaatgttttcagggtcagtaaataactttcccctagtagccagacagaaagcatcttactttgctcaagctggacctttgtcatttgaaggatctcctcctaatgccatctaagcttgagaggttcatatggctgcagcatggtttatcttgctgtttaaacattgtgtccattcaagctccattgtagacctttcttttaaagagagttcaccctgggatattaaataaaatggaatttggatggaaagttggcatcccagttcggaaccaatttttattgggcacagacttggggggagcagaaaaaaacaaacacaaagtctatgttgtaaatgataataaaaaaagaataagtaaaacaaatgaaaatgtttcgttttactaaggcttttttgcattcccatgacttcaaaatacttttgcattttatggcaatctataactgctttagtatagacagacaaagaacaaataaagttacataaatgcagagaataacagaagaaatatgtagaatgacagtggtcagttggtaaagattctattggaggttttggaggtttttgcataatttgtattagtccaaaaatattatgaaattaataataaattttaaagtgtatacgtttcttaatgtcttcaacttgccaattctgttgttagtcataaacttttatattcctccctatgtttatctttcccatctctccggcttgcttttgttattactgttgctgattctcaaaaccattagatcttaagtatattccactaccaaagtcattaattttaaggagaaaatgggaagttagaagccatgattttacttataataatccatttgtctcatactttcatctcaaaaatatgtatttaagtagaaagagagccagaaaaataaccgagagagttatattgtaattctggctctactgtatactagtagtgtgattttaagttggtaatttatcctctgtagcctcagcattgtcttctgaaaagtacgttcactcattcgggtggcgtgagatttaaaagaaatgactcctggtagagtagaatgaagtagaatgtagaatgcggtagcaatagaatgaagacatgagtattgatgatgtagcactggactgtgctatatgatagttaccagccacatgtggcttctttaaatttgagctaattagaattaaattaagttaaaaatttagctccttagtcatacgagccacatttcaaatgctcaagaaccatttatggctagtggctacaatattggacagtgcagaagaactattccattattgcagataatcctgttgaatagcacagacctagaatgacagctccgtgtagggcactgggaattgctgtttggggatggtatcaccttgagttggtctgtgacctgctgggagtaatgcagttctcaaagaactctaactctcctttaaccgcgtgcaaaattgtgaacctgggatgcgtgagggagtggttattttgtgctgaatggtatgtcagctacatcaccacagatgtgagatcagcagacttgcttattctgagtgccgtcagaatcgttaagtaccatatgtccagtgtcatctttggcacatttatctggcttcatctgagttccgaagtgaaatctcacagccgccttcataaatttagccatcaaagaccaaggtgatgatgacataccaagctttagaatcctcaagtagggtgggatattggtgctgggaatgacgaatgaagggacatctgagaatcatgctgcttttatggattagcagaaattcatcttacgtgaccaagagcagctgcataatggctagaaaacatttgccctttctgcttatgttttggttatcccaacacattctatgtgcaatgtctgagtttgaaagttctttttaaactataaaatcatttcccaaagttaggactgattatgaatatcatcaatgattgtttttaaatgtcattatggtaaagtcatagaatagtgaccatctgtgctgcctttgtctttgtataggtgcagtagtcccagcctttctttctctctctctctctctctctctctgtgtgtgtgtgtgtgtgtgtgtgtgtgtgtgtgtgtgtaggatcactggagtatggtggtgaagaaagctgtcacagcacagaagttcagaaggaggtactgtgaaggtcccaaagcattgagcttagctagttctgaaagcactaaggttaactagtcaactcgagagttgggtgtatatactgctaaggaagggttcaacccagggggctcttgctctcccaagacaggaaacatgtatctgaagtgtgaatctattgctattatcctcagtttggcaggcgacagggttctgagagtgagagagtaatggaatgtgtatgtctctgctcttgaagataccaggggcacctcgaaaactcccctccccagcccagggtcaccacagccttaaccgactgcctcctttgcaaacctttaccatgggtacctagaaaaagacatacacacacacatttcagcttatggtttttgttcgtttgtttttgttttttgtttgtttgtttgttttgccagatacttaagatttaagggcaatcttaagggaaatctcttctcccatcttgactgaggcacagagatgtcctgttcccatgctgttgatgctgacagacgtaggacacgtttttttctccgtgtgccaccacactcaagcagaatgtataagatattttctgtctaccaaggatacctggtgacataatcatacctagcctttctttcctccctccgccccctcagcctctcaccctgccctcccatgggtctttatgtgtgctactctatgtagagtacaactcataccggatagcctgttacttattttggttcaggagcagctgcagaggatgaactggagaggacagtctacttgcaaacacttgtagactctccagtggacaggttacctctaaagaaagagaagcctacgctttcctactcactgaagttttttaccatttgcaagtggatccaatatatgtttgttttgggtgaggggctaacaaaatgctctgcggtttctgcaggtttccttataggagatcctgttatcctcgtgtcgattcttgccccattagctttcagcagtaaatagttgagggtctcatctggaaagttctattattagtaccacatggtcagtacattttaagatagacattttaataggcagaaaactgtatacaaggagagatgtgcaatgcagaataactatcaaatgatatctagatatcttagattgctactctaggccatccatggtcttaccccatgggttcctctaactcccttcatcctcccttaacattagctgtaggttttctcatcactgtctttgctcacgttattttctctgccttgaattccctccctcaagctccccacaccagcaccaccagcatgtaccctgttctttaagactcaactcaaatacctctgcctcaaaaacatattgccctaattgtcctggctgaaagtgacagtcatctctggaccccccccactctcatctctgcacctctctatgtcatccttaatcactttctgacttgtgttcttacatagttgaatatgccttatctctactacttgatattaaacttcataatgataataagatcctatcttatcttctcctgtctcttccctgatcaggcctagggtagttcctcccacactgtactgttaagagaatacataatgaaaaagtaaatgaataaatggcagaaaccttatgtggaatgctggtgcaaacagttcctttgactgggggcttttaaaaagagactgattgtataggagatctgagcaattttcatattaatggaatggattattagagctggcatgaacatcaaaagaatctagccacaaccacctctcaggtcatcttcattttcaaatggggaatctaagatttagataggaccattccagatcacatagtgagtgattaatagacctaggactcatacctcatctgacatccaacaccacatgttcttttgaaataaggctggaataatagtgagacacacatattagacacatgattgtgagaagacagttttccaccccacagcacatgaccccatacgtttaagtccctgcctatacaaatagtacagacaaagtaacagcaactttagagggaaacatgactatttccatcatatggtgattctacagagcagaatcagaaacctgggtaaagagaaaagtcctactcagtttcattcttgttaaaagacttaatgactggagttcaaactggcggagtcattggcagcattaaagaagtggggttgaagctgggcaacatttccacaacagggagtggaacagagagacagaaaatattgggagtcttgtgccccatcagtagaaggagatgaaggccagagccaaatggtgggggcaggggtagggggaagattcctttctccagcatgtaacagcattatgggagtgaattcagagcttctgtgtgttctgagccaagtgcctgctggaatgtggactgtaaatctctcatcgtcctcttcactgacccacaagcaacccctgctcctcccatctgcttcccgaccacctgcctttcagtttttctttatataaaaaacgttttccattctcctaccttcctctctgtctacctttgtatggtacatctcatccctcttctaaatatttccatctgaccacatttttccctaatgagacaggctcacaataggataaagtgtaacatttattcatttatctgctcagcaaatattattgagcacatactgtgtcctaggcaccactttagttcttgagtggtcagcagtaaagaaaacagacaaaaaaataataccctggtggagtttccattctagtggggacacaataaacaaaataattggcaaattatatagaatattggaaggaagtacatgctgggagagaaataagctgggagggaaaagggagtgctgggggagaaggagctaagagtctcagttccagagttaggcagcctgagctggaattagaaccccagctgcatgcagtggctcatgcctgtaatcccagcactttgggaggccgaggtgggcggatcacctgaggtcaggagtttgagactaccctggccaacatggtgaaacccagtctctactaaaaatacaaaaaaaaaaaaaaattagctgggcatggtggcgggcacctgtaatcctagctacttgggaggctgaggcaggagaattgcttgaactcgggaggtggaggtttcagagagcagagatcacgccattgcactctagcctggcaacaagagcgaaactctgtctcaaaaaaaaaaaaaaaaaaaaaaaaaactcagctgcatccttcccagtcatgtgacctgggcaggttaagagaactccctgagcctcagttttcttgtctgtttatcaagagtcattagggaaactagtatctccttgggttgttgcagggattcaatgagatgacacatgtaacacaatcattacctcgggcctgtctcctataaatatagtgattgtcacgtttgttatttaaacaatattatatattgtgttttaggtattatgtatgtaatatatagtgtgaatatatgtatgcgttatgtatatagcattatctgacttcgtgcctctagtattacatgcttctcaaaatatctatagttttgtcggtatttctttctcctactagattgtgatcttttatcggcaaagaccacctctcgtttatctctataccccccattgtgcccagcacatcagagattttatgtttggctgctgaatgagaaacaaatgggatactgttcttctaagcacaatcatcttatattagcattcatttttggaactcttctctaattcctgtcatttttgtatcacatcagaagaagagctatattccctccaccgcctctcctcgcctattaatcaccataccttcccacctcttacgggaataccgaactaatggtccttgtctcaatgacctgcctatcctttgtcccttcatgggaatcttctcacagatcaagttactatgatctacaaggccagttcccatagcctcgttccacttacacacgatcttaaccatttctgtccagtgggagtcacccactcacctcctaaaacctctatgcatgccccatacccctagtcataatactcttatacaaatgtttaacactttgcagttgaagacccaatgtcatacatcttttcatttgatacttagagtcactgtgtgaggtacaaacttcagatattaccagttgcatgttactaataaggaatcagaagctcagagagggggaatgaaagaatccaagtatatgtggctaaaattggccacgtcgacacctgaaatcctattatctggggcaatatacatactgggtttgaaaaagttcacacttagcagttgaatgacctgagtcctcaccccagcttggctacttactcaccatgtgaccctgaatagtgccttgaagcctcagggtttttttacttctgtaaaacagtaactcttgccctcccggacacatgggatagtttgaagattaaaagatacattggctgggcatggtggctcacatctataatcctagcactttgagagactgaggcaggtggatcacttcagtccaggagtttcagaccagcgtggacaacacagtgaagccccatctcattaaaaaaaaaaaaaagatatattaagaaacttttgaaagtataaatcatctaaatcatcatgtataaatgtaagagatatgaaataagctctgtgaaaatataatggctgatggcgtccctgtgtgaaagatagaaatggacattttatgtaatttccatacacaccaaacaaaacaaaagatctttagaatttccaagcatgagtgaggttttacattgattgtaaagaatatagaatgcggaaactcatttttaattattaaaacttataggctgaaaaaaagagtaagcactatttaaaaaaaaaaaaaaaaggctcaaccaggcgcggtggctctgtaatcccagccctttgggaggctgaggcgggcagatcacgaggtcaggagatcaagaccatcctggctaacacggtgaaacctcgtctctactaaaaaagtacaaaaaattagccaggtgtggtggcacgtgactgtagtcccagttactcggaggctgaggcaggagaatcgcttgaacctgggaggcagaggttgcagtgagccaagattgcaccactgcactccagcctgggcaacagagtgaaactccgtctcaaaaaacaaaaaaaaaaatgcttccccacacccacccccaacgaacgaacaaacacacttaggaaatagggaagaaggttatgttttgggacaactttctatacactgagaaaatccaagaggtctccacatctacctataaaattcagtgatgctcagagctgacatgtcaatttttcctattacatagtaagaagctcagcattatgggccgagtttattggacactgcagaaattcatttacattgtgtgcttaccctggattgttgttgagtccagctgactgttgcttcacaaattaactgtcctttgagacttggaaatattgaaattgcatagagtttttgtgaaatctcaatcctgtagtattgtgtatattacaacaggtgctcaatagacttctggattattaaattgagtaatatttgtagcaaagatctgtaggctgaattataaagctaatctgtggggggatgccaagatttctctatcattctgctatgtttgccatggtctaccaggagatggcgcctggtaagagttccatattttaatgtattctggtccaaatcactggagttggcaaagatggagaaggaggaactgagcagttcatccccaaagacatgatgacaccactataagtgtgaagccagcaagagtgcaaagactgagagcagcgtggtcatacctagacatttatctggagagcaaaatcaagcactggggctcaaagggttcagtcccagcagttaggagagagaggagtctcctaggagtagttgccccaacagctgctagaaagtcctgatcctttttggtctgagccaaccaggtctcagcccagtcccacttgcctcaatttaaagtgacatttttggtctctagctgggtgcttccccctctgtagcatataacaaggatacactttcaaggcagggagcctggaggacaaggagataaccctgcaggcctggccacccaggctctttccggtgttccatgtacactgcatagattgagtggacacccaggttaaagagatctctcagtactcttggattttcctttaccttaattttgaaattataatattttagacataacttgtgcaggatcacacagtgagtctataggagaactggatgagaacccaagttttctgactttcaatcagctctctctccctacatgtaccttaacatgtatcataaagatgactgttgccatatgggctaagccctccattttctgagtatgcattaccacctccttccctcagaacaattaacagaggatctcataaagatgtgctatatatgtgtcccatagattttaatgagacttcagtaggtgggaaggtgtagtatttattctgggatattggaagagcaagttggataggaccttaaattttctacatagatacttgtggaggacaggctctagggtgacttccaatgacccctgcctcctggtgtttacatctctgtgtaatacctctccttgagtgcaggtgaatctgtaacttgcttctaatcaatagaagaaggcaaaggtgttggggtgtaacttaccatgattacatgttgtgatatacgagtccatctcagcagatagagagactctccttgacagcttgaggaaataagtgaccatatgagagaagctcatgaggcaaggagctgtgagcaacctttaggagctaaggacagcttccagcagacagccaacaaaaagctaggatcctgactcacatacccacaaggaaatgaattccgccaataatctgaatgtgcctggaaaagattcttccacagccaaccctccagatgagaatgctactcagctgacactttgattgcagcctgtaagactccgagtggaggacccagccagagtcatgcctgggccctcagaaactgtgagatagtaaatgtttgttgttttatgccactgagattgttagccaacaatcaaaacctaatacaataataccctttactgttttctagacagctgctatttagaaaagcctcccacccaataaaagagtcccctttatagttttccaagtaggtggttatcagggttctgcttcaccatcttcagtggcaaggaacttccatttcacagggcaaccatgtgtgtattacagaggcttgcatgttgtcaagttcagctgtggtcttcagcgggagcctaggacatgccagggatttcaaggtaggctggtgaggggttcctggttttcttggtcctgaaccatcccagtgccattctaacagttgcaagtctgcctccttcatgacaaaaggactggaggaaaatgtatctggcaagtcgataacactggatcgtttgctcccagctttaccacttggcatcagtgcaaactttcacccagttaaataacttaatgagccctgctctgcatgcttgcttcacagagttgtgacgatcaagtaagacagcatctatgacagtgtttgttggctgtaagtcagcaaatgattgcaaatgatgattattattaaaataatagtcatttgtcagtaaatatttgtcaaagctggtccacactgagggagacaggctctccagggaaactgctgatgcagagataaagaggagaccagccccagtttggaattgcatcactgattctgaattccccatggtacatttcaggtcttgcttcaggaatttgttttttgttttgtttggtaggaacaagaatcccctagagccagttatgttgtcatcaaacttagttgctaattaggcaccaaagcaaacctatgccagtgagacagagttgaaacttgaattcctttctgcaggtggagcgttggatcctagaggcggtgtatacagcttggctattttgatgcttctgcatgcaagaaggtttaagagaatctgagtaaagcaattagcatccctctgtctgcaggcaaaactggtttggacatgcttctctcttcttgaagggctgttagagccttggcagtgtatctgacgaaagatttcactaagcaaaatgtcttcacttacaaatccagccactttgcactctcagtcagcctcaaattcatttattttctttagagtttccctacaaccacgaaccaccaagaattaaattaatccccaagagcctgagcaattatgaggatgttgaatctatccattcaaggatgtcccagcaaggactgttcattcttttaacgtaaactatttatatgttttgattctcctcatttggaagaaagaaataagttttcatatatgtatttttcagggtgtattttatatatctgtttatattacactgttcacattactattaaagcatccccattttattgtaagtttattttgcctgcttcgggaagaacaagaccaagatcccattattaaaaccaaaatcttccacaaaagtttccttttaaaaacttagattaggaaattttcagtcagccagccaactctatagcctttgatacttggtcctacaaagttttcttcccctttggtctgaatgttttcctttgtctgtgcacactctattctcctgccagcatgataatacatgctgctttgatatcaagtggcgggaacatatagaaatgtgctattggtgctgcaatttgtatctttgttttcatcaaacttattatttaccattttaggatttttttgtttctttttgggtggttttttttttttttttttttttggtgtgttttgtttgatcttggttttggttttccaatctaggcctgaggtccagtgctaatttgatgctagtgtgaactctctgagcctggttccttgacgttccattgggtgactattgcagtggttcagatgtggtgctaccagccttccccaccaaggaagttgcctgctttctcatctttgatcctcttcaccaactaaccacaacacaccagtgaaaattttaatttctccattcagttcctcagtttccgccaccaggtggtgagttcctgcgatacagataacctttttgtcttgttcagtacaacctcagtgcctagcacaaggccttgcagaaagctgacattccttaactctttatttctgaaatgaattaatgttcttaggttccatgtctcgtggaccaaataatgcaatcctagatcttgccatagcatctgggacaccacgtatgatgatttaggtaatcagtgaaaatccatgtcagcagctgccaatttacagatgaattatgtccaatggtttggagatgaatgagttttacagttcatagagcatgacaaaattcatcttagccttccattttatagatgagctaactgatctctgagagaggaacgacctctgaatgtcctgggaagagcttgtggcagaagtaacttctacctagtagtgtattttccttactgcctgttctcatttgataacagacccatatatcaattatttgcatccttcaattaacccacaagaaggcaaatttaatccagtgttagataaaataattattcacagggtcataacactattaaagaataagctatggccaggcgcggtggctcactcctgtaatcctagcattttggaggccgaggggggcagatcacttgaggtcaggagttctagactaccctagccaatatggtgaaaactgtctctactaaaaatacaaaaaaaaaaaaaaaatcagctgggcatggtggcagacgcctgtaatcccagctactcaggagctgtagtcctagcattttgggaggctgaggcgggcggatcacttgactaccctggccaacatggtgaaacctcatcctactaaaaatacaaaaaaaaaaaaaatcagctggtggtggtggcagatgcctgtaatcctagctactcgggaggcggaggcaggagaatcactcgaacccgggaggtggaggttacagtgagccaaaattgcaccattgcactccagcctaggtgacagagtgaggctccatctccaaaaaaaataaaaagaatacactatgaggcagtgagatatagggcaagactcatgttaggactgccacagagcagtcagtagtggcaacaagaaaggaacgcccctacgatgtgacaagtctctaccttgatatcaatggaattatgaatgggcagagaggctgtgcccattcttacctaacagggaagctgtccataaataaggtagcaattcctgaatcaaggacaagccttctgcccagtctttatatgtaaagaaacagtagtttcatttgaagggaaaccattataattgtctcagatgtgcatcttgttccagggtacttctttgtatttttgatgaggaaccaaaggctttattatagatcttgtgaatacctgtcagccaggatttagaacaaatgcatttgggcaattttgccttttatttcagataaattttatatgttgtttctgtccagaattgtaggatcatgtttggcttttcaaaactgcaggaaatgtttattttacttttctttaaagaagaagacagtaatgaaaaatgtatcgactgccagcccactgtttttatttctctttgtgtgagctatggcttctccacatcttgagccttaaactctttgatgttgtctttttaagcataacataaaagattattccctttagtctgtaggcttggaggtgggcaaacatgacatattcctgggtattcatatttctataacaataattgatgcaggttttggggctgttgtatttgccgtagccttatatgataaacatttggcattccatgacgtttcagctttgtcaactttccaatcctgtatggagttccctcttattgtttctgtgtgaacaacttgacaagagtggcatccgtggtcagattcttcactctatccctgcaggacttttcattgtgctctgcacacgatggaggctcaatgcatgaatgaatgcatggatgaatttttcagtttgattccgtgagctgcttaattctattagatgcgctccctaggcttttataagacgtttaattggtacatgtttcttatcactttttaatactccataagtgttttgtgttctttgcagtagagtccaaataaatataaattaaaatgtttccaattacagaggaaatattttcagtatcttcccacaaataacactgggtttataaggcttggttcccgggtttcatggtcatgcttggttgactaactttgtgttcatgtggcataagattctaaactgtcagaactacgtgggcttttagagcccatctaaatccttctcactcacagacgagcaagctgacatatttgcctcatttattggcagtgaatgaattaaaatattgtgccttcatcaagatattgtgtgtatattcacaatgttgtttttcataaatatgtagcattactctgttttgtgactgctcctagactggctggttctagggataaagaagagccagagaagaaatctgggcttcccagcagcaccttgggaggccgaggcaggcagatcacaaggtcaggagttcgagaccagcctggccaatatggtgaaacctgtctctactaaaaatacaaaaattagccaggtgtggtggctggcgcctgtggtcccagctactcgggaggctgaggcaggagaattgcttgaacctgggaggtggaagttgcagtgagctgagattgcgccactggactccatcctgggtgacagaatgagactccatctcaaacataataataataataataataataataataataataataatctgtgcttcctgcttaatttctagttttggtattcctactatcaggcccaacctctgtcctttgtgttcacagctaaatttgatttgcgtttggtcagaggatgggagaacagagaacaatagtcaccctcatcagcaactgagaaattcagtctgttctgccaaccttgcttgtatcttttcatataaatcttgaaattgcctctatttcaagtctgatggtcagtgactaattattaaagccattacttgctttttttaaagcctgaaccttgctttccagaatcttttccacctttgagattattttaaatatcatcattactttgagaaaagcaaacttaacaaggatgccttaagaaatataaaggtgtcattgcccaggaggcaagaaagggaggcagaatggtaatgaaatgagacagcccttgctttggttttataagatctgggtctgaatcctggcagtgtgttctttctaactttaggtaattcaggagccctagaaacctcatctctctatctagtgtgggaaaacgtgaaacaactttgggccatagattgctctatgcaaactcaacatatgcaaacttgtcttattaaaaagcctatctctagtggttcctatccctagtcttgtttggttgggtagcttccaattaataacagcttcaaattctggctaatatttgtttagcacttcatggcttacaaagtacttcattattttaacattgtagtattggtaataatatcaaactttctgttattacaataaatgttccttttttactttattattccattactttattactgtttttcagatgtactgtgatctacattttacggatgaaaaaaagattctaggaggataagggactttgtcacaaaagttagcttctaaatgatggggggactcatatgcaccttttgaaactcctaaacccatgttgattccccaaaggctttggtggtcctaaacatttgacataatcagagtctattataaaaaggtatggcttatccagctcctggttcctcactgtctcctctatctcaaaatattctagaaaaaactttactccctgaaaatatacagctttaggataggtgcagctccatttcatactctgattttcattcctcatttgaaaagttgaagcgtaatttcttataagactttagaagttgaagtcaggactggataaagaaaatgtggcacatacacgccatggaatactatgcagccataaaaagggatgagttcatgtccttttcagggacatggatgaagctagaagccatcatcctcagcaaactaacacaggaacagaaaaccaaacaccacatgttctcactcagaagtgagagttgaacaatgaaaacacatggacacagggaggggaacatcacatactgggtggggcctgtcgtgggggtcgggtgcaaggagaaggagaggattaggacaaatatctaatgcatgtggatcttaaaacctagatgacaggttgatgggtggagcaaaccaccatggcacatgtatacctatgtaacaaacctgtacattctgcacatgtatctcaaaagtaaaattttttaaaataagaagaagttgaagtcagggtataggaatcacaatttgcagtgctatctttcacacttcttaccacctgatgaaaatcaccaaatagtatttcttcttttacctaacatctctaggaaagagagaaccctgactgcacctacaagtagggaaaggcatttgagttacgcaaagctgcttttaactctgaaactgtcctacagtgtagcatataaacagggaaaacattttattggtgttttaatagaatcttatctaaatatctggaatcttactgcaagggccgatcattactctaggtagatttcaaggcccacagctccattatgatgtcaacaaggataactgatgtttattctgtagttagagcccccaaggcttcagcaaacattttgctcatcacttgtaggactagcagtaaatgtaatcattgcaagactgagctaacacatctgctaacagggttgttcatttgagtaaacagcaaggtgataaggcgcagggacggaccattggattgagtcagacaggcccgagtacaaaaaccagcctcactacttaaatcttacatagcccattaagagtaagttgcttcactttgggaggctgaggcggacagattacgaagtcaggagatcgagaccatcctggccaacatggttaaacctcatctctattaaaaaaaaaatacaaaaattaactgggcatggtggtgggcgcctgtaatctcagctactcaggaggctgagggaggagaatcccttgaaccagggagtcggaggttgcagtgagccgagatcactccactgcactccagcctggcgacagagtgagactccgtctcaaaaataaaataaaattaaattaaattaaatttaaaaaagagtaagttgctcaactttttaaactttagttttattatccacaaataataaattataaattgctgctttacatatatgatataaaaatgcatcaatccagttaatttggggtaaatggtattattccagtcttacctcctagaatactcagaagacacaacggtgtatcactagaaggagatagttttgttttggtttggtttggtttcttcagtcttctttttcctattccttccttttccaagaaacccacgatttctttctttctttttccagctattgatgaggtcagggagtaatatgttcagatctttgttgtatctttgttccgtttagaaaccagtatctgggaattcaacagagaatttggggtcactggaagctatgttttacctacatacaactacatcttcctcttagacctagagactagatactgaaaatgcaaaaggaagccatattgacactcccaaggataagggaaggcattacatcatcctttgtaatggtgaatcttgtgcatttgtagagggctggactttggcttctaccatattgtttagctctgtcaaccccacacaaggactttatttatttatttagacagagtcttgctctctttcccgggctggagtgcagtggtgcaatcatggatcactgcagccttaacatcctgggctcaagtgatccttccacctcagcctctcaagtaactagcaacacaggtatgtgccacctcatctgactaatttctttttaattttatatagatgggatctcattatgttgcccagcctggttttgaactcctggccacaagcattattattatcctcatcttacacatgaggaaactaccagtgaagtggcttgcccatcatgtgaaattacatatgccagtactagcctgttctgaaatccagcaacattcttttccacctctagccttgtttctagcaccctttggcctccagagcaagctggggttcattttacattaaaagtagagccatctgatgtggcgggcatccaaaacacttgggaaaatgctactctgtttagaactcgcttttcttcctcccgggtcccagtgcaggaggtactgtgtgctatgtgggccatcagactgtccctggccatggcaggagaattaggagaccaccagggctgtagttaactgtaggtccttcattaagaccagccaattgatagcgtgtgttcatgagtccttgtgaagtcttttcatcagccacgtggaagaccccttagaaaaacaatctctgtaatttgtatttttggacatagtgctttaggaaggtggatgtctgaaggtgggctgggtttgaaacatctctcaatgccatgggacagtgtggtacagtgtcctgacaacttaagctcatcctgacaacttaagacactaaattctactcctgcctcttctagtctagttggtcacctgccctttctgaatttgtttttttttttttttttgagatggagtcacgctctgtcaccaagctggagtgcagtggcacgatctcggctcactgcaacctctgcctcccaggttcaagcgattctcctgcctcagcttcccaagtagctgggattacaggtgtgcaacaccacgcccagctaatttttgtattttcagtagagatggggtttcaccatcttggccaggatggtctctatctcttgactttgtgatccgcccaccttgggccactgcgcccagccctgaatttgttttcttaactacccatttatttgcttgaaacagatgacttaaaatattccttcctcctctgaagttgttctttaaacttttctatgtaagaaattgattgagctgtattcctaggtattttattctctttgtagcaattgtgaatgagagtttactcatgacttggctctccttttgtctattattgatgtataggaatgcttgtgatttttgcatattgattttgtacgctgagactttgctgaagttacccaccagcttaaggagattttgggctgagacgatggggttttctaaatagacaatcgggtcatctgcaaacagagacaattagacttcctctctttctatttgaataccctttatttgtttctcttgcccgattgcactggccagaacttccaatactgtgttgaataggagtggtgagagagggctaatttacattcccaccaccagtgtacaagggttcccttttctccacatcctcatttgttttttccagaagacagcatttgctattacctgtcttttggataaaagccattttaactgaggcaaaatgatatctgattgtagttttaatttgcatatctctgatgagcaatgatgttaagcagcttttcatatgcctatttgccatttgtatgtcttttgagaaatatctatccatatttttcgcccaattttacatcagattcttagattattttcctatagagttgtttgaactccttatatattctggttattaatctcttgtcaaatggatagtttgtaaatatgtttccctttcactggtttttgtcttcattttgtttgtttcctttgctgtgcagattaacttgatgtgatcccaattatgcatgtttgctttggttgcctgtgtttgtggggtgttactcaagaaatctttgcccaatccaaagaacattcatctttgtcaaatgagctatagaattaatgtttttcctatttttatttattcattttatatttatttctattttatatattcatataacaatatatttattcataatatcactttgaatatcatttgttttcatcttgcatttttctcatttttcattgaggcctaatttacatgcaatgagatactcagatcatgagtcgtagttttaggagatttggcaattgtatatattacccaagaaagttcccttaagttcccttattcctctttctattcaagtcccatctgccaccctcagaggcaatgactttctgacctctatcaccagaaattatttctatatgttcttttaaatcagataagaatcacaccatatttattttttgtatctggattctttcattttgtgcagttgtctgagattcatccatgttgttgtattagcagtcttcatctttttgttgtttagtatgccacgattataccataattaatttacccatttttcttttttatcataatcttatataagggaaaaacatgggaatacatgaactgtatctttggctcaaatccatcttctatcagttctaagggcctcagggtatttgccatgaggggctgtgacaccagcctggactattaggaatggacctttgcttctcacagcagtcatttattcctccactttttctactagcgtcatgtgaagtgggaagggtactggcccgagagttaggagactcgagttcaagtggcagctctgcgctggcttggcagtgtaactggccactccatcaccaggacttaatttcttcatcagtaaaatgtttggtttggactgaacagtccctttttcatctctgacatcctacggtcccttaaaaatccctcctctgggctgggcgcggtggctcacgcctgtaatcccagcacttcgggaggccgaggcgggcggatcacgaggtcaggagatcgagaccatcccggctaaaacggtgaaaccccgtctctactaaaaatacaaaaaattagccgggcgcagtggggggcgcctgtagtcccagctactcgggaggctgaggcaggagaatggcgtgaacccgggaggcggagcttgcagggagccgagatcgcgccactgcactccagcctgggcgacagagcaagactccgtctcaaaaaaaaaaaatccttcctctgggtacctcatctttttcagttgcccctgcagtccctctctttagcatttctgtgaggaagtatccaaagcattggattacttgagataatatttctggtcctcttcctctctcacactctacactttgcttttctagaattgaagcctggagaagaaatattgtctaaagagcttgctacaagaaaatttccctaaaaagtattgggtcttaaaatttcatctcattttcaagttcttagaatactgttaatttgcaaagctgattatggatggcatactttattatgctttttaatcatacttcaaaactgcactatggatttgttctttctgtcttcctcccatgcttaatcattatttttggtggcaccttctaaactgttgacttattttctttctttctgatttgtagtagatgttgtataatctaagtttaggcagagatagtgaaagtgctggcctgcctgtatttcagccagtcctgggttaatattattcatgtggcaatgtctgttttactttaggactcaacgtatttaatacttcctctcctcctctttacaatacatagaggaaaggcctttgaaacataatttctctccctatgggaaatgctttctataaatttttcattttcaatacaaactgcttcactttacaaaacagtatctgtccctagcatgaaaaaatactggagggatatgaacagtaaaggagaatatttttctagcttgtgttaaatcaataatgtagtgattccaagggaattgagaggttcgtgtatttattcatatattagtcaaaaattcaaaattctatctctaattaaaaaggaatttgagaagtatctaccatttttattgtccatctctttggacatatgctttgcagcacagtggagcggaaggagcgtagacctacagaaatttagagggctaaatttttaatattggcctggctacattgcctggactttgggaaaatcacttaagctctcttagccttagtctttttatctgtaaactgagaataataatgccagtttttcaaggttgcattgaggatcttaggtaatacatataacattcatggaacataaaatgtgaaccaatgaaggtgccaatgcaattacaccttcattaggagttgtcatttctgcggcttctcattagaacatcaaaattagttccttcaatctttactgaggcgcagagctttaaactctaactttgaaacttccaaaatgaagtgtgaaaggtctgaggccttgtgagtttgaaaatgcagttcacacttcattttagaagctccagaattttttaccaaattgagattggattcaggaaatcatattttaaagccctggttcatgccattttctaaagaagtacctagaaggccataatcagaatgcttattaagtgaccacactttgaactgcattgcagataaattacctctgtgtggggagatgtgtcttgagattctgcggtcaaggctcagacagccccagagctggaaacctcagagcatttatgcctctgtcactaaaggatggggttatgggggctggacagaaagcttgagagagatgaaaagttcagtgggcttgagggaggattactgaattacaataatatccacaccgtaaagtgaatttgtacttgcaagagacacattatttatctagaattttagaaagggtctcttttcaggtcactgtgtagattgcctgtgatttgttctccttgattgaatgtgagtgagtgtgaagcatatctaaacaggtctcacagcaagtttctttcataaatctcctctggtatatatgctgtgtacccttgacaaggagaacactattaatggcgacagtatgcactggaactcagagcactgacgtgggaattgggagctctcaggtctgttgtttctgccagagaatgactctgtgaccttgggacaagtggattcacaaacaagctgaaggagatcatatctgtcctagaccgaaagcttatctgagaaagatgctacatgactacaaagaggttatttagtttcttagttcagataaggaaaacactaataattagtccaaacttcgaggctttgtctttgtcttctaagcttgctttcccctgtgatgtccagtctctcctaaaccagataaggattcacactattaatctcgacaaaatcaattctttgcatttgtgcttttattaggtcagtcattagtcaatgaacacttattgcacgcctgctgtttgtgcagacactgtgctagtcaggggatgcaaaagatgagtccgtgctggtcccatttcaaagaactcaaaatatggtggagacaagcacgtatacaaaaccagaacacagtataatgaataccacaggagtatacccgcaaaagttatatgggtgaagaaagaaggattaattagttctgccagagaaggactaattcagggaaggctttggagaacagggcacacatgatcggagactttactggttcagtcagctatataagtgataaggataacatgaagagaggtgccaagggcaagaaagtataagatatgtgtagaggctgggtgcagtggctcatgcctgtaatcccagcactttgggaggctgaggcgggcggatcacgtgaggtcaggggttcaagaccagcctggccaacataatgaaaccccgtctctactaaaaatacaaaaattaggcgggcatggtggcgggcacctttagtcccagctacttgggaggctgaggcaggagaattgcttgaacccaggaggtggaggttgcagtgagccaagattgcaccactgcactccagcctggttgacagagcaagattccatctcaaaaaaaaaaaaaaaaaaagagagagaaaagaaaagttacatgtagagaactgtaagtaatcttatctggctagaatatagggtaccataggggaatgactgagcatgggtcagagttgtaaacatccttatcatgccaatgagttggatttctccagaaggcatagagagatctgtttatagtttctaggtaagaaagagtttatgaacttgcctgtgtcttcgaaatatgctctggcagaatagaaaaggtgatcaaccagagtaggacagaggccacacacatctgccctgaggtcagatacctgtacatttattgtgtttgatagccaaatgattttaatgtaaactagttgcaaacatttaaaatttgggaaattttacataaaaatctagattttcgagcttctattaagaagtagagtgcacaatatctgcctagcaagaaacagctgttgctgagaagtgtcttccaccttcagctagagcatgcagtctgacatttgcttttctggttcttgtatttgagtgtgagactcttggagtaaagcaaacccagggtcagaaagatcactggtgatgatgttgcagttgtactgtcaggactgatgaaaacctaaactaaggtggaagccttgaggaatgaagaggagggcaaggatggatttgctgattgtttagatgtgtcatggatgaaagagatggagaaatcaaagaagactctcaggttgtaattttaggtaactgggtaggattcccatgtagtcagaaacccagaaagaagagaaggctttgggaagatgacagtgtattcaatgtggctttttgtggttcaagactttggaaaatattgattagactgttgaaaagtacttataggtcaggaacctggtcagaaagtattgtgctaaaataatattgttatgacccaagcagttgtaaaaataacttttattgtctaactctcacagtttatcttgaactcttaacaggttgtcaggcaaatatctgttcttgaaaccagaaaaacaaatcaagaaattgggatatttgaaatgcctagagtgggcttataactgtaaatgatattttacaatggaaaagtagaaacagtctttagcagccaatgtgaaataactgggtaatgttatttaatagaatgcaaatttgaaatgagtgataaccattatggagaattttgttaggaaaaaaattaataaagtgaatgtaacacatgaagcagagctggaactaggaagaaggaagtcaggctcctggggaaccaaattaaggagacttcccctctcaggcacttgtgggaccctgacggtaagcatctccttaggtactgctcccatcctcatccttgccttgagtttttgaaaaatatatgttagaaatgtttatgattatatatcacaaactgttattctcaattttatgaaattccctagatatgattacaatagtcatttgagatttatgatcttatctaattgttatgtatgtacccattgtggggtgatacaggcagaataagctctgaatttgagacttgtgaaaaccataagagcctcgagtcttgtcttatgagtctccgggtagagctgaactggctgcagctccaatgagaggcaattgcttgagaactgtttccaccagcatactgcatggaatgggtccctctctgatgcagatcccactgatactgatgtcgcactcttgctgatgcagatcccactgatattcatgtcgcactcttgctgattttgatgggccagtcaatagcagggcagcgtgtcaagatgctggagcaaggaagtcctttgtactatttttctcactgctgtcttttccttatggcatgccattctgtcttagaaaatgtgagacctgaagtagacatttggcatcatctagtccaacctctttgatacacagatgtaaaaactgaggcacagaggaggggaagaactttgctcaaatcaaaaagtgtattaaggatggatgcagtggctcacgcctataatcccagcactttgggaggccgaggcggatggatcacaaggtcaagagatcaagaccatcctggccaacatggtgaaaccccatctctactaaaagtacaaaaattagccgggcatggtggtgcacacctgtagtcccagctactcgggaggctgaggcaggagaatcgcttgagcctaggaggcggaggttgcagtgagctgagatctcaccactgcactccagtctgatgacagaacgagactctgtctcaaaaaaaaaaaaaagaaaataggttccgggtgttgcagcaagtaataatgattaaacattgtttaattaaataattaaacaatgcttgcttctctcccactgaaggaggtagaaggcacagcaccgtggtgagcgaggcccagctttctgctgtgttcctctgccatgcctagcatgtgaccactgtggagtgatgccagacggctgtgccattccagtgcactgaggacggagggacccttttcctctgaggacacatcatttcaccttaacccctttggccagaacaaagttgcatagctgcaaggacgactgggaaatatatttattctgggcagccatgtacttagctacaatttggaggttctaaagaaagaaaggaagagaatggaaacaattttcaaggcctaccacagcaaattggtgccatttctaggactagtatcctatttcctaactcctagtagaatgttttttctataccacagatttttaattctcataaagatgtgatttttaattaagaagcctataagaacattttgaatatgcacaaattcatcattttatatgtccatacgggatgcagtgattcccctttgcttaagatcaatttttgtttttattaatcccttgatatatagataggagtcaggcagacccaagtttaatttctgtctaccaacttgtgactttgggtccatatgaataaaaaaatctatgctttgattttgttttttcctctctaaaatagtaacaacatgtcatcttggggttgttttaaaaattaaatgggatgatattaatgaaagagcctagcccagtgtttagtattgaataggtagatatctaatggtacagataccagtttccttctttctcctcacttccttaggttccctccaacctgaagacaacgtatgtttctcatagataattacaaggaatttaaatccttgacaaaatgattttctggctatccatagcggacatgtctagatacatactctgttcattttaaaagatgaggaggttctgacacaatcagagaactttttaaaagttatggatgcctgagccccagccccagagataatgattaaacaggcctagaggttgttagtttttgaatgaagtttttagtttttatctgcctgagtgagtctgatgtgctattgtgttttacacagatcaatatgatggtagaatgaaacagagaaaacggggaagctgagaggtcacttaggcaggtattgtgattatctaagtgagagatgatagaacaatatggcaaaagatggaattaaaatatttagtgggcaaaattaataggacttgatacctgatgagatataggaaaaataaacttaatacatctttcaacactagcaaaactgtagctcttgaaatttatctgacctgaactaattggttcggggtaaaggagaggagaaattgtgatatgtgaaatatattaatatttagaaaattcttccaacattattaatatatagaaaattcttaattatctggaataatgagccaaactcaacaagataaaatctaagagggtcaagtcaaatttcattcttacctttaaaagttagctatacaagtacatcatataaatgtcatttactttgatagctgtttatattttttaaaaaaagaaagaaaacaagactggtagagaagatagtctgaccgcaagatcaacaataataataataatgtaggaccacagaaaagtaaatgaaatcttggactgcattcatctaaagaggagcatgcagaacagggaagcagcagtgcctggagtgctgagttcagttctgggcgccacatgatgaagggaacctggataaactagaccttgggcagacaaaggtgcttgggagagtgaggtgacagaaatttctcataaggaatgatggaaggtatccctttattccaataaaaagaagactaaggaaaggcaatgttttcagtgctctttagggctgttaaattgaaaaggcaacagatttgtctggagaggacagaagtagggccaatggggaagaagatatttatgtcaaaataagaaagctctaacaattagacctaccagtggaatgaacgaaccaagagagtgagctgtccctggacatggtataagcagcctcaggggctggaaaaacactgactgactgggaatgttgtagagggaatttatagatcagattgattggggaaaatagccccaaaggttctcctctctctgacatcactctatgattctatgtgaagttctagctttttaactatttttttgtataattaaataatttgtctttattgattgagaactaatcattaaaaaagctactgtcttttcatgtctagagatgataagaataatactacatgcttttgaagaaaaggaattttatgcaaataatcccataccagtgtattacgcttttgcagggataatcaagagcttgcaaaatttgaaaccacattttcccctgtatggaggaggaaagtctattttgcatccgtactttatgccttgggcattattattgctcatatgctctaggatttttaataaacctaacctgcttcatgaaattacactgcattaattcaacatggccatgtccaaaatttaatattcattcatttattcaagtatttattcaacaaacaatccctactatatttcatgtgctattgtcagtgctagaaacatcaatttaaaaatgtttaaatcctagtcttcgaagagtttataattaaatataaaaatattgtctatgtgtcaattactgtagctccaaatacctatttactccaaaaattagtgtctgaaaggaacaatcatttattatctcttacagtttggtgggtcagaaatttgatagcatcttgggccaggcgtggtggctcatgcctttaatcccggcacactgggaggctgaggcaggcagatcacttgaggccggggagttccagaccagcctggctgacatggcgaaaacctgtctctactaaaaatacaaaaattagccaggcatgatggcacgtgcttgtagtcccagctacttgggaggctgaggcatgagaatcacttgagcccaagaggcagaggttgcagtgagctgagatcatgccactgcactccagtctgggggacagagtgagactctgtctcaaaaaagacaaaaagaaagaaagaaatttgattgtgtctcaagtgggcaagtttggcttggggtctttcatgaggtttctggtgtgaggtctctcaaaggctgcttctccttacacctgggccaggagtgtttgaacagctagtctggaacaacttggggtcttcaggtatctccctctatctgcatgtggtctctccagctttgggataacctaacttcttacatggtaactgctatagtttgaatgtgtcctttaagttaatgtgttggaaacttaattcccaatgcaacagtgttgagaagtggggtataataagagatgattaggttatgagggctctccccttatgaatggattgatgccattattttggaagtaggttagttattgagagagtaggatgttataaagtgagtttgactccctcttgctctcttgctgtcatcctctcttgaccttctgccttctgccctggaatgacacagtatgaaggccctcaccagatgctggcaccatgatcttggacttcccaccctccattatcataaaccaagtaaatttatgttgttcaaaagtgacacagtcagtggtattgtattatagcaacacaaagcaaactaagatagcaactgaggacttcaaaggtatgtatttcaagagaaaactatatcacattttaagattagcattaggagggctgggtgtggtggctcactcctgtaaccccagcactttgggaggccaaggcaggtggatcacctgaggtcagcagttcgataccagcctggccaaacatggtgaaaccccatctctactaaaaatacagaaaaaaaaaattggtgagcacagtgtcgggcacctgtaatcccggctactcaggaggctgaggcaggagaatcgcttgaacccgggaagtggaggttgcagtgagccgagattgtgccagtgcactacagactgggcaaaaagagggagactctgtctcaaaaaaaaaaaaggttagcattagaagtcaggcagcatcactgctatgacattctcttggccaggcagttgcataggttctcccaagacctcacctcttagtggtggactgttagtatcacattgtgagatgggatgtgttttggtgtagtcatctttgaaaattacaacttgccatagcatatgaacagataacactatacttgggttctctgctatggtgctgtgaaagaacagaagaggagagtgattaacagaagaggtaacattcacatatcatgggccatataatttgatgtatgtaacttgttaaggaaatacgttcaaggcaggggcaacagcagatggaaaggcatgaaagaacaatgagcacaaagtgtttaaaagcttgggttgacaggaacaaagactgagttgtaggagaggtgacaggctaggggcctagacaggggaggtaggacagcatcctgaagggccttgaacatcaagttaaaacgtttggctttggggagcagtcactgtctttagagcacaggcatataaactgatcgtctttggtaatctcttccatctacaatctttctttcctttgatagtaaacatatcatctctgttaaagttgcttcctagcttaaactgaacacagactccaaaccattgaagcactttagatttttttctttttttttttccttttcttttactcaccacaaacaactctagaatggcatgcatttgaacaaaccaaaagtgatttcactcttctaattttcagtgctttttggctaaatgcagagtgagaaattcatacctttttcaagcagtgtgggttctttttcccaatttctgtcatccatctggttctctggaggtcttggaatccaggaaagtgttagttcactgtgctgaaatccaaaaaagactgctaaactgtgaaagaaaatttgcattccagagacactgaaagagttagtccaccacccttttgcaacagcaaggagaaaacatctgtatttcctgcctctttgtctttaagcagttatagaatggaaaaccctatactccctggctgtgcgtttcatacctagttaatctaaatcacttttggcagggtgggggaggaatcaaaacatggaattattttatttctagtgtcagaaaatattacagccaagatactgtttaagggaagcaaattacttcaccagcttccttttgagctcctcatgaggtttaattctcatgaatgggtcctagagccgacatttgacatacacatcagcagtgccctcttcggaagggaaccgcacagtcacagccatgatgttggcatgtctttatggccttcctaagtcatgtgctgtcttttgtcttccattggcagaaatacaattagaaggccttgttctcaacagaagccaaatgattgccaaatctgttcaactgatctctagagaattgaagttagctcatggccctctggctgttctctttgccactcccaggagttataggcttaaagttatccctttcttttgaaagaggatcaagtttggttcaaagaagcttttctatcatccccaggagtacaaagagagcccttccatgaccctagttgtttggctcagaccacttatagcttactgtaatttaggaagtaattgtaattcataaagccaggtagataataaacatcttggcagggttgagtttcaggcagctctgaagggaaccaacatgtgagtggaatggtattgggaacatttctagtctctgcttgcagatcttgattctaatggatgactcaaactggtttaattctgatctgaaatgtgcaggcaggcagtcattactctgtatacacatagctgaaaacatcatcacttaagcatgggttttagacattctcctggatgagttagttacccatggtagacaaatactgtaagtaaaaagagcattctcctaatttctatgttgtgtgattaacttcagatcatttatattcctggagaaatatgtagcactattttttctttaaaagatatattcttgctgaggtagaataaagaacagaaaagttgtaagaggccttagattttaggttatttaatgtcatttaattttgtattcaaccaatacttactgattgcctgttatgtcttaagcgctgccgcagaggctgcaaatgcagtagtgtcttgaacaaactagtgtaagatgaacaataagcatggcagaagcatagtagcaactaaattcatgaagtgatatcatagtgataagcactatgaagaaagcaacaggataaagagacagagtctggctctggagagggggctgctgaaatagtgtggtgatgcaggccatctgaggatagtaatgaaatttgggggatgtctatgggagtagatgctgttggatgaatctttggagtactcccaaatgattgttcattcatttacttactaaaatatttactgagctccttctctgtgccccaggcattgttctggaaactgagggtgatgctttgaacaagacaaagaaccatgccctattgaagcttttgttcagccctcaaatcactccatttcaagggaccaaaagccctattaacttaattcccttattttatagctgacggaatttaggcccagggaggaaatgctttgtacaaaactcactgctggtggctgacgttggcaagactggaatacagcccttgacttctgctttatttctccttgccactgagccatacagagtctctgtaaccatctatgtcagcaattctagtttagtgctggggttggttagcactgtgacccaaagataagtctttttctctatcaaggcctcatgtctactcttaataaaggtaacaaaattgagggttgttaagatggggcttcacaggcgtgggtaccaggggctttgttggaccttgattacggttaagtcaagaaaatggaccttgccaagtataactgccgcaaactagacagagaactgtatgagacttcttattggctcatagacttctctgtacacactctaaatgcatggtatgtaactactccatcacttgataggcattccaggtatgtaaactaaataagatacatggcaagaaaaattacctgctgaagacaaaacaacaaaaacaaaataatctgtatttttccaaactcaatattcaatattcaagggagtatgggtacttgtgtatatattttatacttgtctacttctctccagtaataagaatgatagaagttggctcagttgattagtcagaggctgttgaaccaagatgtagggtcgatccttctgtgtaacagtaattctctccagcgaaaagagctttataacaatatctttatatctatttacattcttaaacagtgcttctcccatttcttataatatttaattctcattgttaagagattgttaaggcagaatacttagtatcccattctatagatgagaaaattgacacccatgtagcttatggaattttgttcaaggtgctgtgaattccagctactctggaaattcactgcctcaatgaaactggtctaaatgttggttaatagcctctatttataggttgctgatagtaggaattatgaaagctggacctaaggcttcctaatgtgaggctttggataggattatctgctctgagctcttagccagaaggcccccatatttatcagtgtgcaacaatcttgttttgacagcgacaaaacccaagtagtgtcacatactcagcttaacaatttttcattggctatgtaagtaattatgttaattttatcatattcttattgttaagtgggacagaacaccagggagatgtgttggtattcaaaaagggacctagtgtggggttgggagaagagcactgcatagaaaccatgccatctgcgtcctggactttttcacaaaatagtatatcacattgggcaaatataccacaataggcaaatcagcttcacaaaatgcagtgtcctagtatgtgaggtgagacagttggacaagatgattcggggaatttttcaagctcaaccaaactatgtatttatgagaggctatgggaaatctgcatgctaaagattattaactgcattctgaataattgcctttatacagaataacggagaaagatatctgagaaacttgttaattggaggacagtgtgaagtagaagaatgagcctttctctttgtactttagaaaacacaggttcaaatcctggctgcatttatagctgtgtgtcatgtaatgcggaaaagaattctaccattctacctcctataccagattgctctggagattagacgggctcctgtttgtgtacatttagtaaactttaaggattgtaccaaatcaaagtatcagttattatttttggtgtataaaggaatataaattacttttatgaagaattaagaaatgtatggatttggggtataataaggtttacacagaagaagagctttttcacaaaattcccaggaaagcagggggaaactcacttagaaatctagaagcccattttatattatgacattatccaattatcccagagtatcatatacacaattccttagataatccatttgttgaaaggacagatataaaatataggagaattaatggtgaagggaaaaaatagaaatacggtgcttcagtgtggtagttacattaaatgatcaaaggatgacaagttaattgaataaatgtcttagccccttgaaatttgtatagggaatttataaaactaacatttattatatagtcaggactgggttctcgctttgataatatgtgaactcatttaaacctcacaacactgcaatgtagacatttcagtctacaaaaaccaaaggccagaaaggtcaagaaaattgcctagcttttcgaacccagatcacctttttcctactgtttcactaattctcttactataatatggcagaccttctttgatgtctgagttaataaatcttcacatgacttatgttgtaaaggcaaaatctatcatttgacttgtctcggaaggaaaggaactcaattcttttctttctctctcaccatagtcttagtcttctctgatatgttcattatgcccatggcatgagggtctgacccacagtcctcagctcttaggccccttccccctgccccacatttttcaaggatcagaacacattcaaaagaagtgttttggaagacctagcatgtcacatgggttatgcattttaaagtaaaatattacctctccgggcattaaggtataaataaactaaatgttctataattgagattttcttttccgatttagtaaagctcagatcacaatcctaaccctagtgcttaagaataaaaaacagggcgtaatttactttgtgaagaatgtgatttttagctcatggcaaaattgaatagaacggcctaattgctgtgatctttttgttctttctgttggctttttccttatggttttagggcatatttctcaattttaaagccagtttatgtagtccaaatacaaacagaaaattttataagaaaattgtttttctaaattttattttgatagtaacacataggttttgtctgtgctagttaaaacatggatgttcggccgggcgtggtggctcatgcttgtaatcccagcactttgggaggccgaggtgggcggatcacctgagctcacgagttcaagaccagcctggccaacatggtgaaaccctgtctctgctaaaaataaaaaattagctgggtgtggtggtgtgtgtcggtagtcccagctactcaagaggctgaggcaggagaatcgcttgaacctcggaggcagaggttgcagtgagccgagatcgcgccactgcactccagcctaggtgacagagtgagactctgtctttaaaaaaaaaaaaaaaaaaaaaaaaaggatgttcatgtctggcaatattgagttccccttcatcagtgctgctcaatacacagatttcgttacaatattcttcctgtgaaatgaatttgtttcagtgcaggcttatctgcgactcctataagagtattagatattaaagactcttgttatagcacaacattaattccaaagtgggttaaaataagttttttttcaagtgccaaatccaatcccaactagaatagattcttaagagtcatagaccaccaccatactgcctgctctctcaccattcataagtaattactctcttctctgcgttcccatcattcattactcgtgcctcaatgatagcaatttgtcatgccctttgcctcgaatcagttgttaatagttgtgtccacctgtctcactgcattgagaacctttgagggcaaggatggcatctttatcttccatctcttcctctgtacctgccaggctgttgaacactttgttccattctttaggctttctgcaatattagagtaagtgaggaggcagctctgctctttagagaggcatataagaagtttgtttaaagagagtttataagaaaactgaggcaatagatgcaaaaagttatgctccaaaagattaacaaaaaaagttgaaattatttcactgaattttcagttctgtgtttcatagctgtcatcttcaggggtaggggggtgtgtcatgacatcaaaaaagtacagtttagagatttgatgctatctattaaattgtttcaaaacgtttcctatctatcaggaaaactttcatctgtaaaagaggaattttgattctaattgaaaaatcacagtcataggggtgggatgctgttaagcttgagattattattttcagtctgtttcaaaacacacattacatgcagatacaaatatagacttagattaagatatagacaaaggacattagaaagaccaagagaaatgttaataaaaagttcatgtctcacaggaaggcagagctgttggaaggttatctagtatagggtcattagaactaccaaggtaaaatgatatcttcacttgcaaagcaaacccaaaagtactgccatcatttgggaagcaatcttgatgaccagaatcaaggtagagaataagtttttattccataattaagttaggcaatagcagtattctgagttcagataatggcactggcatttcaagagaaattggctgagtcatagccctgctcctttactgtaccacattaccattctgttgggaacacctacacttgagctgtacttcccaacctttttcacatcccagttcatgtggaaaatgatggcattcattcagcacacggagtaagtggatgagatctctcctgtcctgttcctgaggcaaccgctcaggaactctggacacctctggtccttccgaatcctcccaaatatggtgcatccggaacccacttgaaacacactgtgtgttaacctgccagttgagaagttctagactggagaattgttttgcatggttaaatagaaaaaaaaaaaacttattttatataaagtacttacctggactttattaattcattaactaactgatatttgtggagcattaattttatgcaagcatactgttgtagatgcttgggatccaacgacgagttttctcttgtcctataggagtttaggagacaaactgtcttaagatcttaacatgttttctctatttatttgcatgtaacttgcagatagcaagcctgaatgtcttctttctatttgaaatacagtgtgtgtctaccgatatacagattccatataatgtgatgtagcagagagagtctccattggacagagaattaggagacctttattgtaactcccaatctgtcactagctgtgttctctatctataccttagtttcttgaatccagcagttggactagaatcatggttttcagatagtacaggttccatcccttcatgcccttcagccagaagtgattttgggctctttaatatgtgctttttttgataaattgtttccctgaagaaaggattatgggtgaatggccaagtaaaagaaggtgaaaattcctgggctagtgtaatctctaaagacttttcaagactgaatgtcttctaactctctctttttttctttttgttcttatctcaacaagacctaaactatctagatcatgagatgtcactccttatctttccaagagtctttcctgtttcacgatattgtttttgtacctaaaaaaggtaaagatgaatataagatcacattttaattttataaaatgaaaatgttgttaacatttccaaatggcagtaatcactttatagtcttctgaatcttcaattacttatgtaaatgaagactgtatatcttgattttaaatactcaaaattgaacacttacatatacctatgtaatatgtaaataatggtaatattcttattctttatcatctcattagtagttcacgtttatgttatctatatgcttcatttatattcatatgattcttcagctcttctgcctgtgagttacaagttatttatacaatatccaaagatagaaaaaaatactaccccattgtatctctgacttaaaaacgttgcatttgggggttttctgtacaaagttgatttgtgatttaattgttagtttcactgagtttttttgtttttagtcacaattgtattgccaacatttcagaaaaatttataagctgtgacttttagcaacagaatctgcttttttctgctactcttacgtcctttcattttaaccatactttcattggagtagcctaaaacatttttttatggaaaaaagtcctcaaacagtgcctgttgcaaaatgaataaaatttggattcttcattcagctttggccaaaggccttccacagctcgttaccaattacttactgtgtgtcatgaactttgtagtccctgggcaaggatgcttactattgtggataccgtagatagagtgtacaataggaataggaagtataagaagtataaggacttcctatactttcccacaggtgttgattgcaaggacacttcttgataactaactgtgtgcaaatctgcttcagaatttgtttcctaggaaacacaacctcagactatggcttcatgggaggagagaggagtgattgcagtttagtcatagaggttgacataaaccactaaatcaagtacattgtgttcagtgtcataggggaagcataatacaatcctatgggagtggaagaagttacttacttttcttggaatacaacagaaaaagatttaggaaagatttttcagaagaggtgacatttgagtttcactttgaagaatgagtaggcattctctaagcaaagtagaatacaagatagtctgggctggtaaaagaatgttgcttattaaagatgtggcagaaagctcagtgtggcagctgggaggaggagtccatgggaccacgatggagctggatcagcagtccagtcacaaagcacgctactgatattgaaggttcataagctggaaggtgctcttttcttttaaatccccagctatcaatgctggcaaccctactagacaaaaaaataaataaataaataaataaaagaaaaaagaaaagaaagaaagaaaaagaaagagagagagagagaaagaaagaaagaaaaagaaaaaagtgatttgaataggcatatttagagacatccctctttcacttatttgcttaaagactttcttttttttcaaaaccgatttatttgtcaaccatttcatgtcatgggttcagatgaatccaatatttgtatgaagcatgcatctttttgtctggctttaaaataatcatctataacacaaaaatatccctctatgatccttacaattttaccattagcaatttctagaattatcagtggaggtgcatagtaaaggtaatatagtccaggtttctagcaaatgaatgcccctttcaaacctctgataaggggttatccagttgtttttgtatatttctgataatgtaaacatgtatctttttctattgttgttaatactgatttatcacagattaatacaattacagagtttgaattaatcatttttcaaatgagaaaactgagatcgaaggaataaattatttacccaatgtcatacagcagattttgacaaagccagaaggataattcatattcttcacctagcaactttcctttttcatggccacataatgaattccttagctccctctctgcattattaggagtcaggtaactggggtaccagtcccacctctgcatctcatgctctccacaactcaggtccagcacatccattctcaaagtctgcctgctcacctgtggaatgagagtctggactaagggaactcccagccccctcctcctgacactgtgagtttttcctttctcgaaggctactggtaggccccactggagactgaaaggggaagattgcagtaaaaggcgcaggctgtcgaaggataacatgtccttctacatcattcactagcctaggatgccagtcaacttcattcttggaacctttattttccaatttgcgggcattttgcaataggctgattttaatcacattttatactttttttcctttgttgcagaaatgtttgtattacctgttctttgaatgcagcatctgtagaccacaaggtctttccataggaactaagcctgttatattgctgctagttttgagtaaatgagctgaatcttgcagccaagcctcagtgcaaacaaaaacattttctggccaaacattttctggttattcaactccattacagggctgactaaaaaaaaaaaaaaaaaagtaaaaacccacagaggagcaaaacacaagtcctgggaagacaatttccagccacattagctcacattgtcagggtagaaaagaaacaggccctcattcttcaaaccatcatcatctccaaactcttaccctgtgctcttctgctattttaatttcaccacttcaaaatgggaaaaacaaataggttaatagtttccatgcgtttagactgtgaccagaggcatacgaagcaatttcagaacctcaggcaaccacagctttgagggaaggatgatgatggatttaccaattcatcttgggatggattccagagttaagggagtcaggccagcactgtgctgccagagtgggatataaacaatattcattcgttcattctttttgtacacattcatctcaggcttatttctatttcagacagtatactgggtgcattataggacagagaaatacattcttaagacatagtctctgcccctaatgaaattaaagtctggtagaggaaatagacataagcacaaataatttaaataaagtgcacactgaaagtattgtaagcaaaccaaataaagtgctcaggaatgggagagaaagaagcaattcattccaagtgggaccattgaggaaggcttcactggggaatggccttctagcctgtaccctgaaaggtcaaaatggcaaattgcgatacatctaggcattagccaaggcacagaagtatgggagtttcacataggtttgaacaagagtgagtggtctgagatgttatgagaaccataaaggggggttggataccatgtaaagaataagctctttttacattgtgaagccattaagattttattatccagaaaggtacttgtatttgatcacatctgtgtttggaaagaaaactggaagtcattggagacaggggcaaggggagtattataagaagagagatacaaagaagccaaatcataggtcattgctataggttagacataaggacactagttacctacgtacagacacttcttgcttcatagccatttatatatcctcatggtaaaagagcagctacccctgaatttccacatcccattcagttctgcatctttctaataagatccacatcccgggtttattcctgattgtaaactcaatgagttaatccagatacctcagttgtaatatagcattttacatgtgaaacgtggttgtttgctaagagcatggaattaaagggcaggatggaaagttaacagccgatctttctgagacctgactcactaactggtgtctcttttaaggggtgctatatatttttaaagcttagaatatttttaaggccagataaatgtgtttcttaattcactttttcaaaccagctcccttgtacattcaacatttctgtcaagagtttgcaaactctaaacttggagatggtgtgtaaatcaaagctttaaatgatcagaagcctaattgattatgctgagttctgatttgggttctgcatttagcatgctctgtctcagtcatctgacaggctattctgtaaaaagtaggggtcttagtgatcgcactatggtctaagtggtcacactatgtctttgataatgaatcaagttttagaagtaatagtgaagcattcctcaatcggtgaaccagagtggtatagttcaagggtcaacaaactatgcccatgggtcaaatccagcccattgtctgttttttttttgtaaataaagtattactggaacacaagcatgcccatatgcttgcatgctatgactgctttccagctataatagcaaagttgacttgttacaacaaagccagaaatatttactatatgggactttagagaaaagtttgccatcacccatgctgtaggaaacaagggaaggaacaaggatagcagtcagaaaacacatgtcctcagttctggacttgccacctactacctgagtaatactagaaaagccacttgacccatctaattgtgtttccttctctctataacacacttctttggccagtttgttagttaattggccgataacacttgttttctatttgtaaggactgtattaaagctgtagatgtggtttgtaaatggtgataaatgccttccttagagtggtgtgataaggacctgagacaatctgttttgtaaagatgcctgtcatgcagtatggacccccttctgtcccagtctgacgtggtttctgtttccttccccagaatactctggagcagtgcaatgtgtgttccaagcccatcatggagcggattctccgagccaccgggaaggcctatcatcctcactgtttcacctgcgtgatgtgccaccgcagcctggatgggatcccattcactgtggatgctggcgggctcattcactgcattgaggacttccacaagtaggcaacctactctctcgtcaccaccctgccagtccttttggagtctgttcttactgcttggcatctgggcatacattcttctctctcagaactacagaatttcaggatttagtgaggcttttaaaagagcttattgatcccctcctccaatgcaagaattaatatcagacaatccatgcagtcatccagcctggtctctgtgtcaaggcttccccagagcttgtccattgcatctctgggtaattctaatgacgaaaaagctggctcagctatagtgtgtatgtgttagaaagaaacaggatcctggcctaaatatgaacaaaatttgtgacatttggcattgttcaacttatttgagctcttcagtttggtctttagatcaaaccctctctaaagctctctcagctgtgatgacccagagttttctcaagagctaatctgtgcatccctgccactctactgatagggagttatggtggacagacacagagaaccattcagtttcttttactaatgcaagcctctcacatattcaaaggcagtttcatgccattgtcaacatattgatgccattccctagccttttcttccacccaagtcttctctttctcaagttattttttaatagaattaatgaatgcaaattgtgtgttcttttgaggaggattaaaaaatggtgcctcaagatcaaggccagttattcatgggcccaaaataatctgtccccactacttcatttatctcctttttaggtccttctttcctgtattacagctggggtctttatgaaaattaagaaatttaaacagttttgtattgtgcttatttttatttgaccagtttgttacttaattattcaataacattcattttatatatatgtttatatatatacataataatatgtaaatatatttttatatattttatatataaatatatttatttatatacatgtatattattattgttattattttttagacaaagtctcactctgctgcccaggctggagtgcagtagtgcaatctcagctcactgcaacctctgcctcctgactcaagcaattctcctacttcagcctcccaaggagctgagactacaggcatgcaccaccatgcccagctaatgtttgtatttttagtagagatggggtttcgccatgttggccaggctggtctcaaactcctgtcctcaagtgacccacctgcctcagcctcccaaagagctggtattacaggcatgaaccactgtgcccagccaacgtttggtttatatttttaagaactgtactaaacctatagatatgatctgtaaatggtggactcaggtttctgtatgtgtttgctgggcagtggctttgaagacagcctttgaggctatcaaagagatgaagcttgtattgctcaccaggttgggtatccattctatggcttccaagtgtgaagtcttctgggttaattctcaccactgtgttgattgtcaacagccaggaagcacttaccccaaggagtttggagatctgagactcatattttaagaatgaatgtcctaaccactttccaagtagcaaagaaagtgaaaacctcaccaaaagacgtgaggttgaatgaattaaaaaatcccagaggcggaaatttgcaacctgaattagacaaggaaggactcacttttaaagggcagtcacagcataaattgtgcttcacattattgatatttttagcttgtaattacacattgaaaaatccctgcgtcttaagggaagtgaaaagatctcaatggggagtatgttctgttactgtttctctcctttcttagacttatcctaatccaagaaagactgatacttataatcggagcacacatgtttctgtggctagaaaagactgatacattacacccctcaattaaaacaggaaatcaattttgacaaatgccaatttatatctatgccatttatctttcatgtctaggggtagggagcataattagagactggtgactgatgacatcagtttgtgggtctgaaagctcccaaaaagcagacttgagcaactaaaagggggaaaaaaattaaaacccccagataaccttccccactcgttcaatgcatgttaaaacataaattaaaaatgataataatgttgtcttcatgattggcaggtatgtagggagagaagttttttgatcctttctccatttcctaaaggaaaataagaaactgttttatggaactcttatttataagccttaaaattactagaatacaaagcagctaaaagtccagcataggctaatcactgaaagaccaaagagagggcagacaaagggatattcctcctccagacagtttttggggccttgtttgtggtccttttgaatgggtctccttttgtggacctttagaaaatgcatgttaattcagttcaactcacatttataaagaaccctctgtgtgccaattgttgcattaaatgctgaaggagagagatacaaggagagaaattgtgcagatatatatagagaagtcactgtcagcaaggagcttgccaggaggagggcagagaaagtgtgcagacagggagaaagggctgaactccatgagacaggcacaggtaagggcttgcactgtcaaagtcagatcacctggctctgtggtcagaataggctttgtggacggagaatgtcaagagtgttttaagtgggaaacaaggagattcctggcagagggaacaactcaggcaaaaagcagaggcacagagttagtaaagggttctctgtgttcagggagatttgctttgctgtaactagagcagcctgggagtagagattaccttgagatacaggagacccataagaagggatttacctcacctgcttagcctgccttttatttatttatttgtttattttatttatttattttgagatggagtctcactcttgtcacccaggctggaatgcagtggcacaatctcagctcactgcaacctctgcctcccatgttcaagcaattctcctgcctcagcctcccaagtagcttggattacgggcacccaccaccatgcctggctaatttttatatttttagtacagacaaggtttcaccatgttggccaggctggtcttgaactcttgacctcaggtgatccacccgcctaggcctcccaaagtgctgggattacaggcgtgagccactgcacccagccttagtctgcgttttaaaccagtgcttcccaaactttaatgtgcctgtaatccacagagggatcttgttaaactttggattttaattcaggtctggagtggggcctaagattctggatttctgtcaagctcccaggtgcccatggcctgcactttgtgtaacaaggttctggaatactgtttttgagaacttgttaatggaccatcctctacataaacacctttggtcaatgttgactcatatcctccagcctactggacatgcaatctttcacatatgtcatttcagatgaccgctgcaaccactgcagtcttctggaagactatctcccctaccctaacacacacgtacacattttctcatttcacctaaatggttatctttaaaggcccaactcaattaccgtttcctggaagaaaacttctctgatctccacccctcccttttctcaagtttagatttacatcttaatctctgtgttttatagagttttataagtctgctgtagatagcacttaccacagtctgactggtatagaaatatacatatgtgtgtgtgtgtatatacatatgtgtgtttgtgtatatatatatataactttacaataatcatcttgtatcatttttgcaataaggatttgtatatataaattaatagaaatactgcagaaatatatagaactccttctcaggtctgtactggaagtcgttgcttattcttgtattcccagtgagaaaacccagaaaagcagatttctttaactgactctttgcatgtatggaggctttattcccctatctgtgctttcttatcaggaatattaccctcattcatttatgtatttaatcagcatccattagttgattgccagaaatgtgccggaatacaagatgaccaagatcatccctctctgagccttcgctctgttggctgtaaagtagaaatgataaaaatacttcctcataatgttgctgtcagtagaaaattacgtcaagtgtgtacagcacttaacagggcttggcacataataagcactcaataaatggtagctttaatcatcgaaagttgttttcatcaaatttacttttacgattattgtccactcagtgagctaagccttgaaatagaccacctgggattgtgagccctcctcgaattgctatcggaggaacactgtggggactatgagaaccacctcctgcctcttcgctttggtttttctcattatggaaatgaggccaattggtaggaaagaatcattactcagcaagaatacagtttatgtcttcccaaagaggaagaaccttgagattgaacataaagcccaactaatatctttttttatacagaaatatggcagattcatttcattagatacagcccaactttttttttctgcaccagtcacagtggttgttcctggagactcagagatggagcaaagtcctatcttgtggaaacttagagtttagtgccccataaatatatccaaataattactaccaaaatggataaattcaatgacagaattcttatcttagaggagtaaataattctatttggggaaattggagaaggcttatggatacactgaaaaggaaaacatacttctgctcccacagagtttggggaaaggaaattttgcagttgatcccagaagcctacttatttcaccactgatgacccagatttaaaaataatctggtagtccaaagcaattttttgccactgaatataaacttcttgcataaaataccaattataacaactctgattactgctgcagtggtaccatgatccttctaacttttctttcacagcaatcaattgatctgctgcttaattcatatttatttagattgcagccatacagatgctttttgggtgctgccaggaaaattaattacctacatatagaatataatgtatgtagaaatgctttgacaaccgtaacgtgctctgcaaagagttagattattatcattatttctttttaagtctcactacaaatagataaatttttaacatcgtttatcttaaaaccagtaccatgaaaaaactgagtcacagtctgtttttctttttttaaatctcttcagttcttatccaggtccatttcaaataatatgtcatttcataccttcacaaataccatctccaatttccagaagatacagagagatacatggcttatattttcagccaattaacctgtcatagaaaaaaaattgttaggtaccattgatcatattgagaaatactaagaaattaataagtattaaaagtatttaccagcagcctcaaaaacatatgcatatgcatatttatatgtatatgtatgtgtatgtgtgttagtatacactcaccctttaacagtgctaaaatcctttaaagaataaagaatttgatagctctttaacttttaatttttaagcaaaagtttaacacaataaaaaatgtaggaaatgcagacttggccatttttaagttttgtgtaatgtatatttaaacgcactaacctctgcccttttgaaaagctatgtatttgagtcttcttatgtcagttcctagaagtcaaggcaaatttccaagaaagaagctctaaaaggtgggaacaaggcaaagataccaacctcagactatttttctaggacctaaggagtgcatacaaaagtctagaaacaaaagtcagaaacaaataggggctggacaggactttgttctctcctccagttagcctatcccaagcacagggtttgcattcagaatctatctaaagatgaatttcataccgcgcaccatgcaggaaagagatgctagatgctcttcatgcccaagcaattcacacgctcactctctcacctcgccaaatatcacaatatttaccaccgattgatggaagaacctccacagtccctgagtctaactccctcaccttacggatgaggaagcaggtataccgactctcagtttccaccttttccttttacctctgcgtcccacctcagtgtcgacgcgcagtatctaaccagaactctctcttcactttcaggaaatttgccccgcgatgttctgtgtgcaaggagcctattatgccagccccgggccaggaggagactgtccgtattgtggctttggatcgagatttccatgttcactgctaccgatgcgaggtctggttgacagccctgccctgccagtctgtggcaggcgttgaaaggctcgttcgagctaggtttacatagatgtagcaattactaaatctcagaacggccttagtgcctgtactcataggacttgggttttagatttgacactagtattccgagcacatgctgttgaataagtcactgtacctctctcagtctgcttgctcaccggaagaaaggactcaagtccttaactcctccaaatatggctgtgagagtgaaatacaaaattgtatattaaaggacattgtaaattgtgaaatactaaattagtgagaaatggtgttattgaacatttaactttggctctgaggctttggttagaacttcttgttcagagtcatggagatttatttatttgttagcatgcactactaattgctcagtttcctgaacgcctctagagctgcagtatatctgcatgttcttttcagtaaagccaaacttcccgcagagtataaccattgctgctattgtgttctggataccccgttaacttaaatttcattctatgtcaaatgaagacatgaactccattgacctccttgccaccatggtagatagcagaggcgaggttcatagctgttgtggcctttgagagtttatactaaagttagcaaacacacacctcttgatgaagtactatgtatttattttccaaagaaacttctattttctccaaagacaaaggccagcatttaactgttatataacacttttcaaaatggaccctaagaggagctgtcagcggtagtatattcctttacagttatgcagttctttgcatttttttttttgatccattatcttctttgatcctcttaacagcttggtaaggtagaaaaggcagaagttattttcagagtggcagtcggcctgtgtgcattgaggcagactgtagcaaaactgtgggtggtgctcaggaggcctgtcccctggactagcaatctttgctctccacaatgctgtctcctttagaaagtacagcaaaccactactccccacaaactttaggattttattttcttactgcagttgaagtaaatacaccgaacccactggtggcccttctgcttggcagacatcagtctacctttgctctaggccagaaatggccaaaacattccattcctgtacctgtgcatgcattttgagagatccttaaactaatggtaaagggtaaaaaatgcatcggtggttagggacattcttattttctcttgttgagtgggggcagcaaacttctacatgggagccaagatgggtggcctcttctcttcttatacctgtatttcatatcaagtgagcttaggaggattatatttatgtccatttatatttatgtccccaatctctaattcaattacattcaagatatactatgttatatattgggagaaaggatacaggggattagcagaatgtaaagcaggaaggatagtaagtggccacattatggaggccttgaatagaaagctcaatcatgatgttctccacatgtgtacttaacgtttttacttatgtcgtttccatctgtctttactgttctaggattgcggtggtctcctgtctgaaggagataaccaaggctgctaccccttggatgggcacatcctctgcaagacctgcaactctgcccgcatcagggtgttgaccgccaaggcgagcactgacctttagattcagtcacctgttcagccggcactgagaagaacgaacacaagaaaaagataagaaatactagagtaaaggccatcaaactacgcgatagtctctgttcttcatctgctattaaccttgccttagaaacacataaattatgagattttttttaaaagttgttaccaaatacacatttcacattgaatcatgtaggatcttgatgggcctttgttcccaaggacttccacatttttgcacagattatgctccatcccattcacttctgcattcctgtaacttttaatccctatgtttgtctcacttttcatctggttgaatggcttttcttagtgtggtatttgctgtcacatagtttttcctgggtgagtctgccaactcacaggtgcttttaggcttgaaatctccatcctatcatttccgttttgcctgtgactgtaaagagtagccattcttttcccatgtattgaagaggatattcttctcttgctttatactactcacgtccttggggagggaaatgcacaatttttttttgttaggctgtaaagaatttaagctgtaaattacataagttagaacaagcccaaatttaatttgcaaccatcagaattcagaatctatagtgaccagtgatcaaggctaattggaaaagagttatcggcccatagctaataagtagtgacagacaaccaagcttcaatatttttctaaagaaattacaggtgggatatgctagaaaaggcattttggggttatgtttaaaaaaacattattgtcccacaatattaccttaagatttttcttttccgcactacctgaacattgtaatacagacaaacttgatttcttctagaagataacattttcaatactgtcccacttctcatcttaaaaatattgtcatgtttattctaatatccaacacaactatcaaaattgcctttttctctagaggatgaaggctgtgaaaaaaccgttcaaattctcttctttttcttttttattaccaggtccattttgcctgacaattgcaaatcagagcatacaaaataaaactgtgcagttttgtttggtttactttcaaaagagtagaaagcttgaaaagattctgaaaccacagtttcattattctcataatccttctgcaactgaaattacatattgcaggagacattttcatatcatcaatgtgacatttacaccacactttcaaagacaatcactgaaacaaaaattgtctttatgagctaaaaatatgcagaatctctgcctagaatctttattcaaacttttattagccagtgaaacacttgcttgccaactgccaagccatacttattaagttcgaacatgtttcacttaaggagagacacctagcttagtcatggcaagttgccattttgtaaactaaggattttggactgagatttcttaaatctttcttcaaatctcccacaagtatatacttttaaattatggagtattttaagtctacaaaaaggtataaataataatataatgaattcctatatacctaatacccagtttaagacaccaaatataacaagtataattacatcctccaatgtaccgtttccttattccacagatatctttttcattattgtgaagtgatgttcagatttctagttttttttctagtttttaattttaacatcagaactgaaataaaaaattatggatacgtgttttgaattgcaaactattcctcaggaattccaattaaatttattttacttgaataggaatgatcataaaagtgattctttttttgtgactagaaattcttaagccgatggtcactatagctcatccttaatgtatggctcatttgcttttgtcactaaacggttttgtgttagaaccaccaaaattatagcttttaagagcttcctttgaccactgtctttttcttaccctacttctcttatctttgatcgtatatttctcataatgtgaaatatgatgagattcacttaggggcagcatgttagttttgggaggcaatgtcaactgtgtctctgaattcctgtcttccaaattgaagccagaccatgctgatgacctcaagtagcactgactatttgacaatagggctgataatgtaatcggcttgaattttgacttagtaactttttatgtaatactttcggagaaattctctttaggacaaagcagagagtccaatttattgagggatagattgtatctcttaaagtggtcatattattattaattttgccaaaagaagaagaatttattgaatatttatactataaaatgcagtaacattctacttgcttattacatttaaatccttgtgtaactgaatgtttacatgtcaagaggaaaagctgtaagaaaatgctgtcacagacccatccctgtggcatcgtcagcagaatactgcttgcttacaatctttattatgcattcttataacataacctcagagtatctttaccaaaggtttttaaagtaaatctctttttaagatagacttattcttttataataatgaatgtgcactcatacatatgtagaaacatttagatttagagttttttttttctttcacaaggtataataaggaaaggatcctacaatattttattctagggtttcttaaatatatgatttatattactgtcttttctattaatcatttgatttaaacaatgccaagtcactcttttttagttgcatgaaattttgcctgcaacagagagaaaaagattgtattactttaatgattataatcatactgtctgctgatataatatcataattgttgtggtttaaatacataaatagtagaaaaatcagagtctataacagaaagtttgtaaaaatatactgattttgaaaagtatcaggaatataaatatttggtaattctgtgtaacaagagagacatggaaaaggaaaaaaatccactatatcatgggctctgcagaacatatcaaaataggatttcttaaatttttcaacccccagaccatactgactcaacatggagtctcactggccaagaaaattgcctttaaaactcgaaaataaggccaggtgtggtgactcacacttgtaatcccagcaatttgggaggctgagacaggaggattgcctgaggccaggagtttgacaccagcctgggcaacatagtgagaccttgtctctacaaaaaataaaataaaataaaaaccaaattagccagacatggtggcatgcgcttgtttaaaaaaacaaataaataaataatcgactcaaaaataagtcatgtgtcccagcataaggcatcaggttgttagatgctggcatctctgcagctcaaagatgtgggttctttttcttgtcattaacacattgttatttctgtaggagcaacttctctgatcaaaattacttttctgggtatgtgctgattaagggggtggacttatcaacactataattgttccctatgaaagattccacagagatgtttatggtgaggtttaaaggatatgaaactctacatttaaacaagtattttatatttgggtacagaggaagaaagagagggctttttccatggggctatagtagagagttagtggaatatagacaggactctgaaaacacaacttccagccatttttttagttagtaaaaatcctattaatgtgaaccagccaggaataacagtgttatttctattggatatggtttgggcttctcttgtcaaatctgtgtcggctgccccctgatccttccattatcaagttttgaagggtgttggggaaattatggcagctgctagggagatcagggaaacactgatgtaacctcaaagcctctcaccattcctcttggcttggaaaggctttattttttcatatacatttctagaaatattgctattctaccttagtatttcacatttgtagttcaaacaagcgattgtccatctgttgcctagagctatagtacatgtgtgttatgaatgaaatatgacagcatgttccatacccctgctttagccatctgtgggaaaccagcaaactgaaaaagacacctctgcaaaatgtgcctcaagtccatttcttgggatcgctcgtttggtgcactctcgtgggagacaatcagagaacaacatatacttgtgccttattttcaaagaatctatttacactactatgaatattccactgaagagtcaatgatgtaaatgataaccaccaaatctcaaaaatatactcaccaaaaagtaaaaaagtaaaaaaaaaaaaaaaagaaagaaagaaaagaaagagagagaagtcaacttttcatcttaatatattctagtagtatttattttttccttgtcttggaagtatctcataggtctttaaatgagtaaaacatttttatgccagaaggtgatataatggatgttagtgttttttatttgattttacagtagttttagtcagataatgaggacagagacttcaacttgattctttaccaccattcagcatattttttaattgtcttcattgtatttgcttaatagtggtccagacaagttcaaaacttgttctcagtgaggcattaatatggtgcaaccatgaatatttcaggccaagttattcacttgacagataactagaatgaaacttttctcatgaggctgttgtttggttagcatagccttatttcaaaccttaaaaagttacctgactgaagctactatgacttggtaaggattcttcctctcttgctttcttcctcccttcctttcttcctcttccttcctcctcttcttattttctttcctactttccatcctacctattagtgttgctgtacttggattttttgtaaattaaatcaatgcattatgattttagggaattatgattatattcataaggggaaggctaccagaaaatatatgtggcatccataaaatcttcttttataggggcatattttttaggttgtatttattcgtaaagtgaaatgagataatagagtctttctgtttcatgttaatgaattttcatcagggactgaggtcatagattcttggaaaattcatttgtgactgatctagttttctcagctgtatgcaaagtaatctttcaaagactaggttaagattttttttttaagtctgaagcaatgtaaccccaaaaaattataattttaatgatggcattttattttattccattgcagcttgataactttccttatagcaaaggaataactattgtattttcagaattttaacacagattaacacttagcctgtaagactaataatatattgtaatagttgatactaaaatatttttcagcaggttggacagcaccagtttttcttagatcacagactacaggcagaatttcccttcaatccagaaaaaaggacactaatttccttttctatttaattttcctggcccttgtgcaaaaaattgtggactctatcttagttacaacatgcatgtcccttattttgtggagagctgtgtgaaagatgcgttttttttctttttttcttttttttttttttgagacggagtctggctctgtcacccaggctggagtgcaatggcacgatctcctctcactgcaagctccgcctcccaggttcacgccattctcctgtctcagcctcccgagtagctgggactacaggcgcctgccaccacgcccggctaatttttttgtatttttagtagagatggagtttcacagtgttagccaggatggcctcgatctcctgacctcgtgatccacccgcctcggcctcccaaagtgctgggattacaggcgtgagccaccgtgccccgcgtgtttttttctttagctgattgacaggtccccttcaaagttacaaaaaaaagtgctaatttttgctgttaaattctggttgttatttaattgacagaagtctcttgatgcacgaataaatatctctacatctagcctttgttaaaaataaaaattaatattctacaaacacctacatatactagagaggggtgaaacactgcagctaattcctttataatactttcagatgattgcattaagcctttcatgttatgtggcattgttaatttttcctagatacccatccacttaagggccagagaaatccttattcatttaactctggtgggcatttatgtaacatacccaaataaaaacgttattaaacagccacaatcgcattcagtcaacttggcactgaatgtagcttctaaaatcagttctctaccctacgaatggaatgttctaccaagaaagagaagcatcaccatgtcatcttgtgttctacaccactatagagagttacagttgcccccaaacacgaatgctattcccaaataaaatagaatcatgctttgggaggccaaggcgggccgatcacgaggtcaggagatcgagaccatcctggctaacacggtgaaaccccgtctctactaaaaaaaaaaaaaaatacaaaaaattagcctggctcagtggcgggcgcctgtagtcccagctactcaggaggctgaggcaggagaatggcgtgaacccgggaagcggagctttcagtgagccgagatagcgccactgcagtccggcctgggcgaaagagcgagactccgtctcaaaaaaaaaaaaaaaaaaataggatcatggcccttttaaagatctgaatcttctctgttattttcctgatgaatcaccatcccatatcttcttagtcctggccagtatgtagttgcgctcacatacgtctattctagctctgtagctccacaaaacaagtcttaagtccaaatctttgcctcttcatgtctgatatcaccaactcattcagcttttcttcacttattgacatagtgtcatgtcctatcactctctgctgcttctttaaacagtggacacaaacatattttctaattttcagtgtactcagtgaaacttggcagttcaccatgagtcaggctaggttgaaaggctttctttagggttgaaagtaaacgaaattggaatcacccaaagagaatttccccaaaaaacctcagacccagaagtgtaaaagctacagaaggatagaactcccatgtctacagacagttctgttactttttgttctgtactattttggatgttgccaaaatcaaattcatcctgaaaacaggaagcaagctaatgcatatgccatccatgagattcccacttctgggtcagttcatattccattcaaccttttccttttatccttgtcttcttcagaataagacatttttcctccatattttcatattaaatattaacactttataggttctactttaatatatggacactttacaggttatacataaatatttgctggttgattgatttcgagattcattcattctgtgctcaaatatttgtacctagagacgttacatgttagaaaaagtgagcagcttctttctctaatcatttaggagtccatatttttcttttctttttgttctcccaacatccttatctcttactcagctcttcaatttataattaccaaataatcactgttagagaatcagcccctaagtaactttgattctggccaactgtaataagatccaaccacttaaatctgtacttactcaataggaaggaatgtgacatcaggaagagtcattccagtgacattagtaagactttatggagtacataaaatttgataagaaatcttgagctgattctttgacttgatttagaagttgagaaaagagtatttaaggcacaacagggaaacatgggctatactcagagaagaccctctgcattggccaaaatatcatggattctggaaattccttcttaacagaaaaaaaaggcttccaaataatcaggctgaatgggaagaaaaaggcatagaggaagcctgaggaagtatttacttgcttttcccatctctttataattggaagagaagatgatctgccaaaatataacccagcatgcacagtatggacaggaagcagccctccatgaactttattatcacagaatatgagcattcttattgatccacagctacatcttctattcttgcagcaagggtacatgtcctttgaccctccacaaaagaacaagcaggacatctctattttcctattgagtctgagtccattattagaaaggacttcccagccatcttttctacttggtattaaaattcccttacagattcattgctaagtgccaattctttttttttcttttgagacggagtcttgctctgtcgcccaggctggagtgcagtggcgcaatctcggctcactgcaagctccgcttctcgggttcacgccattctcctgcctcagcctcccgagtagctgggactacagacgcccgccaccgcgcccagctaattttttttgtacttttagtagagacggggtttcaccgtggtctcgatctcctgacctcgtgatccgcccgcctcggcctcccaaagtgccaattctgactctacttaaacatcacctgtatcagggagctcattattccttgaggtcttacatttctttcagcacattttgttccaagctacacgactttaaaacagagccagcctttggggcatatgttctctttggtgccacacaaaacctgtagtacatgatacagtgttgcttcccccctccttttccttccatatatatttgttttgttttgggcattgcattacttttttgaatttttaagaatctctaaaattagtctgaaggatgttctgagggccagacattagaatttgtgagtttttttgttgctggttgtactttcctatttagaagacagaccgttctgacagttgttgtgtagcttcatgccttccccagtaactaacccatgaacagtacaccccttttatctgacttgttgataatgaccttaaaaatgttaggaaatgggccgggcgcggtggctcgtgcctgtaatccagcactttgggaggccgaggcgagcggatcatgaggtcaagagatcgagaccatcctggtcaacatggtgaaaccccgactctactaaaaaaaatacaaaaattagccgggcgtgttggcgggcgcctgtagtcccaactacttgggaggctgaggcaggagaatcacctgaacccaggaggcagaggttgcagtgagcagagattgcgccactgcactccagcctgggcgacagaacgagactccgtctcaaaaaaaaaaaaaaaaaaaaaaggttgggaaatattggtgtataatccccatgtctaacaaggaagaagtcaaaagcaaaagatagtggtattgccgaaaactcattatttctagttagttcatctgtggaaaaggatatcgttcttgaggagaggggttctattatgctatagttttctatggaaatgtacaaatgctttcctcattgctctggatgactatttagtttaaataatatacctttgtcatggggaagaccatgattgtggcttcttctaccccaactttgaatgagagagcactgtaagcagaaactgccatcagtctcctgggcaggacctggaggtaactttctgagctgtaaaatagtaattcctaagagagcttacaaactgcttccacacagaaaatagcgcagggaggacagttattagtacccctattctagaagagaaagctgaggctcaagccattaagtgacttgccaaaagctgtgacatagctgggaagtggcagatttggggatataaccaggtcttgcaagtccagtgctgtctccaagtagccacgctcacagctgagaacaccttagaggacaatatcgacttcttacagactaccaagcccccagtcatccagggaaattcagagaccaattgactgccaggtggcaaatccacatgtgtactgcggtctttagagatcatttagagcttgcacacatctgtgtcttcttgtgggaaacctctaggtattctgtctgatcagcactgtgaggaagttggtgggaaaaggccactgataagaacaaacaatgggcagaaggaagcacattgcaataaatttccccagagagagttcctttacattccattcaccaaaaacctctctggaactgtcaggttcagaatatcaaccaagaccatatcatttagaattcattggcatgtagaggtgactcgattcctaaaagaagcctctctcccatgaaccacgatgtacgttccacagaggcagaaaccgccgtaggttagcaatgcattttagtctttctctccattcacatttactgagagcacaccacgtgcatgttgctgcaacaggcatttccgatagagccgatccatgagctaacaatgtctgaaaacaaatgttatggaactgttggcatttctgagatttggcctttgccatttgatagactttgcttcccaggatgctgtcattttgtgattttttataattacaaggaatttggtaccatgttgttttcaaaaaacctcctagaaagtctccatgtatgctctagaagttgctctacataacagttcagcaagcaagtgttccttctcttgagctgcgtccctcaggaagctgtacctttagggtgtgctttccactttttatttcctctcatttcactcctttcgttgtttgctatatcctaaaatatgtgaagtgagagaaaaaatatcatttcttctcattaaatctcctgcattaaatctaagaatcctttaaaataatcacacctgataagtgttttatgcatttccctccctggagtgttatcatccatcaagccagtatcatcatccacctgcttattccttgggactaatgagagccaagttaaatagcaaatgacttctcaccccttcctagtcctcatgcctgaggaataagggcgacattaatgggagcgggagagtggtggctttggttgagatgcacgttcacagactagaaaagtgcctcacctccatggtgtatatgtgccaccttttcttaatccagtctatcattgttggacatttgggttggttccaagtctttgctattgtgaatagtgccgcaataaacataagtgtgcatgtgtctttatagcagcatgatttataatcctttgggtatatacccagtaatgggatggctgggtcaaatggtatttctagttctagatccctgaggaatctccacactgacttccacaatggttgaactagttcacagtcccaccaacagtgtaaaagtgttcttatttctccacatcctctccagcacctgttgtttcctgactttttaatgattgccattctaactggtgtgagatggtatctcatagtggttttgatttgcatttctctgatggccagtgatggtgagcattttttcatgtgtttcttggctgcataaatgtcttcttttgagaagtgtctgttcaatactatgcagccataaaaaatgatgagttcatgtcctttgtagggacatggatgaaattggaaatcatcattctcagtaaactatctcaaggacaaaaaaccaaacaccacatgttctcactcacaggtgggaattgaacaatgagaacacatggacacaggaaggggaacatcacactctggggactgttgtggggtggagggaggagggagggatagcattaggagatatacctaatgctaaatgacgagttaatgggtgcagcacaccagcatggcacatgtatacatatgtaactaacctgcacattgtgcacatgtaccctaaaacttaaagtataataataatgaaataaaattaaaaaaaaaaaagaaaagtgcctcacctccctgtgaggcttgatgaatattgtggccagtgagtggaaaatgattcttgtcgaatagacagagtattcccaccccaggaatggattaatagaagacacaatttgagcacttctcagaattatctagtatgcctgagtagagactcacatgggtggaatctgtgttgtctcatcagagggaataaaaagacaatgaggtggtaaatgtgaaaaaagcagccttttagaaaaacattattttcaaatacctttataaatcatctaatttatcttcacataatataaagaaaaaactaataaaaattttcgtatttcactttacataatatgttctcccatatttagggatcatacaattgtattgtcttcaaaacacacacacacacacatacacacacacacacacacacacacacaccccttccaagaaagctgatccttcagaaaataaatcttatttttaagcacttgggttttcaggccagaaaattaataaatcctaaacctgacccatttttgtaacagctaaaaaggagaagaaaaagctagttaaattttgtgtggatccatttatctcttaaaatatgccaaagcaatttgaggtgggggtggaaacaggtatttatctctcatgcgtgattctctctttatatttctatctgttgggaaaagggtaaagaactattcttggtcattattgatgtattgtgttgccactttgtatggtgcctgctgtgctttatcccgaggcatagcagtaatcgttactatcttgactctttccttcatcacaagagagtaaatatgaagtctgaatgtcgttcctcacccccaaattgtttaactctgcttccaaactagtttaagaaatgcaaaatgggaagagctagcttttcttagatacatttcttccttttttattctttcttgggagacgttaagtataaaagggaaaaagtcagttccttcttctctctctttctctttgggtgacagcaatgctcacttagtaattataaactggaaataggagagtagcttgagcaggttatgatatatctgcccaatgtgtttcattccttcaaacataaactttgagagtaaaagagatttttataatttaaatgccaacgacaggaatggcctcatgttttaactttcaaataataaatggggagttggtatttgggcagagtttgcattttactaatcctatatactttgagcttagtttttagaattgtgtcaaatacatcaacatatcaggattatagtgccaaaaatagttaaagtgccttggtcctccctctgtaggcagcaaattgaaactaacatgggaccatgccatccttctagcataatggagaagtctgaactgaggagtatctttgatgaaagacatttaggaccctagaaactaaatcttgtcaccaagactttatagtaaagtagtagcaaaattatttttaaaagactttcttccttttactacccatttcctctcttgggaaagctgatgagcaaattatccaagactcatttctttattaggcaaagtcagaatatttcccctctgaaaatctgaattatgccctcattctttttcaagaaatatctcaaagagcaaatagaattaaacatgacacttgattgtctgattatttggcatgtataaaattatcatgtggcttaatgtgccttaagtgaaaatttaaacttagacctgaaacctttacagttggatgtagcgttgagcttttgcatgttttctgtataataaaccacttttgttttgtttgttttgtcttttaacctacacctttatcattactctaacagatttagggcttctctttctctacagctaagtaagggaatatgtgcaattatgagacatacaaaaaaggaaagggaaaggactttctaagtagcaaatctgtgccatgaagtagatgtggcgtgaagatacagagcctgaggatagtaattttccctgagccacgcacacaggcttttatttcatgccttttctctttctgtgccgtcacctttgagaaaaacgattgcaccttctccaagtctgcctttttaacagctacagttaagttggcaagacttccccagctctgaatatagccatttgccgactccggcctctttgcgagactgactcaaatctgtgatcttctgttcagcatacacatcagcaaagtgagaagatgagcactaaatataggctctattaactttacttttagatttactgccttcaaaaagtgcctattctgagcaacataaacgttattccttacatatgtatgtacacacggtacccagagtcgtactgtgcagccttcaaaaacataccatcagaaagagtaggtgctgagataaggaaactttgccaaatgaaagaaagtca

SEQ ID NO: 27 - DNA, 6379 bp, Homo sapiens
gtcacttttatttgggggtgtggacagctgctttcccaggggagtacttcttacagtgggatttcaagacaagatcggcctgaagaaaaattatatttgtatattttttaaaaagtaggtgggaactttgaggctcagagacagagcagaagacagaacctggtcttctgattccctgtgttctgcttttttcattgttccactggacgctcatcagagggaagatctttttcctcaattgattccaacaatgtctcacccatcttggctgccacccaaaagcactggtgagcccctcggccatgtgcctgcacggatggagaccacccattcctttgggaaccccagcatttcagtgtctacacaacagccacccaaaaagtttgccccggtagttgctccaaaacctaagtacaacccatacaaacaacctggaggtgagggtgattttcttccacccccacctccacctctagatgattccagtgcccttccatctatctctggaaactttcctcctccaccacctcttgatgaagaggctttcaaagtacaggggaatcccggaggcaagacacttgaggagaggcgctccagcctggacgctgagattgactccttgaccagcatcttggctgaccttgagtgcagctccccctataagcctcggcctccacagagctccactggttcaacagcctctcctccagtttcgaccccagtcacaggacacaagagaatggtcatcccgaaccaaccccctctaacagcaaccaagaagtctacattgaaaccacagcctgcaccccaggctggacccatccctgtggctccaatcggaacactcaaaccccagcctcagccagtcccagcctcctacaccacggcctccacttcttcaaggcctacctttaatgtgcaggtgaagtcagcccagcccagccctcattatatggctgccccttcatcaggacaaatttatggctcagggccccagggctataacactcagccagttcctgtctctgggcagtgtccacctccttcaacacggggaggcatggattatgcctacattccaccaccaggacttcagccggagcctgggtatgggtatgcccccaaccagggacgctattatgaaggctactatgcagcagggccaggctatgggggcagaaatgactctgatcctacctatggtcaacaaggtcacccaaatacctggaaacgggaaccagggtacactcctcctggagcagggaaccagaaccctcctgggatgtatccagtcactggtcccaagaagacctatatcacagatcctgtttcagccccctgtgcgccaccattgcagccaaagggtggccattcagggcaactggggccttcgtcagttgccccttcattccgcccagaggatgagcttgagcacctgaccaaaaagatgctgtatgacatggaaaatccacctgctgacgaatactttggccgctgtgctcgctgtggagaaaacgtagttggggaaggtacaggatgcactgccatggatcaggtcttccacgtggattgttttacctgcatcatctgcaacaacaagctccgagggcagccattctatgctgtggaaaagaaagcatactgcgagccctgctacattaatactctggagcagtgcaatgtgtgttccaagcccatcatggagcggattctccgagccaccgggaaggcctatcatcctcactgtttcacctgcgtgatgtgccaccgcagcctggatgggatcccattcactgtggatgctggcgggctcattcactgcattgaggacttccacaagaaatttgccccgcgatgttctgtgtgcaaggagcctattatgccagccccgggccaggaggagactgtccgtattgtggctttggatcgagatttccatgttcactgctaccgatgcgaggattgcggtggtctcctgtctgaaggagataaccaaggctgctaccccttggatgggcacatcctctgcaagacctgcaactctgcccgcatcagggtgttgaccgccaaggcgagcactgacctttagattcagtcacctgttcagccggcactgagaagaacgaacacaagaaaaagataagaaatactagagtaaaggccatcaaactacgcgatagtctctgttcttcatctgctattaaccttgccttagaaacacataaattatgagattttttttaaaagttgttaccaaatacacatttcacattgaatcatgtaggatcttgatgggcctttgttcccaaggacttccacatttttgcacagattatgctccatcccattcacttctgcattcctgtaacttttaatccctatgtttgtctcacttttcatctggttgaatggcttttcttagtgtggtatttgctgtcacatagtttttcctgggtgagtctgccaactcacaggtgcttttaggcttgaaatctccatcctatcatttccgttttgcctgtgactgtaaagagtagccattcttttcccatgtattgaagaggatattcttctcttgctttatactactcacgtccttggggagggaaatgcacaatttttttttgttaggctgtaaagaatttaagctgtaaattacataagttagaacaagcccaaatttaatttgcaaccatcagaattcagaatctatagtgaccagtgatcaaggctaattggaaaagagttatcggcccatagctaataagtagtgacagacaaccaagcttcaatatttttctaaagaaattacaggtgggatatgctagaaaaggcattttggggttatgtttaaaaaaacattattgtcccacaatattaccttaagatttttcttttccgcactacctgaacattgtaatacagacaaacttgatttcttctagaagataacattttcaatactgtcccacttctcatcttaaaaatattgtcatgtttattctaatatccaacacaactatcaaaattgcctttttctctagaggatgaaggctgtgaaaaaaccgttcaaattctcttctttttcttttttattaccaggtccattttgcctgacaattgcaaatcagagcatacaaaataaaactgtgcagttttgtttggtttactttcaaaagagtagaaagcttgaaaagattctgaaaccacagtttcattattctcataatccttctgcaactgaaattacatattgcaggagacattttcatatcatcaatgtgacatttacaccacactttcaaagacaatcactgaaacaaaaattgtctttatgagctaaaaatatgcagaatctctgcctagaatctttattcaaacttttattagccagtgaaacacttgcttgccaactgccaagccatacttattaagttcgaacatgtttcacttaaggagagacacctagcttagtcatggcaagttgccattttgtaaactaaggattttggactgagatttcttaaatctttcttcaaatctcccacaagtatatacttttaaattatggagtattttaagtctacaaaaaggtataaataataatataatgaattcctatatacctaatacccagtttaagacaccaaatataacaagtataattacatcctccaatgtaccgtttccttattccacagatatctttttcattattgtgaagtgatgttcagatttctagttttttttctagtttttaattttaacatcagaactgaaataaaaaattatggatacgtgttttgaattgcaaactattcctcaggaattccaattaaatttattttacttgaataggaatgatcataaaagtgattctttttttgtgactagaaattcttaagccgatggtcactatagctcatccttaatgtatggctcatttgcttttgtcactaaacggttttgtgttagaaccaccaaaattatagcttttaagagcttcctttgaccactgtctttttcttaccctacttctcttatctttgatcgtatatttctcataatgtgaaatatgatgagattcacttaggggcagcatgttagttttgggaggcaatgtcaactgtgtctctgaattcctgtcttccaaattgaagccagaccatgctgatgacctcaagtagcactgactatttgacaatagggctgataatgtaatcggcttgaattttgacttagtaactttttatgtaatactttcggagaaattctctttaggacaaagcagagagtccaatttattgagggatagattgtatctcttaaagtggtcatattattattaattttgccaaaagaagaagaatttattgaatatttatactataaaatgcagtaacattctacttgcttattacatttaaatccttgtgtaactgaatgtttacatgtcaagaggaaaagctgtaagaaaatgctgtcacagacccatccctgtggcatcgtcagcagaatactgcttgcttacaatctttattatgcattcttataacataacctcagagtatctttaccaaaggtttttaaagtaaatctctttttaagatagacttattcttttataataatgaatgtgcactcatacatatgtagaaacatttagatttagagttttttttttctttcacaaggtataataaggaaaggatcctacaatattttattctagggtttcttaaatatatgatttatattactgtcttttctattaatcatttgatttaaacaatgccaagtcactcttttttagttgcatgaaattttgcctgcaacagagagaaaaagattgtattactttaatgattataatcatactgtctgctgatataatatcataattgttgtggtttaaatacataaatagtagaaaaatcagagtctataacagaaagtttgtaaaaatatactgattttgaaaagtatcaggaatataaatatttggtaattctgtgtaacaagagagacatggaaaaggaaaaaaatccactatatcatgggctctgcagaacatatcaaaataggatttcttaaatttttcaacccccagaccatactgactcaacatggagtctcactggccaagaaaattgcctttaaaactcgaaaataaggccaggtgtggtgactcacacttgtaatcccagcaatttgggaggctgagacaggaggattgcctgaggccaggagtttgacaccagcctgggcaacatagtgagaccttgtctctacaaaaaataaaataaaataaaaaccaaattagccagacatggtggcatgcgcttgtttaaaaaaacaaataaataaataatcgactcaaaaataagtcatgtgtcccagcataaggcatcaggttgttagatgctggcatctctgcagctcaaagatgtgggttctttttcttgtcattaacacattgttatttctgtaggagcaacttctctgatcaaaattacttttctgggtatgtgctgattaagggggtggacttatcaacactataattgttccctatgaaagattccacagagatgtttatggtgaggtttaaaggatatgaaactctacatttaaacaagtattttatatttgggtacagaggaagaaagagagggctttttccatggggctatagtagagagttagtggaatatagacaggactctgaaaacacaacttccagccatttttttagttagtaaaaatcctattaatgtgaaccagccaggaataacagtgttatttctattggatatggtttgggcttctcttgtcaaatctgtgtcggctgccccctgatccttccattatcaagttttgaagggtgttggggaaattatggcagctgctagggagatcagggaaacactgatgtaacctcaaagcctctcaccattcctcttggcttggaaaggctttattttttcatatacatttctagaaatattgctattctaccttagtatttcacatttgtagttcaaacaagcgattgtccatctgttgcctagagctatagtacatgtgtgttatgaatgaaatatgacagcatgttccatacccctgctttagccatctgtgggaaaccagcaaactgaaaaagacacctctgcaaaatgtgcctcaagtccatttcttgggatcgctcgtttggtgcactctcgtgggagacaatcagagaacaacatatacttgtgccttattttcaaagaatctatttacactactatgaatattccactgaagagtcaatgatgtaaatgataaccaccaaatctcaaaaatatactcaccaaaaagtaaaaaagtaaaaaaaaaa

SEQ ID NO: 28 - protein, 606 aa, Homo sapiens
MSHPSWLPPKSTGEPLGHVPARMTHSFGNPSISVSTQQPPKKFAPVVAPKPKYNPYKQPGGEGDFLPPPPPPLDDSSALPSISGNFPPPPPLDEEAFKVQGNPGGKTLEERRSSLDAEIDSLTSILADLECSSPYKPRPPQSSTGSTDPVSTPVTGHKRMVIPNQPPLTATKKSTLKPQPAPQAGPIPVAPIGTLKPQPQPVPASYTTASTSSRPTFNVQVKSAQPSPHYMAAPSSGQIYGSGPQGYNTQPVPVSGQCPPPSTRGGMDYAYIPPPGLQPEPGYGYAPNQGRYYEGYYAAGPGYGGRNDSDPTYGQQGHPNTWKREPGYTPPGAGNQNPPGMYPVTGPKKTYITDPVSAPCAPPLQPKGGHSGQLGPSSVAPSFRPEDELEHLTKKMLYDMENPPADEYFGRCARCGENVVGEGTGCTAMDQVFHVDCFTCIICNNKLRGQPFYAVEKKAYCEPCYINTLEQCNVCSKPIMERILRATGKAYHPHCFTCVMCHRSLDGIPFTVDAGGLIHCIEDFHKKFAPRCSVCKEPIMPAPGQEETVRIVDRDFHVHCYRCEDCGGLLSEGDNQGCYPLDGHILCKTCNSARIRVLTAKASTDL

SEQ ID NO: 29 - DNA, 122779 bp, Mus musculus
  misc_feature (1)...(122779): n = A,T,C or G
atgggggtacagaagcctttaaaagggggtacaatgcaggaaccagtagtgttgttgcaccagagaaagtgggggattagcaagcacatattggcttggtgacagtgatatcgcagggacatgtaggatgggatcttgaagagggtcctataagacaaaagggtaggggtagattgaagaaaggaatgttttgtgactttcatgtgaataagtctccatgaggttcttggagcaagcttctaatgggaccagctgccagtagtggccaggaaagggaaagacagagaagcactaagagggactggggtgggtggttaaggggaggaggtcagctgtatattggatgtactgtagccaggagggagtggcttggacctcctgagcttggctttcctgttgaagaaggttaatgtgggtaaagatggacttggaggcagggacaagctggagagaaacatgtaggtcaactacagggtgtttagcatagttattagggtagagctcacccacaactcctgctcaccatcgtttttcccagggatcactgatgggaaggtgaaaacaagtcttcagatggtcgagcttggtgccaccatatctggtggattcaattctacatccccagtgtttgcaagctccatgtacagagggcccctggaggcaatcacctgtgttgcaaaaaggaaagcagaggaatgggccgggaatagtggagatgcaatcggggtgtagaggtaatttccatcctagttcagtatccttcaagtggggagtcctggattcctatgattttgttgtgttcgtcataggtctcttcagcaaaaagactccagttgtgggtattgggagcacatggcttgggcacctgccaccaggtcacggatgtcttttcagtagatcttgttctgtcatctcctccacctcctccttccttgatctgtcaagcacgaagcaggctatcttcttgtttggtgggatgatgaaatagacctaagctggtcccgtggaaaaatacaaacacaacatcttgtagttgtaaggagaggggtctggtcctctctgaatcctgtctaagggatagcaccatcggactaggatgggagtggatattcctagtgtgtgctaatggagggagacaggagactatttggcacttttgtagatattaagtatatttagagtagtcagagtcatcattaattgtatgttgggggtaggcatttgccttttgttttgtaagtaggccttttacggtataatgtgttctttctattatttcttggccctggggtttttgttgaatccttgtgtggtgggcagtttctcactgtgagcagaaggttttgaattgggagctggtaaaggcagggccattgtcagctgtcatatgtttgggaatggccatgagggcaaaggtgtagacaatatggtgaattaatctttttgagttttctattgtttgggctgtaggccatacaaaacatatgtgccaatggtcaccaagatatagttttgtctgccaaattaaggaatgtaggtgacaccaatttgccgtagggcattggacttgggacctcaggggtgagtgcccatagtttgtaaagctggggtagtgatgagggatgcacaagaggatcatgtttttattatcctctaaggcagagcaagagggatgtagaggaatcagtcaagaagcccctttatacgtgtgtgtgtgtgtgtgtgtgtgtgtgtgtgtagtgaaattgatctgcctgtgcaagggaggctgtgtatattcctgtccaggcagtctgattggtgagggcatttccctaagatattagactgagcaggggactgagggttctgctatgctgcatgtagagggagtggctctttcccataaaagggtggaaacccgtgtgagtagaagtgaaagcagattggtgtctaatttgacaaaggatcttgacagccaggggagcaaattaacagaatacacgctgcggaggtggggcggggtaggggggtgggggggggaagatgaaagggcctagtgacttctattagggctaaataggttgcatatggtcccttacatgggagggggtgaggatgatggggcagctctttgaattgggtaacaggggttcttcccccaggggattattatatatttgctgtggctcctctctttcttccgccataaatattgagggagccccaaatgatgggctttctctgtaaaaagccaaaagagggcagccactgcaccagacggagggcagaagttttcattagggtaatggttatcaattggtcttagcttaactnnnnnnnnnnnnnnnnnnnnttaatgtgggtaaagatggacttggaggcagggacaagctggagagaaacatgtaggtcaactacagggtgtttagcatagttattagggtagagctcccccacaactcctgctcgccatcgttttttcccagggatcactgatgggaaggtgaaaacgagttttcagatggtcgagcatggtgccaccatgtctggtggattcaattctacatgcccagtgtttacaacctgcatgtacagaggccccctggaggtaatcacctgtgttgcaaaaaggaaagcagaggaatgggccggggatagtggagatgcaatcggggtgtagaggtaatttccatcctagtttagtatccttcaagtggggagtcctggattcctatgattttgttgtgttcatcataggtctcttcagcaaaaagaatctagttgtgggtattgggagcacatggcttgggcacctgccaccaggtcatggatgtcttttctctcttcagcaaaaagaatccagttgtgggtattgggagcacatggcttgggcacctgccaccaggtcatggatgtcttttcagtagatcttgttctgtcatctcctccacctcctccttccttgatctgtcaagcgagaagcaggctatcttcttgtttggtgggatgatgaaataggcctaagctggtcccgtggaaaaatacaaacacaacatcttgtagttgtaaggagaggggtctggtcctctctgaatcctgtctaagaaatagcaccatcggactagggtgggagtggttattcctagtgtgtgctaatggagggagatagaagactatttggcacttttgtagatattaagtatatttagagtagtcagagtcatcattaattgtacgttggggttgggagtaggcatttgccttttgttttgtaagtaggccttttaaggtataatgtgttctttctattatcttttggccctggggtttttgtcgaatccttgtatggtgggcagttcctcactgtgagcagaaggtttggaattgggagctggtaaaggcagggccattgtcagctgtcatatgttggggaatggccatgagggcaaaggtgtagacaatatggtgaattagtctttttgagttttctattgtttgggctgtaggccatacaaaacatatgtgccaacggccaccaagatatagttttgtctgccaaattaaggaatgtaggtgacaccaatttgccgtagggcattggacttgagacctcaggggtgagtgcccatagtttgtaaagctggggtagtaatgagggatgcacaagtggatcatgtttttattatcctctgaggcagagcaagagggatgtcgaggaaacagtcaagaagcccctttatacgtgtgtgtgtgtgtgtgtgtgtgtgtgtgtgtgtgtgtgtgtgtgtgtgtatgtagtgaaattgatctgtttgtgcaagggaggctgtgtatattcctgtccaggcagtctgattggtgagggcatttccctaagatattaattagactgagcaggggactgagggttctgctatgctgcatgtagagggagtggctctttcccataaaagggtggaaacctgtgtgagtagaagtgaaagcagattggtgtctaatttgacaaaggatcttgacagccaggggagcaaattaacagcatacacgctgccgggggcgggggggggggtggtggtggggaggatgaaagggcctagtgacttctattagggctaaataggttgcatatggtcccttacatgggagggggtgaggatgatgggacagctctttaaattgggtaacaggggttcttcccccaggggattattatatatttgctgtggctcctctctttcttccgccataaatattgagggagccccaaatgatgggctttctctgtaaaaagccaaaagagggcagccactgcaccagacggagggcagaagttttcattagggtaatggttatcaattggtcttagcttaactcctattaagctaagagcaaagcaggcatgatttctaagtagccatcgaatattggagagatcgagaggctggcccagagtggttcttgggtggtggtgggattactggaaacataaagtgttcacagtctcaaaggtggcagaataaagagtagagataaagtttgcatgtcgcaaaacctgacttnnnnnnnnnnnnnnnnnnnntatttgctgtggctcctctctttcttccgccataaatattgagggagccccaaatgatgggctttctctgtaaaaagccaaaagagggcagccactgcaccagacggagggcagaagttttcattagggtaatggttatcaattggtcttagcttaactcctattaagctaagagcaaagcaggcatgatttctaagtagccatcgaatattggagagatcgagaggctggcccagagtggttcttgggtggtggtgggattactggaaacataaagtgttcacagtctcaaaggtggcagaataaagagtagagataaagtttgtatgtcgcaaaacctgacttagcaggaaatcccaacctaaggaagtgagttagatctgataagatctaagactgttcagcaaatacagtgtaaggggtgccacacggtgaagctcggggtgagaaaagcgcagcttaacctttctatttctcacacacttcagtgggccacccacccatgcattagccaaagacatgctgaagtcacatgacttgagggcatgtatgtgcaggcctattctctccacaagggccaggaatctgaaaggagcatgggtagtgtggacgatttacagaacttggcccagatggtatggtagagctaaatttttcatgtctatacacaagatttttctctttacacatacaccacacacacacacacacacacacacatacacacacacacacacacacacacacacacacacacacacaatgtactctgaaagtggagaaataaggcttgtaaaatgaaattactttcttatgtagtttcatttgcatatatatatatatgtatatgtcataggataatttttaaaatgtatgcctgccattttttatacatctggatggaagaaaggtaatgagaaaagggtctgaggactgtaacccatcttcagtgtgagagcaccatttggggcttgctcaaggtgaggtaaaaccatctatatccatgctgtccatcaatcagatgcgtgcagccttttctctgtgccgaccttgctttcagaggatactttgtaaccaatagtttatattgttatatgaactaggcgaagttgggtatttatttatgtgtgcaggtatgtagggatggagccagaaaacaactcttggttctttccctttatcatatcctgggcatcctggggatcgaactcaagtcaactggcttagagacaggtatctacatccactgagccatgcaaccagtccaggttatcctaattcatatttatattaactttcaattcagagaacattgtctccagcaaaactattttcatgggaatgtcagtagtgatagagcatgtgtagagtttctatccttttatgttgcaaagcaactcttagcaatctaagaggttatgagttggacagccaaagaatatcggaaggcaccagggtgtggtgtgtagggatagggaaaatatattgaacatggctgtgctagactggagtacgtttccagaagatttaaacactgaaatactggaccttcatacttcagaatctaattctataaagaagatcaaatgggtgattgtgacttttcttcagggaccatccaatatcaccaatattcttaggaaaagatacagataggcttatgtgtacagtgggacaaagacagtagccatttggaagctaagaagagaaacagcaagacaaacttacacctagtctgatctctgctcctagatttctatcccccagaacaataaagaaaccttaagaatctgtggtcgtttcttatgcgaaatctagtatcgtaacctagtaccaagggaggtgctattgatagctagagatatgaagagggccctgatttgtcatagagactgttatggctaggaccacagaacatccctaagcttaggatcctagcagctcatgtgatttaacaagcacgtgtacctgtgttagctggactcttctgatggctcctcatctatgagtattctatcggctaacagcaacactatgacgtcatagaatctcttcttttcgagttcccttgttgttttctttaggtggtgacaaaattattctagattatcactgcatgtaaagggggaaaataattccaatactcttaaggtagatttgagcctttgtcattttcaaaacttcgagtttacactaagaactaagctcttatccttttaaacgtcttaagatatctttggcaacctagtaggctcccagtgtgcagaaatagatcttaagcctttctaaacaaagtcaaatgtatagttaagacagaaaacagtttcttggtccacatgtgtgcacaaaatagataatagtgaatattagaaatattgttcttttctcaattgaaaaagtagatttggggtttgcccttagcttatttgatgctcacaaagtagagtaccaaagactggtgcattaattctatgccagatttcttggtttatagtcccagtgtgtaagtagtctaggatgcagggctcagcctacatctaccaaggacctttgtgatgcaccacacatggcagaaggtgtgtgtatgtgtgtgagacgcgcgtgcacaagatgtgacaagagaggaaggattttgtttgttcataatactcttttgatattcactcattattaattaattcacgatggtagaatttttataccttattcacctttcctgaggcctcaattcccaatcctgtcaccgtggaccttaagtcagtatgccctgagaaatcctcagattatatcatgagtaaacacttgatttgtatttcatataatttttcaccgaatatcaatcatgtaatgtagtagggtacgagttcatatgcaatattctgtgactctacagttccagctaccaggtctttcaaagcctctaaatacacgacaaaggtctaaatacatgagcagcaaagctgacagatacgcaaattctcaaaaacgggcttttgtactaatttatgttaattcacaaatttctgctctccaattattccaattacaatctttttaaaaaagaaacacatataagttaacctacaaataagttatctcaaaatcatatacttggacaattgacagtgtgccaaaaatcattgaatgagtaagaaatcttcagaaatgagctggaaattaaatctctaggtgggctattaaacttttatctactaggtaggtactaaagattttaaaactaagactaaataatgaaactctggggaattattgtactaccaaattcctgaagttaaagttgaatatctggcaatagatttaaaaaaaaaccattgtaatagttttttcacattaatttttaactttttaaaagcagtggtcctgaagatcaaatgtgtagctatgtgcttccatgcttactactagtgagcagtatctcaaatctcaggtaatttttgtacttttgaatggaagaaaatgaccttgtaaaactctctcccctgtggagaatcacaaagctactctgtgaatgagaagttacagcgctgaggtctctaactgtggaaacgtagctctgaggtccattctcagacacgtgctctccgggtctgtgttctcataaacagcatgtgctctggaattcttgcagtatccataaaattcctcacctccaatcatttcacaacctttgtagtcaaggatttaggaccatgaatgaagtcaaaatttaaaatttgtcaaacgaacatgacaaatacaaggaaggaatcacaaaagagggttgaagacatcccaaaggaagattagatgtggttataaagtacaaagagttattacaagactttttccgagttattatgatgatataagacctggtatttcttggattctttaccaagcctgcttttcttgccgtggattaaattacagtctaacttgtatgtgcactgtattattgtatttgtaaccctgtgctcattaatctaccctcccctgggtctcggtcttactctgtccctagtttagctggtgcaattgaagatattttacttccaggtttcttacttactgttaggcttttcctccaattccgtttacagtagactattccacatacggtagttaatcgtttgtttaatttggcaacagggatattagaattatgcatcatctaggcagtgattctttcataatgttgtttgccttatgtctattcatttagattctcttcagtaaataaaccttaaatccccagtctagcagtgactgtcacacattccagtgcatgaaataaacacagaatgtcagtcctgatgtatgtaacgaatagttgagaaaagtacagtccagaaggacttctaacagcgttctgcttatttgacttttttcttccagcaggttcatggcttgtgaaattcctagaaaggcttgggtgacataggaaatagctggagttctgggcccgcccaggttttgggacattacaggtatggaaggacgttgattgttttggagaccgttagacaggaaggtgatctggtataccgtcctatggctctagcctcgactgggggtcggggggtcgcaatgtcagagtttagcaagagccttaaatggtgcacagtaacctgcaggatgggcggttctggccgtccagcccgcgcgctgagaggagcttagacggagggcggggcccaccagggggcggggcagcaacacagcccctccttccgctcccgcgggtcacaagtagggttaggacgggtnnnnnnnnnnnnnnnnnnnnnnnnnnnnnnnnnnnnnnnnnnnnnnnnnnnnnnnnnnnnnnnnnnnnnnnnnnnnnnnnnnnnnnnnnnnnnnnnnnnnnnnnnnnnnnnnnnnnnnnnnnnnnnnnnnnnnnnnnnnnnnnnnnnnnnnnnnnnnnnnnnnnnnnnnnnnnnnnnnnnnnnnnnnnnnnnnnnnnnnnnnnnnnnnnnnnnnnnnnnnnnnnnnnnnnnnnnnnnnnnnnnnnnnnnnnnnnnnnnnnnnnnnnnnnnnnnnnnnnnnnnnnnnnnnnnnnnnnnnnnnnnnnnnnnnnnnnnnnnnnnnnnnnnnnnnnnnnnnnnnnnnnnnnnnnnnnnnnnnnnnnnnnnnnnnnnnnnnnnnnnnnnnnnnnnnnnnnnnnnnnnnnnnnnnnnnnnnnnnnnnnnnnnnnnnnnnnnnnnnnnnnnnnnnnnnnnnnnnnnnnnnnnnnnnnnnnnnnnnnnnnnnnnnnnnnnnnnnnnnnnnnnnnnnnnnnnnnnnnnnnnnnnnnnnnnnnnnnnnnnnnnnnnnnnnnnnnnnnnnnnnnnnnnnnnnnnnnnnnnnnnnnnnnnnnnnnnnnnnnnnnnnnnnnnnnnnnnnnnnnnnnnnnnnnnnnnnnnnnnnnnnnnnnnnnnnnnnnnnnnnnnnnnnnnnnnncgggccgtccgcgtcgctgccccgggcccggtagagcgcgacaggcggggccgccgcgggggccatgaccgtggagcagaatgtgctgcagcagagcgcggcgcagaaggtgaggcgcgggctggtcgccgctcctcgacgggccgcgtggcctcccggccggccgggccactccgggagcgtcgcgctcggtcccgcggggctgcgtgcggagcggggtgtgcagtagtgagaggcttcgcgtccactcccttctgcggattgctctcccagaaccgacggcgccgcgtccccagagtgacccccgcattcctccagtactcactctgccaggctttgtaattaaactttcttctccttcgcttccttttccagtcccttttcttctgcaagaatgtcacttgtcaccccttttggacagtttctctttcggaggtcttattgtgccaggcctgctgttctggggaaaaaaaaaccggacctccccaaaacgaattacctgtcttccagggcaggtacatcgcatcgacccagggtggaatctgtacaagtagagtgtttggttggttattctttcttttctttattttattctctcttggatctagaaagtatctcgcgcgtaaggagacctttatggctgttactcaaatcttttgtcccctaagtttgaccttgctctcttgttcgttctttactctagcatcagtttcacgcagagttaggggggtcatcacatattgtttctcgaacagtatcttgctagttctaggttttactttaagaatctttaaaagctccagcatagcttgctccatgtcctgaagagcagacggtcattacttgttctgccctcccccctccccccttattggtgtgaaaagcattttgagcaccggggaaatgttggcttagttgaattctaattgtaggagcaattaggtatacagtgaacagccagagcctcctttggctcatcggtgtgagtaatggatgccacaccctgctgtagttttgacactaggtacttgctgtaaagcctacctgtgcttgtctttaaagtgaggcctgttgtactaaaaaatagaccaataccttcaaacagcccccccccccccgtttttttctttttgtcattaaaatagttttagcattttatgttccttgagataaccaaagatgtcagagaatgttggaaagtagggatagtgcattgttattttagacactttggttaaagttggttttggagcctattttagtctatgcttcttgcacattgagacgattatggtgaactgtgatgtagtttgtaatgtggcagaagaattcaagactgaataacaataacgaagaaaacagttggcctcccaattctgtatgttgttcctagaacactataatctttagatgttgatgttgaatgtgtgctgtagttttggttggaaggtcatgggatctttggcatgttaagcaataggctcagtagcattttctttatactcattttgcattttaaaacgtctttatctcaaagtgggaaaagttgctgtcttttttgcttctcttaaacttcaagattgcaaggactttatgggttttgtctttcgttttgactaaaccacttctttgcatagtcagataactaccttgatggctcagaactgtatacataagtctgtagaatcaagaatcaaattactgaaagttaactttgttttctagtccaatattcatgcttaataagcctcctctcccctaagagaatattctctaattcaaaatattaacattgtgatgctgtttttagcatgtgttgagtatgttaaatcatttcactgataattggtgaatgcttttagagcaacatcatatatttttgtacacccagaatatttacttttaatggtgttggggactgaacctagggcctcatcatgctagccaagaactctaccaactgaactacatttgtagttttttaaatgtgttcctttgccttgttaatacactgttattttgtgaccagtattagaacagggccaaacagtatggttttaaattcttttgaaacaatgtaactcaaagttgaagttttaaaatgacgctagaaactagggctaggactttgccttaagaagtaggaagtgaactctatacttaagaaacaaaagtgaaactaatttcacttagaagcttcaaagactgtcagggaaaggaagggctatcaggagcaggctgctgtgtagatagaatttttgcagttttcttttcttttcttttttttttctcctctctaaaaagtgtgcagatctgttgacaaattttaagtaaatggccattatagttgttgaaatgattttctgttttcaagatttttcttcctttttattgtaaagagctgtaagattagtatctttttaaagcaacagtacacaaaactttgtgtttcttttctttcttttttcttttttcttttcttttcttttctttttttttaaatctaagtaaggtgcaacaatgtaattcgaaggggcagtgtcttcccttcctgtagtctctgcttaattcctgaagtttgccaaaccaggagttaggaaaagttggaaacctgcagagagagcgtttgagaggtttgagatgttatacgagagggtttggcaatgtgtggagtacaggtaaacttgcggttattgttttcttggccctctatcttcatcctttgtgcttgctatttaccttgctgtcggatcattatatcttagaagaaactagatacatacattcacattccaaatcccagttcattagggaaggattggtaacttcctcccaggaatcaaggtgacttagagttgagcccttcaccaggaaagcagcctcgtgagtgagttacctgttcggctgcacaagaggacttagaactgttcttgtcccatagtaggactcagtcaatagttaatgtgaatggttgttggagggaaagcaagtagagtgactccttagatccctaagtaagaactgacatttggttcctgagaaacaaagagggcttgacaagcatccaggaaagtaagtggtagaaggaacgagacaggacgtggattagatcaaaattgcgctctgtgaccttgggcaactcatgaaatgtctctaagtcttcttagaaaactttacactttgtagacacgagaaacttcttcagatctgagtgtttaacgggtctaagtgggcatttattattatttttaaatgtagtatgaggatatatagaggcataaatatcctcttcaattgaaaagagtcaagacaacagattattcaaaaagtgctatcattgtttgctctgtgtataaatacaaaaacagtagtcagaaaaaaaaatcttattagttttgccataagtatccaggtatgtccatcactgagcaagctggggcagaaatgttctcattttaggccagctggctacatagcaagttaaactgtagtagtcttgagaggagtaggggagagggagaaggaggaggggaaaaggaaaaaaagatatttataattttttataatggttaccaatcatattttctagacacaccatgccacaattcaaaagcagtaaaacagttccctaaaaaaatactgccttgggggccaaagagctaggccagccactaaaatgtcctttgcccaaacatgagaacctgtgtttggtctccagcacccatgtaagaagcagacatagcagcacccatttggaaagatggagtgagcatcacgtccagtgagagtctccaagtctacgggagaaagtgactaaggaacgcatccagcattggccactagcttactgtttattacacgagcaagtgtgcacatgatacgtgtgtgtgaacgcaggcacacctgtcccaacaagttttgaaggtcagaggacaactttgtagtcacctctctcctttcacctttgcgagaggttctggaaatgcaatccaggtcccctggcttgaaaggcaagcgctcttacctgctcagctacccagctgacccgttgcctgtttgatcagttccaacagtccccagggctcagtgcagaggagatatgctttcagcagcaactggagtttgaattcttttcccaggctaggattctggtgtggggatatgtctgtcattcgatgtgggacagcagcagtgaaccgtagctcaccgtctgtcactcaaaaggaaatgagctgctctttgctattgacttttggatacagatattaagttatgtgagatattcagcaccgtattgtagagcaccatttagactgggggcgatttttttctgattgaagaacagatttaagtggtttgagcacggtaagctatgatttagggttgattagtttgggcaaatcttggtttttcacctggatccacagactattttttaatgttttgtttttgctattaaaatgtttttgagcttcaaacatcttccgtatttcagtttgtttctgaatatttccatggctgtggcaacatagagacatcagtatatttctggttcttcctagtttttcattaggaattttttgttttatacacatatatatatatatatatacatatatatgtgtgtgtgtatatatattacatgttacaaaaattcatatatatatatatatatatatatatatatatatatatataaataaaatcaaatttgtcagcaactctttgagtaggcaggcaaatctgtatttgtttggacaaatacataggagtagaaatgttaaaataaactctcaaattgtgacccagactgccatactttctttcagaaaagtctagttggtttataatttcctcaagacttgctcttgctagtctttgatgctttagccacttttaatggaaactcatattggtttgtgtttccttttgactaacagtttttgaggccttctatgggtgattatgttctgaataacttttaaatatcacttttaatatagtacccagttttcccttgacataggtagtagcaacagctgactatttttcccaactgaaatgttaaaaatgttattagagctaaataataagtataaatgtgtttgtaaaatgaagccgcacaatccattttatttcttaagagacttatctgattaaaaaaaaaagcatcagtgctgaaaactaggaaccattttctttgtcatgcctcaggtcaaatattcaatttatctctttaattattgataggacatatactctagaaatcttcataatgcatattttattaccagtgtctaaaatattttcacagtggatgtactgccacaggtacgcagtctcaggaccagtctaggttacatagtgagagcctcttttaaactaccattgtcaaaaacaaacaaaaagccacttgttctgatttagttggtgaagaagttttggaaacaatgaagtttggaggaaaatggtagatacaggatgagtttagatgattgactcgaactgtaagccctcccccgccccactgcgtctgttggtattttcagtggaaaaggattggaaacatgaagggctttagtcatcagggaggaactgtctgcagaactgagagctaagttcccaccgaagcaggatagatatatacaggaatatgtagagaaggatcaggaaagactggatgctctgttaacaccaatggggacagcgattgcacagaggtgtatgtaaaacctagtgcttaatttcatgacagtgtacatgcagaatcagatgccttagatccttaaggtagtgctgtaaaaaccagcttgggctggagctcctagctttctgtatcctcctctgatgctgggtctggagatttcagctaaaaagtctggcaagtctttccctgaagccttgaggggaagggggaggggtggtggtaggggaggaggtgggggcgctggaagggagaaagggaggatgttgggggctcggggagggggaggggaaggagttggaggctcagggagggggaagggcaatgctatttgaaatgtaaataaataaaataattaataaaaataagaaagtggaacagtaagatctgagaaagaggatgaaaagtaaactagaaacagctttaatgattgtgtctttggaaggaagctgcagctcagcttagtttgcctagagtcagcagacattgtgcaccaagcagagtctctaaactaacattcattccagtttcccacctagtggagcatcagctacaggataatgatagcactgcagaactagaagggttgccttggtgccttgggtggctggcattagagggacaacagcagcgagcctgagcttctagagagctgtcactaggcaggtgtaaacaggtcacttggtggccaaccttagctgtggactgcctgtgttgtgagacagggacaggactctctttggtcacatggtcctgtcctatgtgatgtggctccagggtagctagtcggatcttaccattagcttatgttgcgcttccttggggctggcttgggcaaagctcatgatctgcagatctggagggaaaaggatgttgcattcccggtgaaaggctttgtaggtagtgtgtcttgtactccttccttgcctggggaagcaggtagaggtttgcaagcttatatccaaagacaaccggaagcttgcaaagcttgcccacttctttctctctcccttttcctccttacttcctgcgaacattctagtcgccaatttctttctacatgtatcttaatttaatctctctctctctctctctctctctctctctctctctctctctctctgtgtgtgtgtgtgtgtgtgtgtgtgtgtgtgtgtgtaggcacacatgtcatgaggaagccagaagacaatttgcaggcgtggttgcctcttcttgtccgtattctggggacagaacttaggttcccaggcttagggacaagcgtctgtgcctgctgagccatctccttgtccccttgtcaaattgttcactcatttattttctattttcttaattgggacttaagaatcctttgcctattttctgtattttcctagacgtgactgaccatttaattttcttaccaatttctttgaattaaaaatatttaaattttgatgttctattttatttatgtcatttcccttagattagcccttttaactatgtttcctttttccggttctccacttccaagtttagttttagcctggatgttttctataacctatttgaagttgtttgtatgtgtgctctgaggtatataaaattgaatgtatgtttgaaatttagtaaaatttgtatgactaatatttggtacaaacacagaatttcaaggctaacttcatgtggatgtgtgattgacccagtacctttgtgtgaaaggataacagttgatattgagttgaggttagttgaccatcgacgaggaggtttgatagtctcacctgccttcattctgttcttattctatataatgtcacaagcactgtgttttaaggacatattttgaaataggttggggaagttcttcggcattcttttttgttgaaagaatgtcttggctgttcttgctgtttttttgcatttccatgagaaattctaatgttctttgtacagttgagccgaaatgaaggtaggagttttgagtaggaatgtgttgattatagagatcaattctgagtgcatagacccgtttaatctaacaacattctacagttcctcgttaatttagattttaatttcttaatagcatatcatttctagatcctggtgtatcatttattagtgttgacttttttgatattattctagagggcattttttttgttgttgctatttaggtttgtgttttgtttttttggcagatagattataattgatttttgcataacctatgtcctgtgaccttgctaaatgatctcctagtgctaatagagtctatactttatcccttcctatctcctgtctcccccctctctgtctctctttctgtctctctccgtctctctctgtctctgttctctctttctctccgtgtgtgtgtgtgtgtgtgtgtgtgtgtgtgtgtgtgtgtgtgcttgtgtgtttgtgattatttttcttccttgctattgttttattgtcctctcgggaatctcctgaaaacattgacttggaattcttgcactcttcctcattatattccgggaatgctttgtcttgtactaaatgtaatctttgccacagtttttttgaaagatatatttcgtaaggttggaaatgttttcttcagttcttagcctgtgaaagttttggtgagaccgtggtcatccttttgtgtttcaggagatactgaagcttaatgatctatttgcttatctttgccagtgcttattgagcgttctgattcttgcttgtaaaattcttcttcttcatcttctctttattttcttctgatttcaaggtgttccttgtagtccagcatttacgcgtgcttgttttcttttgctctaaccgaataacgccaagcacatgaaaagaagggcaggtttggccggcccctctatggagttcatggttggttggccctattgcttttgggcttgtgcacatcatggtagagtgcctgttaaaggcagccactcagattatggtgggcagaaaagaagagaaagagagtggaagaagttaggtccttttccaggcatctcatccctagagtctgccttcctcttgtccctgcctttttcccttccctccccttccctcccctcnnnnnnnnnnnnnnnnnnnnnnnnnnnnnnnnnnnnnnnnnnnnnnnnnnnnnnnnnnnnnnnnnnnnnnnnnnnnnnnnnnnnnnnnnnnnnnnnnnnnnnnnnnnnnnnnnnnnnnnnnnnnnnnnnnnnnnnnnnnnnnnnnnnnnnnnnnnnnnnnnnnnnnnnnnnnnnnnnnnnnnnnnnnnnnnnnnnnnnnnnnnnnnnnnnnnnnnnnnnnnnnnnnnnnnnnnnnnnnnnnnnnnnnnnnnnnnnnnnnnnnnnnnnnnnnnnnnnnnnnnnnnnnnnnnnnnnnnnnnnnnnnnnnnnnnnnnnnnnnnnnnnnnnnnnnnnnnnnnnnnnnnnnnnnnnnnnnnnnnnnnnnnnnnnnnnnnnnnnnnnnnnnnnnnnnnnnnnnnnnnnnnnnnnnnnnnnnnnnnnnnnnnnnnnnnnnnnnnnnnnnnnnnnnnnnctacataagaattcactatgtagatcaggttgactggccaggaaccctcaaagatctgcctgcctctgcctccccagtggtgggattatagacatgtgttaccatgccctagcactgagccttctcattagcatcctgagcctttttattctctttatagtgaaagttcaaggattaaagtttctaggggattgttgtttttctcaatatgaataactgaggaagaaaacagcaaaaaaggttcttagctctttgataggaatttggtgagcctgtaaagtgtgtgtgtgtgtgtgtgtgtgtgcgcgcgcgcgcgtgcgcatgtgtgtgtatttctgttcattacattcctaaaatttaatctttctgcttcctactttgtggtttccatcttagagaccttttgtattttacagtttaggcccacggcttccaagtctctatattcaaaatgaacttcacgctacatcttcagctcagttctggattccagttggatgcctgctttgtgcataagtatacaattatcagtcagtgtcatgactgccttcatttcttcctcctctgttttatgcagatgaaaaacgtgtagtctgtgggggtgtgagcccaaatgataagccaaaggctaagggaaaatggaggagacagcactcagggcttgaagtggagggaacgttataaatatgtgagagagctccattgttagagagaagagcaaggacaaagaaacctgaattgatctgatattatttgtttactacaaatagctggactagaactgtggcagaataatgaacaaatattctgtcttttctcttgctttctggcacagagtcctgaaaactctttgaattgacttttttttttctaaccttaggaagatgactcatggtgcttgaagagtctggattgcttcaggatgggagttgcctgggaaaaactaaccagtgtcactcgagggtgggacatttggtatatcactgcaacctccagggaaggacaggaggatgcaggctgagttccgtcactagtggtcaatgattgcattacctggtcctttataaagctcagcccatgtctattttgaatcgagtgcctaatagtactgtaggagagtgctcaacctacatggttagattgtaaccttctgtttgtttttgtttgtttgtttgttgagacagggtttctctgtgtagccctggctgtcctgtgactcactctgtagaccaggctggcctcaaactcagaaatcctcctgcctctccctcccaagtgccgggattaaaggcgtgcgccaccacgcccagcagattgtaaccttcttagattgtgtttcccagagacatttgttctctcaagggtaaatcttcccctcctaattgttttgagatctattttcttagaaaatatataacaatagattttaataattaaaaaaactgtcaggaacattttctagttaagggccaaccaggacaaaaaaaaaaggagagagaacacaaaaattatagtaaggaaggctttatataattcaccaagaacagatgtttgatcaagagtaactgaaggaggagatagggctcatggaatgggcctgtaagaccagctaagcagggcgtgggccaggagcaggacacctgcctgggctacagattcatttgaagatcagcataggcagcttagtgagaccctgttgcaacactgaaaagagatgctgcggagaagactcactggctaagagtatggagtgctttcaggggcggcttcagttcacagcacctcaagtgcggcttagaacttcagtcccaggagatccagcaccctctgctgtaggctgcaaaatgttagtgcaaatttctgggttgcagcttttctcttaacccagatagctcccaaataattgaaatgactattagatttatttaacaggtttaaggcacaacaactgagcagtagtaatctattttatttctccaaactaatctggttacctcccagccaaaatattcgagatacttgcgttttagtatcgatctggctctctctgttccaggtgaattctcacagtgtctcctggaccttctcctcctcggggatccccacttcctgtgtctccctcctgctcccctggctggaatagtccagccctattctctcctctgctcagtcactgactgacaagtttctttattgataagtcagggagtaattgggagcaaagcttacacaacactgagacaagagattctcagaataaggattgcaatgagatgtttggttttttttgggggggagggcatggtggtcatagaaatcagcctttggataatacaaggataatctttacacagtgcacagtaacatgcctgtacatagttagccattatgtcattaataggaccaaaagttggatttgctttaaggaattgttttgtgacattaagctgtgaggaattatgagacccttttaatttgaaagttctgctttgaaaatagtgttggttagttttgatttcaacttgacataatctgtaatcacccggaaagagagtttcactgagagttgacctgttggacatgtctttggggtggtgataatctttattcctttgagatgggtgagaaaggtccacacattatgagtcacagaattccctgtgtttgggccttggactgtgtacgaggggagaaagcatatctatgcatccattttctctccctcctcctgactctggatgtgaccacctccctgcttcaaatgcctactcttttgacttgcccaccataatagaagataacctggacttgtgagctaaaataagctcctttctccttaacttgcttttgatgggatattttctcacaggaagaggaagaacaactagggcaagggttttgattaacaaattgattcttcactttgtgtgtccgtgtgtgaagcctagacaattattattgagctatcgtcctgtgtttctacttaatttcctgaggcaggtctcttactgactgctcttggctggctggctggctggccaccccagggattctcctccctggcactaggtccaggtccctgcatcgcctttgtggtgggtacttgaccaccaagcttaggtcctcatgcttaggtggcaaggattaggccctgaaccctctctcagtgtccaaagcatgtttatttcattagtataagggactttacttttgcactgaaaattaattatgaaaatgtaatgcagaaattagagatacaagccgggcagtggtggcacatagcttttaatcccagccctgtagagacagaggcagaggcaggcagatctcttgatttcgggtcatcttggtctactgagttaagttctagtacagccagggctacaaagagtaacctgcctcgaaaaaccagaaacaagaaaaacaaaaccaaccaaccaaaaaaaaccaaaccaagcaaacaaaacaaaacaaaacaaaccaagaaaacaacaatgaaccaaacacagaaagaaatttgaagtacatacataacaggagaactttatttacatcagaactagctaaatgcttattttatttaaaccacagatatggaaggtaaaatatatgacttgattctccaaattttgtttacctatgtgtcttctagaatgtaagtactctaatttaaaatcacagtgtatactaaaagactttgccagtttggtttttagaactgaatatgaatgatgttcccatagaaaccatgtttgttcctgtagggttcgtatttggcctcaaaatgtacctaaattccgtaggagttttggttctagcgctgtgtaataacagtgactgggagacttgtactgacagtgccggcttacgattgttttatctgtggcctagtaggggtggagagtttctgaaatgctgtggagtattgcagataggactgagggactgggtgacaggtgcggataagaattcttgggtgagaaggatggaaacttacatttatctaggactagctatgttcctgacttcttgttggtgttggtgatttcctataggtcaactcatctcttttcttggtgtttgttttatttctgctgttccacaagtgcttcccagcctactgtcagatttctgtgtgaaggcatggctgaagggctgcaggagacacagcattaccaccagaatcccattatggaggtttgcagttatcagcagatgcagaatgcatttgaagaggagatgcactcaggttccgtaccctaaagtggcagagttgaggggtctgtagagcagaagctagaagcctcccactcagtggctggcctgtaatctgaggtttgagtctttattctcagaaaacctgaagacttgtttttttctactggtcattttaaagtttgctggccgcagccacctttgaggggacactgacctgtgagttccttttctttgtacctgaattttctttattttggaaactgagttgacaaacgcagtggctgactaaagagtcactcaagtgttagtacaatccctttcctgccatagtctgtattgctttttatcttatcattatcttatcattgagtatttcacgtgagcataactagtgaacataattagtttaagctcagagtcttcatttttcacatcattgctaatgactgaggggagaaagatctggaaaagacagtagctattgaatttccaagacctgtttttattcctgtgtctgcatctgttaatctcttgaagagacttcagggagcttccgtgagaataacttcttggggaagagagcacatgctaagtttatgaaccggaggcatttagaaaccaatattttgtctaacaagggcacagtgaacaatttacccaccccctctgccgctagccattcccacttttgcattctcagcagttatcttgatgttaactaaggtgtctttaagttactggggagctgactggggccaccctactctgcctgcctagatgtgagcagtgaagagagacttttctagtgataattgtccctagcccttgagtacccaagaccagcatagtctacactggtagactataaaccctgagagctagctagggcttattgaacccaaaggctttaaacccaacgggttttgttttgttttttttttttttcttaattttaaaaatgcaggttggaggcttgcagttctggtttagccacgagtggctccaacatttgacagctgctgtaatccttcgttttcagctgcagtgagcggagcgagcagacaccagaaggcagttcctgccagtgtgagaactctcgggtgggctgtgcatggtgggtcctcaggccccgaataggctcccgttacagcaccgagacctatggtcttgggacccttggatgttgactgctggtagtgttccagccctcgggctcccggtgttgggattcttgactcctaaagcttccatgtccttggaatcccgccagtgagcagagactgcactgcggcttgtcttggcctcttctgctcacttagtttctgtccctggctgctctctggaactctgcagccgaccttctcgtgctgccaccacattgtgttagcggctcaaagagaaccactgccctgagaactccagccctgttaagtgctctcaagccacaccagctggtagcagcagagagggactcactcaggaaggcagccaggaagcctacttattatctgctggccctctgtagcaaggtgttcgccccactcaggatgctgtgcttcctgcaagtgcaagttgacatctgtgttaatcaagctgtctgcttacgatccctccctggtttgaatgaaaatggctctggggtcagtgcctgagttaacagaaggcttgttttgcagagagtgctgctttctgaggctagggcagactggggtgctcatacctggagcaggtctgcagcagtggctgtattggtcacactgcagctgttgtcgtgttctcagagtaatcgtaaaacgcccagaaaagctgggctgctgtgacaccatctatctggtttctaagagccaaggcttcttggctgatggttcttgagactgataaccctaagggaggcttctgcctttctggtctcttctctgtagtttgactcattcaaagagcatcaaatggatatttacagcagagatgtaactaagtaaagcttaacacagaactacgagtcctacaagcatgttccaatccatacttagtaatatttaaccagtgtctattgcccttctcttctggcccccgtattccatataggtaggttccaggggtgattccactttttttctgaaacattaagaaaaaagcctggcattccctagtctactggtgaggtaaaggatttgtgctgaaacccacttgcttccttatcctggaactgcttgctatattttgcagttgtagaaaagcaggatgtcattgtgcagtggaaataaaggacagagcttgaaggtgtgtgtgcattttggcatctttgcttattgatttttgtggcgtccacaaaccaccaaatctattgaattctgttttgctctttggcccggcggtgggaacaaacagaagccgctatgttctgctctatagcacctaagaaatccatacagaggaggccactgggactcaacaataggctccagaaataggcaattggagcgagtccaccttgcatctgaacttgctagggaagcagaggttcctatgcaggatgcttgtagtgaggagaagagtttatcagagacaaatctgggaagtgtgaagtgtctgagttacctgccttgctgcttcatcaaaacataaggcaggggctggggggttcttttggctcacagcattcagaggttcagttcatcatggcagaggaggtctggtgacaaggagaggagttgattggtcacatgtgtccacagtcagatgcccagcttcctgtctcgttcttagatttagtctaagaccctaacccatggaatggtacccactgaccatttaaggtgagtctttccacctcctttaagttaatctggaaaatatttcgctgacatcccagatttagtttccatggtgattctaaagccagtcaggctgacagaaaagattaactctcacacgaaggaaggtccaggccttaccagacaaaccaggatcatgatcactgcagaaatatcagcaatatggacagagctacagaagatgagagcacagcttgtgggctaatgacaaagaggacagtgttgcaaccaggcgacttctcctggagttttctctgttgtatcccccacccccacccccccgatctcttctctatttcttgtcagtttagctaagaaccttgtctgtagctttttttctcacctccttccccttttccagtgtccccacccccttatctcctcttcactcccagtcaaaatttgtgaaaacatgaatcatggtagaacagggttctttggcagtgtgtcagactgactgctcattaaaaaaaaaaaagaaaacactgaacatttatgatatacagcaaaagtcctctgcatgatttctctgcattttttaatgaactctgtgtcagccaactagtaccataaaaatcaccttagtatttggttgcataccaagacggtgctatcatgatcactgatttacaggcaggctgaatggctcttttctacgtctgccccatttggcagggggtgggtggcgggtgggcttaagtgggctccccgaatcttctagtgaggcatctgtggaaccataaggcacttccaaccctccaaatacatcccatttctgcttgtgtgttgccctcgatcgtaccactgttgaacgtctatcttctttgccatagggaaataagtctttagaggaaggaaggaaggaaggagtaccaccaaggtgtttatgtactgtttgggatgggcccttcctagcatctttgtattgcatttgttattaaaataaaagcgcgtttgccttgttcatactgcatctaggttgatttgcataaagtcatttgaggcacatttttcctggaatcagtctccggtgggatgttggtctttataatgtcccatgcgtatttggtcatctcgttaacattaatgtgtgacagccgctttcttggttcaaggacatgaacatttctacaaaataattaaatttccttgggatgttcaataatttttctgagatgcatgattaaataatttgccattaaaaaaataatgtaaataaaatattgaggttgtaggccctgtacattgcaaataggcttgtggcattttcttagcatgttatagtgactaaactaagttttacattatagaaaagagtcctgtatgttttttaaaaatatatacttaatttctaatctttggtattgattccactgtcagttttactccagtttttcaaatacaaatcaataggagaggtttaaagagaaatatgacttttcttattgcaacctgtagattgtccatttgatgctttcatgaaacttctgtgtacttcctggcctttacatacttttcttttgtatcttaacatctattgtattattaggtgctgccgtcttggttccttaataaggtttttatgggaatgaagttcttagatggcgtgagtaatccaccattgcctaacagtatctgctgtagtgctgcttctctttgctgagttttctcttttctttgaaagaattcatacatctctgatttcacttttataatggattttgcctaccagaaaattattttctgaactcctgaatgggtgagtggcttgacactttaatctgcacagaccttaagcagaagaagtctttttttgtttgtttgttttgttttgttttgttttgttttgttttgttttgtttttgacacagggtttctctgtgtagccctggctgtcctggaactcactctctagaccaggctggccttgaactcagaaatccacctgcctctgcctcccgagtgctggggttaaagtcatgtgccaccactgctcggcaagcagaagaagtcttaaagaactttttaatgtcaggctgggttttctagaactcttatgggaaattagatttggagatattaatgcaaagaacttccatggctttttttttttttttttaacggaagcatctgagaatctcctgtgggtggcgtacactttgaccactctgtcacttaaacatttcaagggtattttctaaggaagatgatgttcccctactataatccaattcaggaacgtgactaatatgttgtcatccactgagcagcttcctttgcttctccagtcacctgcactgacactctgcagggcacccagcctctcttgttgcgttgtggggcaatacttctggatttcccttctggaagagactcaccctttgtttttggtggtctaggcatcttaatgatgaccgaacaactcacttgctctggatggcttgcttgaggttgtctggtcagtcttcaagattaaattcaggttttgtacttgtgtcaaacctgcacagctccaggctgcagtgtgtcagcaggtgcatgctgccatttttgtcttgtcaccagtcatagtaacttagatgtcctggttaaggagggggcttgctagtttccagtacagagctaatttttctctttattcattgtagattgaaattttgtaaatactccttttctcagcatactctcgaccagtagttaattaagactacccgcaaattcccctcagatttggtaaaggggaaaggagaaaccattttgaagtaataaatcaagagacccacgttattgtagcaatgaggcttgctttctgtcttactttttctgtactttagttcatagtgctgttccacagtttgtgagaatcaggttttaagaaataaaatagaagggcatgcagtgggaattgctgattgaagatctttgcaagcactggtagtagaatcttgtgccgtccaggttatgaaattccctagtctcacacactgtggagggaagtgactgaagtggaccaaaccagttctactgaggctgttttatggcagtgaggttggaggatcagggggtcttcttgtcattggctgcatccttggaccctgagatgtactcgctggtttcataggcagcctgtgacatacacgcacatctcctaaccatcccaggagtgcgcccagctcaaacaggttcagattcttgcagaggcatgatctgagacgatgaagacaggttgaaaactgtgagctcggaagctgcttgggaaactctggaagctgggaatgaaaaacgagagtccaggcgtggtggcactcacctctaatcccaggtggatgcctgggagttcaaggtctgccctgatcttcaccgagttccaggtcaaccagggctacatagtaatgccctgtcttaaagaaggcagctgtagagaaacgtcagagttgcggcagggctccctgatatgtggtgtctttccttgttcaaaagagtggtgtttttattctgtgtcttccaaggcttacctcttctcttctctcctctttctttttctctttttcttaaaaaagaaaaacaaaataggttcattgtttctactgtaataattctgatttcttctctgccctctagcaccagcagacatttttgaatcagctgagagaaattactgggattaatgacgcccagatactccaacaagccctgaaggtatggccttagcttacagcttacatctgcggcgtacttttctctctcttgtgtactgtattagttaaaccatatatttgtagagacgggaaagcagtctcttataaagcgagagcctcattttgtgtgttgcaattgtaaacaagtaattcctgctaccttggagtggtgtgtagcccctctatagcagatactttttctgcagaatggtagggcataatttcagtgctcatgaataatgtttttcaaccatgatttagtatatgactgcggttcagtgtatgggttaaaatacaatgtgaagaaggaacacaaattagagaagcaatagggcccacagcttacctctttttctttctgagactgagaaatatatattgctttcacctatcatgttgctcatgataacttcatttagttaagcatgctgtaaggatattccacctcaaatttcagtagcgtgtgcatcaaagccaacgtgccatttggttgtatcctagatacactctcatttccttatggagctgctcagatgagtcaaatcccgtggctagctcacagggagaaggatgaagccaatgaagtgtatgcttgaaatagaactgtagtttgagctcatttgtatggaacatttttatcaccttagtcacaggcatagatgggagcctttgtaactcatcgatgagagaaaaagtcaaaacggtccctgattctgagctagagagctttaatttccagagatagtttacgattttaaagtttttgatggttatgagcaaatatcaccaatgatagcaacaacctgcgtttcagttcctcatgtgggtttgttcatttagtcttatatttccaagagataaatacttccatttccccactttgaaaatgacgaaacctaaaccgttaagtaacccactccaaatcacacagcggcgtgtggagaggctggaaacaggagctacagcagccatcggccggtgcctgactaaggctgtgtctgctgctctggtgggagctgctgctttgtcctgtttgccagaaggatgctggcaggagtttatacagagctgtgcatcttgtcattggaggaagcagcactgtgcagtccctcagttcttaggagcacgtctttctttcattctgataaatacctgaccaacccactcctttcccaggagatcaccgaggatggagggtggagggtgagggtgagggtgtagcccatcacttggctatgtgcatttggaggagaccccctccctgttttacatttgagaaatatagatcaattaagtcttgtccacattccttaagtgtaagcggtttttcttcttcacaaacttacatttcaagttaggtgatagagtaaataggacatttaaaccccaactgatagcctttctgatttctcaagggatttagtaatgaattgattctcttaccaagaagtcccttgtgttgggaaccacagctactgacttcatcactgtaagctgaacatgctactagctacttcccttaaccctgcccaaatacctgacaagtggaacttgggatggctggagaagtggctcaaggcgatgagcattggctgctcttgcataggactgcattttggttcctaacacattattggctttctccatctctactgggtcagatctcctcttctggcctctgcaggcactgcactcctgtacacataaacacacatacacagacacacacagacacacacacacacacacacacacatagcttttaaaaagccaagagaggagggtggattcgtttcggctcagtttcggctcagtttacgagtgctgtctcgtggtggggattcacagtggcaggagcgtgagggtgcctgctcacacctcagcagacctgaaagcagagctgggagaccctccccgtccacacttccctgagtttacacagcctgactcctgagaaagtcactcagcctccccaatgttgccatcagctgggtactggtcttccaactcaggagcctgtgaattacattttagatccaaaccataacaagaatctatacttagttatacaggctgaatagccaccaggttgtaaaatccctgctgtgtttgggttgaagcacttagcaggtttcttgacacacagtaaatacttcctcagtcttcactgcagttcctttggtgagcagtgtacttgcctgacagtggcctctcttaaaggtgcctcttggaagagtcacttagtctcataatgtacataaaggcgtcacacagtgaagctgtgttgttgccttcccaccaccctctcctcagctccctgctagaatgagtctgcggcaggaattgcttcttcattcttttgcctgttggttattttgcaattatcttcatcccagaattctctcttctccttaataggttagcagggatttctcagactttgcttccatagttttctttttaatgcatagccaacacaagctttttaccatgaacatcatacgatgtccaaagtgttctactgcctttaaaagcaaaacaaaacaaacaaccctgtgaggtttttacattctagcttctgatacagagatgacttgatttatctctgagttcattgtgctgcctcagttagctgccttgggatagtattacattttacctatcattagtcctttagagattctgaagacaaaactgagcaaccctcctctccttgctttttcgaattctaaatgaacatttgcatattttgattagctgtgcttttgatgagcagtgacatgtgtgtgaatgtttgtgtgtgtgtgtgtgtgtgtgtgtgtgtgcgcgcgtgtgtgtgtgtgtgtgtgcatagttgtcatcttgatggcagtaaccatttctgcctagcaattctccctgcctctccatcctatcaagttctaaacctctgctgtcctatgaatccttggcattttgctccagtttgttcctagctgtgtgtccagtatccgtgtgagagaagctgtattttaacaagtcacttttcactcttatggaaccccccccccccggggggggggtgcaatctagattactcatttgtttcactttggaagctcatgatttgacttttctaaatggataggaaagtaatagaaaactaagaaaatagacaattgattttagggctgtattagatgtcttaataacgaatatcataaattatggataataaaatattactattaagttagagttgtattaaaataatttcaaatcaaaatgatttttgccacaaaacattatggataaaattatgtacattttgtgtgattatatatcattattcgaaattcattgcgtgttcctttattgatatttgaaggatagtaacggaaacttggaattagcagtagccttcctcactgcaaagaatgccaagacccccccacaggaggagacaggctattaccagacagcgcttccaggcaacgacaggtacatcagcgtgggaagccaggcagatgcaagtaagtttttcttctcaatgttttattgatacgaattaaacttttttggttgtcaatgtattagttttattcactaagtgaggtgaagcataactacaaaaataaatgaatataaatttttattagtgtttttttctaggttaaagacaaataattttatttatgttatctattatgttttgaatatctcatatagtctacatgcctttgaaatatgaaagaactgtgtgaatcatattcatttaaagtatagaattttaggagggcagtcatttacatttttcagctttcagtagaagctgagtattgcgttgagactatgtttatattatatgagaatatgtttagtgtattataaaactttcctccctcactccacattaaaataaagatttgcagagaagctcatcatgttgtaatcaagatccttcattatccagaatgaaaggcacagtaaagcttgagcgagttgttgggagaccccatccactctgaagtgcaccttcagtgacttcagtgacgcatgaaagagtcaccctttcactttcacacttaagtcaaggtgcatgagagactttgcccaaggctctagcctatcccgatcatgtgcatattgtcatgtagcactcacagtttccagtgtatactcatattcccaaagccttgctattgttcaataactgtggtactggtggtatggttaaagtatgtgcttgactgtggttttattattaggctccccaaagcacaaagctggtgtatataaaatgtaggcatttattctcatgcgttctaggtttgagacacgagatcactagcatgtgtgaggagcacttctggtttcattctggggcagtaataattaggaacgcagcaggagagcccatctctcacttcctttccatgcagctaacaggcaataggagccgtactgcttgcatgagtgaggtgctctggcttatgtcaagttccggacagactttgccccacttcatctctggtctctgcttctccccttcctttacactctgacaatgactcaacctgagttgaagtcacagcacccacaccggagccactttgtctctcagggtaagctcttgctgtttccacagttaggaagcgtcttcaacctttctctctctataggttattttcatcttagagttcagcagctacctggtcgagaacgttttctcagtcctcttgcttggaacaactgtgtttcctgcatccagggtgtgcttcatttggaaaccacttggacgaacagtggtgctactacattttgtgtagaaaaatctcaagactaagaaaaggaataaacttgagaaacctatcaatgttagaagagacggggaggaggagagaagatagggttctaagtatgggaaggctgtgtggttgagactaatatccagttctatggggccaaaaggagctaattacttagtttttaaaaaagaaaaaaaaatggaaggaagagaaaaacatctggttttgactgaaggcaatagttagagatgcaaactggcaggtagtccagtttcgtgctgtaattggggaggtaaggttttttagaaggacacttgtgtactcttgctgttaatgttatgtttatgaaacaaagctcaatggacaaaggggcaaaagtggaatcctgagactgccataaataatggaaggcttatttgctgtgcaagaggagaaagtactacataagctgagcagtaacacctgttcaagacatttgtcaagggccagtgcaaacgctgtgggacaccaatggtgacctgcataggttcccttagagagaacacagcccacattcacaaggctgatgtctcctgataaagcacctactccaagccccactgtatatgtataaccctagaaaaatattgtgtgacttggagtaaaaggtaggtgattgaagtttctggttatcattttgaatgccttgtttgaactgtggtttcattataaaacgcaccgtgttaagttggaagctcaccgggtagtgtggccattgccnnnnnnnnnnnnnnnnnnnnnnnnnnnnnnnnnnnnnnnnnnnnnnnnnnnnnnnnnnnnnnnnnnnnnnnnnnnnnnnnnnnnnnnnnnnnnnnnnnnnnnnnnnnnnnnnnnnnnnnnnnnnnnnnnnnnnnnnnnnnnnnnnnnnnnnnnnnnnnnnnnnnnnnnnnnnnnnnnngtgcttgcacaatgaccctagtagtaatattcgtttgtactctgttttgtaaacttattgaaagcatagctcttattgaaagcatagctcttaattcagtgaacttagtgagatttttgagctatgtaaagatatacttatgtttgactctgaatttattgctgagaagtgaagggtctttgtgtgtgtgtctgtgtctgtttgtctatttatggagtggaagcttatgcatgaaagaaaagatacacgactggaaattgttccaaatgagagcctgagtgcagacttctctgagtgaggaatttctcaggcattgatgtggaccgaactgcttcactcttgagcatgttctcaattttctttgcagtacattggcatctgaaactctcccatagtttgttttaaatatggaagttttattttcagtaaattattactttcttccttctccttagccaaagcttgagtgtaaatgaagtcatgttcccagcctactggcctcagtactggcaaacattttttttttactctgtattaaatactcctatgttcaacgcacatgttactgccttgatacaagtgcacatataaccacttgtgctctatccctcctttagagaagaagaaacagtgatgctttctagccaggccacttggtgctacgattgagttttcagttatgcatcttttgacaaacaaaggcaattagaagttatgttccttgatatgaagaacaattatatttgggtccatttctgttatactgaagaattaatttaccttttcaattcttttaaaagtggacccatctcatagttctagttttactttttatatttgagtgaaaaaaattataatttcaaggacacttgtactctgaacttcagagttactgaactgggtgcccattggtagcatttgctattgtaatttaaaactgtggtgtattccgggagaaggctcaagttatttgccatataattagcaaaaactctagacctattcataacttggataatcctgacctacgttagcatgcacaatgtcaaaggaatgcctccagctttcagcttacattgggaatgaaattccatgagatcatggcagtatcatctactgctgcagagtatactgcccaggtatgggggtccgagtttgaaatccctaaatccacatagaaagcttgtgtaattccagtgctgtggaaggcagagacaagaggatcactggtccttgttggcttccagcctagatcagtttaatgatagaccctgtcttagggactagcctgggatggaattggcgagtatacctgacatgtgcctctgaccctcccacatagccaactaaattagactaaactacagtgcacagtattggctattataattgtacgtaagagtcaaaagagtaactgtcatggttttgggtcttggcacatactgttttagccatgacttttacaaagggttttgcccagcttgaaacttaatattaacacttttataccacacctattaaattgttttaaactttttcaaaataggacaaaatcagtatatgtccaccagagcaagatgcaccacagttgagcaatcaaaatgtggatcaaaagataagagggatttgggtaggtaatcattccgtagaaagtaatatggctttatttacctttagagaaactgacacaatgctttgacacaggttctaattaagtactatactagactcttcaaacacttgaattgctataggtgtcctccctttatgtaagcggaactgtgtaccctggaacttagggaactgtcggttgcttggccaaggttgcttatagcttagatggtggtgggagcagagtttgtgttctcacctctaaggatacttaccttttcccattcctcacagttgtaaaaaagcaactttaggtaggaaaacaagaaatcaattcaatggaagttacaactcttgtctagaagtttccgttgcatgaaactatattggctattcaccgacagccaaagttagagataggttaggatggtctgaagatgtagctgatgagatccaccagggcgtggagagccagttaggtaatagatgtggactgtggaatggcctggataactttctaaattcattgcattcttttgcaagtgcagcttctgttttctaggcctgtgcagtgctcaagcactacagtgcattaccgtaatacttacagtagcactacagtgcattaccgtaatacttacagtagggaggaactggagagtgtatgtctgtttatataaaagtagtttgtaaatgtgttgctttttctgtcctctttgtagaagatgggaacatatactcatatcttattaccgtcactacacatagcccacttttaaaattcagtttcatatttgggtgttaaatttcatatgttttggtacatacatacagattttcaataattttaggggcctttgtaagccgttgaaagatacaatgtctgcttgtggagggtagtgcggaaggggaatgcgaggtctcagaagttgacaaagaacagaattgccgggccaggatggcgacatgggtgtggctgtggttgggaccaggagctgctattttaggctctgtccttagagaaggcttcttgggtgaggtgacatttgaacagagacctgagggaggcgaggaagggagtcacagggctgtgtgaggaaagtgagtgccagcccagcctgtnnnnnnnnnnnnnnnnnnnntgccagcccagcctgtgacaagaatggggtttggctctcggcatgaccagtgacagcaggtgctgaagctggacttgggagattccccgaggtctcatctgtgccttcccgtcttagggggctccggtccttggggttccccgaaaacaagcggtgcaatgtacagttctggttttgcattccaacttgttgcttcaactctcctcggattcattatctccttctttcctctcagtcctggggatgaaaccccaggccttagtacatgtgaggcagccttctaacagcctttggatcacccaggtctcctcaagttcctgttcagggttttcctactcaactgtcccccttgagcctaggagtctttattggtgacaaatataaaattcatttatcacacaaaatacaacattcccctggacttaacttcatgtagataaagacataatgaaaacattcatttctcctttgcagattaaaatctttgcattgtcattcaactagactttgggttaaatgatgtacttgtaaacaaacttaattttttgttttgttttgttttttcgagacagggtttctctgtatagctcaggttgtcctggaactcactttgtagaccaggctggcctggaactcagaaatccgcctgcctctgcctccagagtgctgggattaaaggcatatgccaccacgcccggctacaaacttaaattttagaatgtattttcatgatgaagtgaattacaaaccattcaaggactgaaagtgtgtgtaaaaccccataggatacatgtatttgggatgcagagaaacatatatgtatatataatatgtatatcaatttcatggtagtttcttagagagtaaacatttataaatgagaggatcatgtgctgtacttctgacttatgaaattattttaatttagacaatcttacaaatgggtatacctgctcagaagatgatgtaatctactcaagtggtatccagccagcctgtctactaagtagccttgtcctcacagtggtagtacagggagagtaggtagctgaagagtttgcaatgtttttctgaaatcttagcatggcacacatataagggtataatgtactggtatttggatggatttttttccccaaggctatcaattttaaacttacttctgccaattaccaattgtttatagccaaattaattctgagctcttttttataaccatatggaaaatgctagttttcattctacaactgatagctctagcatttaatatactcgctgtgctattaattcctgaaaaggaagttcagtgaggcccgagactggatttctcagctgttcatcagtatatgccagaattcaaaagaagtaggcttcgatgccagtgaaggagtaggtgtgctagcaagggcaagagcaagagcaagcaggcagaggagtaggcttccttcttccatgtctgttataataggctgccggcagaaggtgtggcccagattaaagatgagtcattccatctcaaagtggatcttctcgattcaaatgatttaattaagaaaaataaaaatcctcacaggtgtcccagcctctttggtttgttttagttaattccagatgtagtaatattgataaccaaaaatagccatcacaaaagaaaaaaaaactatgcatgaattatagaaaaagttgtattttacttactaatttcttattaaataaaatgatacttaaaatctagataattcggtatgtacttaggtcataaaaaaattcattatgaccacagtgttggaaaaccatgggagaagacaagcggctttatggagagtcatgggaacaccatgaagaatattgtcattacagtggctttacaaatgagaacttttcctttgctggaagaaaatgtttcagcaaaggcctggtggtatctgatctcagctaaccctttccatcattaaaatgttctcttgcctaataccaggcgaggcaggctccagttcccgtctgggttacagttgttcctatttgtccaacccctggaggagtagagatgtggtgatagagaagggtagcaagaagcactgagcctggtcctgggagctcaggcaggttttgcctttgataccaatggaaggaacaagtgtcttttgtttgtgatgctgtcagggcaaggcagacagtatgcatgtgtgtagacaagaatgagaaagcaggacacactgggttgggccacagtgtggaggacatgagcgtcgatccagagctgctgcacacagggcacagaggtgactggcacagagggcttgtagcaacatttgctgacgttcaccaggtgactgcacttgatcttgtctcaactcagttgtaaaagccagattacaaaagctcccaccctatccagccaaaaatattggaggacatgtttgtatttaataacgcggcacacgtttgatctcaggactcctagaaactcacaaatttatggtgcacttccaagtgcttttgttgaaatagactattttctgagttaaaacttaaaattcagagaagcttaggaaattaatttttacccaaatagcaacctattatgtttctataaacattttgtataaagtatatttctgaaacaaattagtgggagggtacatgctttcctctgttgaaagtgtctctatgtatggtgttggagaagagctgggatctcaggccgggttggagggactgcattctgcattctttatgtgaggaaagcctggttttatgcagatgttcatttggaaaagggaagaggttttaactgattattcaaatagtaacggatattttgtttactatcccaaaactcggtggttcttaatttttgaagggtgagttgtggtgtgaatgattaattgctttccctctggtgctgttctatattacagtctacccctaccgtcctacttgaatggatctcttacccatacatgattctggaagactgaatggataattgcacgtctgtctgtattatgagagactactatgttaaaataccaaattgttagcaggttatgaactggccttagcagaaaagcctttagactctgagacactatcagaattatactaattgaaacatatttttgtttcaaaattctgagcttggatgaaagtttcttctcagttattgacaacagttaaagttactgtgtgtcacgggggaaattgaagtttggcattcataccttgtagtatgtcatttgttctttcagctaaaaatggtatgaagaatactaagtttgcaactccagccttggacaggctcttagagcaggctttcacatacatgctctgaatttttagtcattaacaatttaagaaccttgtaaattaagactcaatgtttagtaaaactacctttttttttggatcaaagttataactcgtaagagaagctgatttttttttaaaagaatcaactgtgtttatttataacccaataaagggaatttcgcattggttctggtgccgtgatttgtgctaagatgcaatcctttgctcctagcattctgcgtcagcaatgcacatatcaagagcagcagagggattgcacatccatattattatgatcatagtctttaccctcatctcttcttgaaagtctgttaggatgaatagatcaggcctgaagaattgattgtggggaaagagggatggaagaaatgaaagacttagaattggagcctgtgtaccactcttatccttacacttatggcataggtctaacggtgctgtcctttccgatggcttacttttgtgttaattcaactccaattcatagatcatgaagagagcacgtgtaagttagtgcctttctaagtagtcttctagtcagctagccatgaaaccgccaatatgctctataattttagagaaggaatttaatccaagtgacctaaaaacatctcgcatgcaattgagggaggggtcttgtgctcggctttaggcagggactgcagatcattgtaggactgaccctcgcagtgcttctaagtcctttgccacaccaggagaacaacctggagggtggctctgatcgagtgcatacttcttagtacatagctttggcttagtgaatagaaagctcgatgcttaacctccgagtggcttcaactggatattggaatgctaagaaaatactggtttcactctgtgagtgagctttatacagtaagacattggctactggagtgctactatagagcaacatctacacatccattaaagattggaaaaagcagcagcactaagatcatggtcactctgttgcttctacctccatagtctcctgttagtaatggtattgatgtgacctgaattctattcataatcttctttacaagtgaatatggaagacaggtttgtttgttttctgagggaaacacaatagaagtatgggggaatggaatccatgcactaattgatcctgttcctagagcttggctttctactttcctatttcaaatttatttcctccccatcactctccgggttctagccattttaattactgcgatggctcttgttttgtgatgcatttcataccacctacaaccttccccccaaccccatccctttgtctccattattgagtctggactgggaagcttgaccttcttatagctctggcctcttatagctccatcttctttatagcaccattctccacatagctcctctttacagccacagcctccttagctgtgtcctgaggaccatgtgctcagtcacatgaaaccatgtacttgatggcatgtgagaggtcccatcattccaggtactgtaccccgggactctgtactgtatgcttcacctatcttcccagctgtgattaaatacggtgtagcagaacttactgtcttttatgaggtttcattgtatatgaggtcatttaaagaaccctttctacagcaactatgtctaatattttaaaagttcttgtgtgctcctcttggagaaaaagtggtaggtaacaataaaaagagatttttgtaattgttaaaatgcagtgataaaattaaggcagcttttcccatttttttctcttctttttcttttttcttttctttttcttgtgtaatattttaaacatacttaaggtttaaggaatatgaatatatattatgtccaaaacatgaaaacaattctgattacccattctttttctcattggacggatttattttactgcttaaattgtaataacagtatccatcatcagcgtcgtctctgtcgaggaaactgaccagtacacatcacagaactgcactgagcatattctactgaagttgataaaagctgcaggttttagtcattggatgtagaagtagaacttgtaatgttcaagttctcttaagaaatgggggagacagccagggccacacagaggaaccctgtctcaaaaaaccaaaaaagaaaaaaaaaaaggaaaaaaaaaaaaagaaatgggggaaatatgttcatttgcatatgtctgtgtaagtaaaattcttgttttcaatgaaaggaaggatttatgtcctaatgtaatcacacggtactgaagtgtaaagaatgaagtggcagtgccttacagctccctctcctacatttctcactagagataacgacttttgagagtatagcttattctcagactaaagaacacacacactcacacacacacacacacacacacacacacacacacacacacacacacacacacgcgtgcgcgcgcgcacacacacactcctatgctgttctcagtcagtgtaataaatacatgaatcagagagcaccagtgtaaagttttctagtgcttgctctgctctttattgataagccatactcccagcagtctttctgcttatttgcttttaataagagattgcatagttaatcaacaaataccaaggcttttctagatttttctagaagaaactatgaagttaccgagagtagttaatagtagctatgtttggattattagatatatgcatacttacaaaattagacaattaccttgcttctggcttttagcctgccaaggtttattacgcatgacgtctctgtgataggggttcatttttatttgtttgacttaattttgagaaagatcattttcttttcagatgtaattgatctcactggagatgacaaagatgatcttcagagagcgattgccttgagtttggcggagtcaaacagggcattcagggagacgggcataaccgatgaagagcaggccatcagtaggtaaggacagtttgtgccaagcctgagtgtgtgactacttctatattccagaaaaaaagataaactttaactttaagatcaataagatatactttattctgaataaatcattaacatgtgcctgtgttctttctatgctttatataataaaacattatttggttatgaaactttaatttattttgtaattgtgaaacacataattttgtcacaaatttatttttttataatttttttcgttttcttctgtagttggttgaatctactttccagttcacttttagaaatgtagtaaatgagatgaggtttttgcttttttgtttttgcttttttttatttttttatgagccaatggtaaatattttgaacatatggtatgtaattatgttgggtagtgatactctttaatgcctctgtatgcatgtaagccatggtcatatgtatctgtgtgcggaggctaaaggccnnnnnnnnnnnnnnnnnnnnnnnnnnnnnnnnnnnnnnnnnnnnnnnnnnnnnnnnnnnnnnnnnnnnnnnnnnnnnnnnnnnnnnnnnnnnnnnnnnnnnnnnnnnnnnnnnnnnnnnnnnnnnnnnnnnnnnnnnnnnnnnnnnnnnnnnnnnnnnnnnnnnnnnnnnnnnnnnnnnnnnnnnnnnnnnnnnnnnnnnnnnnnnnnnnnnnnnnnnnnnnnnnnnnnnnnnnnatacgttataaaataaaaagttatacttgccaaaaaatgcaatgaaaagtgcacataaacttttgtttatattagcatatgaatatgaaactatctagaattttatatcccagatttttgtcctgaaaatgtctgcatgtttattgggttcatatttacattgcctccatgcaaatgcatattactaaggtatgctttttctttccacttggaatccctgctgcttctttacatgtttatttcatgaaaattttgagacagggtctgattgtgtatccaatgttgccttgaacttctccgacctctccttatgagtgtgtatatctgagtgacagtctctgtctgtctgtctgtctgtctatcacctatctatgtattggggaactgagggtgaaaaccatgtcactgagcatgtcagtacttcctcttaccaacgaaacgacgctatccttgcagcctctgtcagtgttttctaactaatacaatataatcttattgaagttacaaactgtttggctttgggatagttctaagaaaggggtgaatagacaatttcatcagaatgtgattacaaaaacctagatgtcatgtcttaggttaacaacagctccagcccttgatgcaggcaagagacaaacctgagacttccagtctgccagattactgtggcattcattttacagtatgccgtgtagtgagttgggatactttaaaatgatgggcatatagtagtagcatattgaaagtataaatgcggtgtcgtagatgctgagtgctgagagcatagttgctccagctgtctataattgcagttgctgtagttttaaggactggagtacagtaagtttgtttatactgtgtcatcacacaaacatgcctagtgttaggctgtaacacagtggttacaaggccactaggcaaaggaaatttcatctgcattgtactctcttagaaccacagtggcatatgtagactaatcttcaccacgtgtgtgtgtgtgtgtgtgtctgtgtctgtgtctgtgtttaggtaattgtgattatattgctagtctgattgagacattatatttgaatcttcttaggaaataatctttacttcacttgatgtattggttattgccactgccatgttcttaatcacgtccaacggctacttgagcaatgtcattatcacatatcacttcattgaacatattagagctgtgtaacaaatccatcgcatgctgctgctttgaggggtctgtaatagcatagctctttttcaacaccatgttttcatttcttaagagttcttgaagccagcatagcagaaaataaagcatgcttgaagagaacacctatagaagtttggagggattctcgaaacccctatgacagaaaaagacaagagaaagctccagtcggtctgaagaatgtcggcaacacctgctggtttagtgcagttattcaggtaagggtggagctctgactctcagtcagggggcctaaggagcgcctgaggggcggggtgggatgtttcttgttacatttcaagtagaaactcaggcagggttttcatagatgtggcataaagtagtttgattttagtatcccctagaccgtcttgtctttaaaattcccagtgtgtcttttgttgttgtcctttttttggtttgtgtttgtctttatttcctgttctttgttttagactggttcttgttctatagcgcagactagcctagaacataagacctgctacttcagctttggagtgccggggttataggtatgacatctggctaaagaaagatttcattgttttaaaaagatttttttttttaaatttaattttcaaacaagatctttctatttagcccaggctggcctcagtactgaggttacagggtgcatagcacaatacctgccatgaagtttccaatatgtacaacataagttatttccttccagttatataagattaatttctactggcttcttgctgttaggaattggtgcagttttattgattcccgaagaggtagaaagaagataatcttgttggtatatctattctgaaagtatagagaataattataaccaaggtaggaaattagagttaactttttgtgactcagatcagacttatttatatataagggaaatagtcatatttttacatgactacatatttacataattacaaattgattctttaaagagacattttgtttgaagctggtgttgatgtacaaatatatcactggacatatgcgagaattctaaaaagaataaacattgataaatcaagattaacacattttatttttaccttagaaaattcttgtggtatgttttattagctttctctaaaataggagatgtttgtaaatacacatacccattatcttctcaacaaggaataattttttgtaatatatttagtgtgatctctgatttccaactttttatgtagtaatgatgattgccataattctttcattctctgttggtataaatagtttaatttcaaatttaagtgactattctctagatattttgttaaatttcataagtttcataggagagttagaatggtttgatttactattcctaattagaatcattgggcctatgtgccctttggttttgatgctcaaaaagactattttgcagcttcctgagtctgttttgtttttatgattgcttcagcttgcacacggtgagtgtcagaagtatttcacatcgttcattttctgctagtttgtctgtcattgctaggcgactcatctgtgattttaatgtttgtttgtttgtttgtttgtttgtttgttttttcatttctacaaagtgtagtataggtttcatgccccaccccctttgcttgtggcacacgtgcaatttaggtagattccttttggttttctggacttaacgcctcattctcattgtgctggaatagacactgataaagaaaacggctcatcacttgcttttctaatgcattagcagtctaagaaatatctggatatctatgcatgtgtagcaattctttgaccgtaggctgcactctgaatttttcattcatgtgtgtccaaagcaatagttaacatttacttgatcctctggagtcctgtagacattacaagctgtttaggataagctagtctttagagatggcttctcttctcctgtctagcagtggcatagtttagaagaacagatgtaaagctgtggtctgagtgttcctgaaagtgctggcctgccggcatgccttctacacagcactgtgcgcactaatgctcgtgactccgtggtcaggccattttcactgagacggtcaaggagaggaagtcctccaagcagcattcgttagctagataaatgctgttcacttctgacaatattcatggaaatttccatttattcccatttgaagtaataaattaacagagacaaggaaactctatctttcctattctttttctatttcagtttaatgtgacaaagaaaccatccacctaccctaagttcactagatgaccaaggttatgtgtgtgtttaaaaagtgactcatttttccttcatagaaagtagtaattttattagttttaatattttatttaagtttagtagtgactatacccacgatagcaaatttagctacttaagaatatttgatttctctagcagaagcctaaactccccatacagataattttctaccttgagaaggttaggttgtcacaacctaataaaagtgacttttaggaaaaatataaatcttcacactggaaatctgtgtagggagttaattccacaagttcacataaagttgtatttttaactgtattttcaatgttcaccattattttgaggggctttttattttgatgtttaggaattttaatctttaatttttctttttctgatattgcttaattcttaggtgtgagctgagatgtaattccttacttataaatataactctcagttaaaattgcctccactgacattcaaagctctaattggaatttacaaagtccgtgggaattccttcaaactgataagtgctccgcagtttcagttcccaacatctcagggttggagctcactcagcttgcagttatgtgagaggatgaaggtggatgtgtccctgctgcagctcagcacacagcagccgctgcttcccgggtgataggccctttaacaggctaggagaaggaaccggccagcttcaagtctttccttaggaaatgtttataaaatggagagaacgcagtttcttttacacccactccaaaggaagttcaaagcacagcactggggttctcattgttctttggcagtgtcctcacaattccgcacgagtggttcatacctccaccttaagcttttccatagcgttcttcttctactgtttctcaagaccgccatcttggtgtccccttagacagagcgtgctatcattccaaatctctctactcttgaactgtcccagcaagttcctgtaccggtcttccactctgtttgcggaaggtcccgatgctcgatgctcgcccttttctccttggatgtcctgcacatctgaaagcttggctttcccgttttccccttgctgcttcattgccttactcttgctactacacccaaaacctttttatttgtttaaactctggcgttaaacttcttcctttctgcttcggttctgacctgaggctcttttcctttcctctctgatccatgcgcctcctgtcacccatttagtccacagttgcatggtgatccacctcatgtaagacgaggtgcccttccttctttgccctgtagcactcataaagccatgggtattctgtaagtatttattaaatgtatggaaaaacaacataggcacaatgctcctgggctcccatttttttcaatggtccactcagacgaatcattagagtttagtacttagagccatcctgggtggcatgcaagaccccttttcagaggaacaaaaataacaagaatagaaaatgaattattttatgtgctcataatatgtaattaaaacatcttggctggaagctgggggatggtggctcatgcccttaattctagcactgggaggcagaggcaggcagatctgttgaggtcaaggccactctcttggctataattagagttccaggacagctagggctatacagtaaaaaaaaaaaaaaaaaaaaaaaaaaaaaaatcaaaaccaaagcaaaacagaacagcaataaaccaaaaaaaccacacacaacaataacacaacttgcctgggcattggttgtacagggctttatctcagcactcaggaggcagaaacgcgtggatctctttgaattcaaatgcagcctgtctcagaccagcctgggctatgcagtacaaacttccacaaaacaaaaacaaacaaagaaccaaggaaagaggagtgaggttgcaagttgtgacagatccacagatcccgtctggtgtcccataggctctgctggaaagtgctttcggcccttcgtcccaggcttcccagggcttctatttgcccaactcctggtttttctttcattctgttgttgtttttgttgtgttttgttttatttttgtctttatgtttttacgcaagtggtgaaccaggtttaccaaaatttatctacttaaaataatttgtaatcattgatttgtgatgctacttttatgctctataaagtaatccaatttatatctcctaaaagttaatacattgttgctgatcgtgtcagtttatatgctgtatcaaatgtgactcagaaagaagtacacttacactgtattccctgaaactctcattcaaaattattttttaaatgagaatattattttagaatatataaagaagacttttctcatgaaaaaagacatccttgtgctaattgcaacagatctttttataagtagtagaattgtcaagaatgagccttgagaacattgatattcacaattccattaatagaatttttctcttaggtatcttaaattgttctttttcagtcattattcaatcttttggagtttagaagattagttctgaattacaagcctccatcaaatgctcaagatttaccccgaaaccaaaaggtaaaattataaaagattttaaaagctaagtgttacggtcctcatgctcttttctaagtattttggaagatcttctttattaaatctgaaactgttcacattttcatgttatgccatttatctccattacattaacttcctatccccttttctgtatcatgaatgtgaagcgtctcctcctgtgtgtcacagtagcacagcagttccagatgctcaggttaggaccccttcgctttcaggctgtcaaatgagaagacattcagaggtgacctgctccaatctaggtctttccttaattgactcctcagtcctctcatcagcatcagcgtttcttttcacctcatcatccagaaccatcctttgaaccggggttgtgtgctctttgccagggcacaggtatccctcgtgaatgggaaggtagtgttgagcagctgaggctgactaagagagcagactccagggtctgattgcttgggctttagctatggccctaaagcaagtcaggctacttttctgggagctccttctctgtagcgttgacagtaacaacagaggcgctgagcacattaatcaagaaacatgtgaagcacttacaatttgtcagccatttgttaagaaagttttaattttataaatttaattttaataaaaattggactgatttgtatgcatacattcctacttaatgagtaaaaaccttgtgtagggggttgatttagtttggtgcaggtatcaggtaacctccagtgaggagccttaacgacaccggctctagagacaaaggagatgaagttttaggtttcagtgatgtaatgaactttgtgtgacccgttgttacagtgataaattatttagttacattttccttttagtgtttaatttttaaaaccatttatttctgcaaatacatggaatatttataatgcacaccagaggacagaaagcctgaggtgaggccagctgttaagctgtaatttctgggtcggcgcaggccaaagaacaactgctttttaaaggggaaccagaacggtttgtcaggtccattctactagagaactgaagcaaagctcttcaagtgttaatagctttgaagggaactcttggactgctgcctgtccgtatcacgttagtctcatccattctcccttctcgagtcccggtagaaggcgtgcataatttatatatcattagttagaattacttgcaactgtagatgtgtgtgtgtgtgtgatgtttaccttttatttctttcattttactgtgatgtggaacttcagtctcttatttttcagtttgaataaaaccaagcacactaggtaacttgatttaaaagctaggcattcttagtgtttctatagcagaggtcttttgggccactcagcacatgctatgggcatgcggcctgagcacacgctacacgagtgtgaaggagcccatctgagagaagtttatttcttgcagtggaaggagagttacagtttccattctttgaaacacgcttatgcagaaaaccagtgtcaaaattatggtgaattgtcagtcatagatttatgttaacttaatttgagataatgaaagatatttttttgctttaaaggtttccatataacattagccattttctttaaatagtgaatttgcattgaccacatgacaggttgatattacattgaacctaaagaccaatttgttaaaatacagaatatacctgggattggtttaatcttattacagagatatcattaatatgcactggtaaaatgatctttttaagaaaataaagcttcctacaaactttgtgtacattttaaataagagacaggattcattaagagtcagttcatattttagataaaggttagaatagatttgtatactgttactttagctgttgataagtttccggtatagaatacttggtatctgaaaattgatggatcgtcgtctcacatagagaaagtctttgagctgacaatatcccaaggccccaaagttttttttataatagaatgaaagtgtgtgtcttcacaagaattttcacattattttaagcagcagctaaacagcatcttgggtaaaattgtatttaaacttcagagcaacaccactggcttgtgctagctcacacacaatacaagcctgtttacaaaagtaaataaaaagagtgttgaactttttatgtgtgcttggtttttcataatttagtcaattatattgtgtgatgtgatgccttttgatagtcagatttttctagctgcagttatgggctgagacaaatgtttcataatattttactttccaaataatcttggcaggatgtcttttgattaataaaatgttgcttccatccatatactttataagggttgccttcatttgtcataggtggaatgataatggagaagtcaagaaacagggtattctgggaaattattgggtagattaaattttatagtatttatacttttaaaagttaacttatatagtgcagttgttgaaagagttaaaagtaatacaggaagctggattaagttttcatgtgcgcgtgttgccttttattactgctgatggaacgaacatactatatttaagtacgtgttatttgcagttctttataggtcagaaatggtatttcagcattagtgattagcactatgtgagaatgcttcagtggtgtgtatagtttggagattaagtaaatctttgaatttctacttgtttctcaggactcccctcgtagtgcattgagagaacaatggtttctatgtaggttttattactctgactgtcagttatataaaattatctatgttgatattgttaaagaaataccaattatgcaaactaaaaaccttcccatatttaatagtattttaagatttatcctaaacttactgttataaaaactattattatgagagctgaatttctgccctgaagcattaataaaatcatttcaagaatggtttccttttttttgttttgctttaaaataaatactgactaaaagctttttgtcccagaaggtttgatgtaaccaaccagttagagttgggaacctgctttgtgtggaaaaaaaaaaaaaaaagaaaaggaaagaaaagatatattgaaatcatcgagaagtgtgtaatcataatgagaataaaattaagatttcaagttcgggtttgatctggctaatgcttttgctaacattatacgtgctaaacatttaaattgaaaaaaaatgcagtaattaaaatacatttactctaaatcttataatttccaaaataaatctataaaataattttattaataaatctaaaatagtatatataaataggtattcgtatttattaggacattacataaggactagacagagccttaacactagttcagtgatcagggtcattgtatgactagtggaggttggtcgtcctttttagagcactagttccatgcaatgtgtttggaggctctgctgcctggcgagtctggagcgctccagcatgagcagggtcctttgtttcagtgggattcctggagcccagagctcagggctcagatggtgcctggtgtgctgagctctctctgaacactgacacactcttcttgtccccttgtcagaagcagctgcaccctgatgaatggaagagtctaaagagcagacctaaatgaggtggatattcttggctgcgtagtgacataattcgctatgaatatgtgacatttatgcagaaattgtgaggctagcttgaggtcctctgtcatagctctttgaggtttgtcgctgatagtttttttttaatgagacagagggcctaataggtgccctttaacttcccgcctcctgttgaagtattggttgatgagtggagagtttgctgtttttattgggttgcttttcatttcttcttttttcttccttctgcaggaacatcggaatttgccttttatgcgggaactgaggtatctgtttgcacttcttgttggtaccaagaggaagtatgttgatccgtccagagcagttgagattctgaaggatgccttcaaatccaatgactcacagcaggtagcttcctggctcttcctgttttcacgtaaccttataaatcttcgtcctcttttccaagggtgtcggctgagttaggatggcattactaaactttaacttgaagccattgaatcattgttttattattgggggaaaaatctaaattaagcaaagagtgaacaaattggaggtaataagataagtgtatgggagccgggcagtggtggtgcacgcctttaatcctagcacctgggaggcagaggcaggcagatttctgagttcgaggccagcctggttcagagtgaagttccagaacagccaggactacacagagaaaccttgtctcgaaaaaataaataaataaataaataaataaataaataagtgcatgggtaatttgtagaatgatgggagttgatgaggaaaactaatgaacaaaattaagaatattcatataattaaaaattagttaaaattttatgtgacaggagtttgtgttgcatgtgttctgtgtgtctggaggctagaggtgcactgggtctcctggatccttacagatggttcagagccactgtgtaagtgttgggaatcgaatctgggtcctctgcaagagtagagagtactcaacttctgagtcatctctccagttccataagtagcaagttaaacaaacttgtaataatctagatgtaataatctacaattatatatgattttcttgaccctgatttagctaatagagagtagttttctttaattacctataaaagatttttctttgaaaatactgctttatttttcttgtttttaatggtaatatcatagtccctttttattaacatttggtataaacaatgtttgagatttttttcttctaaaatacaatcagtataaactagcattgctaattgaagagtctcagagaccaagaacacaagtaggagcacacatcgttgtagaaaagaataaatattgaaaaagatgatagcactcaagtgctccaatgagtaccgcgttctgcctggaagtagtgaggctcctctgtgcctgggggtagtgaggtcccgccctgcctgggggtagtgaggctccgccctgcctgagggtagtgaggccccgccctgcctgggggtagtgaggctccgccctgcctgggggtagtgaggctttgccctgcctgggggggagggggggggagagtagtgagctttgttacttgggttcatgaaatggaagtttagagcaggattcatgaaaaataatgtgtttattaccgttttcttttttgtttttaaatttttaccttgtatataaaatatatgcggacacagaacattttcaattgtgctgtttcctcttaaaaattttctccaaacagccaagtgctctaagtattttccaaaccctttggtaggaacaaacttatttcttcttactacagcaatactaacacaagctaaaataattagaatagtattccccgattcccaaactgccagttttagaacagtacttctgcttccagatgtcttgtcttcatttacccatttctaacttatttctctagccttctctttgggaatggatggcagtcctttctagttgctgctctgtgtacaaattaattttgcccaagctcactaccgttctttgccaggttttcttctatatgctttcgaaatttactttttttctgctttctacagaagcctcccatctttttgtcggttaccacttaaaggtggaacagaggtggagctctttctggataggcaaagtcctcaagaagatggcttgggctttgctgctctgtgcttgtaaatgctatagtgtgtgtgaatgcctttcctttgggtgtatagaatagttgtatggttgttgctttttttttttccctagaggtctttaaaagtagatgcttaccagttactttggtataggtgtgattttctgacattcacattagtgagtggataaaatatgtacttatattattaatattatgattagtttttaattaccttggacttgttttacattctcccagaatatgacatgtctggaatggtgacccagtcttaagggcgtgtctttgatgagtgggtttctgtgaattgtacccattgtcccttctctgcagctgacaatgctttatgacagcgaagacctcacttgtttatcagaaggaactttgctaaacctttgtaactgttactgtaattgtaaattttagattgattacataaaagtacagggaataattctttgcaagactcacaataaatagaaaatggtggttctttttagctacaatcttcaagattaaaattgtttaaaaaggtgaacatttacaaatcaatttaaatctctaggctcaggaacaatgggaaatgatttgcagacccagaggtcatgggcttggagttaaaatgcttaccagagccgtgctctcagacacagtgtcctccctgcctctggtcctgttctggtattcttggcccaaaaaggctagttttgatctctgtctatactcaagtgtgtccttgtttctcttgttctgtgccccacatagatggccatccttggattgggggtcacttaaatctgagcttaagtcaccatgaggtgaattttgcaaagccccataatcagttaaagtcactttttgaggttctaagtgagtaaaatgttcttttgctgccatttttctcaaggagatacaactagatttttgtcctgacattagtcttgtttgactatataacactagagtgttaagagcaacacttcctagaccttaagagcaacacttcctagaccttaagagcaacacttagtaggtgaaagaaagtgttcatttcattgattcatgtcagagtatataactaattatttttataaactcatttgttacatttgagtgtgtgtatttcctaaaacagaaccttgtggttataatactgtgtcctggttaaattatggaaatgcattgcattttatgagacagccacatgactttcctgaggcgtgactacctggaagtgttcatttacagcctctaggatctttgctagtaggatcaagtaccaatcaacctttttttctttccacagcaagatgtgagtgagtttacacacaagttattggactggttggaagatgccttccaaatgaaagctgaagaggaaacgtaagtcactgatgtttacggatggtgaagtgagtaagcgacagtcgttttcttctcttggtacggtacaaatgtgcaaccgagagagacttttgggagtcccagtattatctgtattattaaaaggctgtttagaagccgcggtaacaagtttcaggtggctgtcagtttctactgtcaggcttgatgtaagatttaaaactcaactcccgaaagtactaatcttgcagccttgtgtttttcctgcattcgggatttcttgagggagaaggggttagttgggcataaatttaaaaatattttacttcatattaagtcctttctgtgaccccgaggacaggatgaacaattccacctccagaatcctgttgttcattcgtcatgtaagcacaaagccttggctgttttgtgtgtgtggggactaggaccggtcagtgggatgttggtgctcaggtttgtgtgtgtatggggactaggaccggtcagtgggatgttggtgctcaggcgccattcacttactttcagaaaggaagatttctcatcagcttggagtttgctgagcctcctgcggccacactcctgatcttttatgtgtttttctatgatttttttcttttaagattttttatgcttatttaatgtgtatgagtgctttgtctgcatgtatgtatgtgtagcacatatgtctgcctgcctgtagaggccagaggaaggtatcagattccctggaattagagtctgaggtggtttgtagtagccgggtgcattctaggaactaaatctaggctctctgcaagggcagcaggcactgctatctctccagctccatctttgtgtattcgcttacacaaccacttagactgctactcaaaggctctctcatgagatctgcagcatgctttaaacaatacgtagaacgcaggtggaaatgctaggctcaaaatattaccttccttccattcttccgaaaataactgccttctattaatttgttttgtttaaactttttcagcctcatgttaccatggtttgcagtgaacttaaattgtttgaaatatctcattgatcttttaaggaaaaactcaaaggagttatacccggaaatttaagactgaataatttaaataatccatttagattacgttgccttgtgtatacaaatcaattaataatactaaaagcaaggtcccagccctttagtgtccgtgggctccatggtaacctcacctgcagcggtggacggccacttagacacctgtgatgctctagcggtgctgatgctgcgcggaggatgctttgttttcgatttcagaagttgacgagggcacatccacagtgagcaccagcacagagccttcgacatttactcaatttaatgtaattctaccttaagttgttttcagagtaatggcagaaatgtagggtgaagcataagctaaaaaaacccctaatggttttggttctgcagaatggcagcaagtaacagtgcgttgcttgcagaccactgtctgttaatggaaagcaagctcagagaaacttatccagagtttaattaaacttcagggccaagtttaatcagaagcttcctactgctgtaggtagtgattaactgggcagtgtgttaggacttagagataatgaagttctcagcactaagtgggagagctataccactcttcaaggttcatttcacagcatagaaggaagaggtccagagaatgagagatgctcagcacaaaaggcactttcttacacagcagagcctttgcacccaagaactcaaggtagctgtttatctgtacaaggttgggcccatcaacatttcattgtggatttgctgtgggaattgagggactttgggcacttaacatttgttagggacagggcatcattttcttcactgtagcatctgctaatttgctttcttcaataaataacctcttagtcatgctctggcaggaaactgtagttatccacaggggctcacacacagaaacatgccttgaatgttggaagtgacctaagtgagaagtgaaaaagtaaaattcattatataagtacataaaattataaaaaattgaaattaaaaaggaaatagtcaatatttgtatttctaataaaaacatacaaccaattaaaataaagaagtaaaattaacttaccaccaaatatgtagtatttgatggaaaaaattaaacattttgcaaactgtttcaggtataggcatttgaaagctgctttctttttggtgtgtgtagaagtgtaagacactgactaccctgtcgtcaggtgtccctttctgcccatccagactcttagtgtgcatttttcttctgaggtcatttgacgctgagatcatcagaacacagctgaacagattgtaagaacccctttctgactgagactgtctctcggaatgtgttctgctacgtaactgctaagacctgtagacagactcgtttctgttttagcttcatcttagctatgcatccaaatcttcctatgaaagttcagcactgaatctgctcttgatgtttctgagacctaagacctagcatccagtggagataatgcctttgcagtacgattctggacttactttggggtgtcccaagtcttgaatatatttcttaatgctgtatctttttttttctaagtgacttatgtgtatgaatgttttaaatgaatgtatgcatataccgtgtaaaggcccaatgcctgtgtaggccaaaagacattgttgaaatcctgaggcttgagttgcaggttgttgttagattctatgaggatgctgggaagcaaacctatggcttctataggaacagaagaagcattcttaaacactgagccatcttcagcctcttgatgttgcatcttttgaagtgtcatatacctgtgtgtgtgtgtttgtgtgtgtctgtcccattccttctcttaggaccttatgatggttagttttaaagttcaacccaaaacaacttagattctgctaaggagagcaccttgactgaagaagtatctagagcagttgctgtgtgagcaggtgtggggatctcttattcatcaaggtgggaaaatctaccctgaatgtgggcagcaccatagcatggactgagccctagttgtgtaacagtgaagaaagctagctaatgtaaacgggcacatgagggcagtaggttttctgtggatatgatgggagcagctatatgaagctcctgccttggtcactattctgaaatgttgggctgttactcaggattataagccaaatcaagtttttctcccattctcataagctgctttttggtctgggtattttatcacatcaacagaaatgaacataacataaaacagaaggcttgagttaaattgtagtgttttagatatcgtcttcctgtttgtttactctttgccttttacatttgctgtcgttcaaatgtcttcctctggtgacaccttgattggttccttgaagggaagattagtgaaagctgagttggcttctctgtattgtccctcattcttgtttcattctttgtccagtcatgtcctggaatagatgggctggtccatcagatcatggtgttcccaagtgtgagatcattccatgcccatgttccctcagagtttgtttctgtcttaggaaatcttatgtttcttgccctgtaagctagccttccaatgccccaaagtagttgaatataaagttaactgagttgagcagtcactgaacctcattgtaaaccattgctcttggaggttctctgtactatgatgcctaccctgaacgtcccagttttcctctcaggtaaccatcatagaacatatctgaaagcacgctgcttgatcacctttcatctattataaccttctaccttccactgtccagtttgcttaaccattcttttgcctactaaatttttattacatttttttgatcctactcatggtttctaaactaatgtccaagtttgtcttttttctaaaacgttcagaaaacaggtttttttcccctcccagtttcttgtttacatcttaaattttattggaaatatatcctcatttccttttgagtagtttaaaattctttctggtgatgttaacctgatttgagatgctttgctgtgcccatcatgaagaacattctctgtttttgccaataaagccagcttttaagtacatagaggagtgatcctgtttctcctttgatgagaaactaacctattctcccacaattctacatacattatctttgaggcagaggccacaaacacttagcaagatactcaccagagcttcccaaccattgactcacctgctctagaacatggtgttcttctgtggtagcctctctgttatagcgtcattcattctccaatgatagtcttagtgttttctccagccaagtttcttttccctttgcctttggtagtaagttttatttcctcgaccttcctactttgtattccttcttggtttcctttcagttgtgtttctcctgtttctactgaagtgagcacagtctgaggtcctttatctgaggcttagagtaaagagcatctgggaggatgtgacgaagaccacagtagagaatttctgaaatcccataccagggaaagccgtggaatccttcagtgcagagcatggcagaattcacacacacagtttggaacaagtaataagcattcagaattagtatagccattcactcctagctacttctgcaaaattatgaagtcaaagtcatcagataggtcattactctttctaagaggtaatttgtgtgactggaaaggagagaggcctagaatattgattttctacatgaaaatggctatgcatgttagtaattatatccaaagagtcagagttttttattttaaaatattttcttctgtgtcaaatcagtctccagaaactttgattgccacacttcaaatatttattataaaggtgtctagagagtaagtcattgtggtatataaacacctctagtttatcagctgttagctggtggggctatataattgtgtgggtgacaactaccaaactaatgacttctattattccctttcatgcccccagtatgtaagtcagagtccttactctacttattcagggctgcagagcaacagaaacctctgctaggcataagttcaccatgtcaacctggcagtgaaaattaacactaactctcaagatttctgcccagcaaggtctcttgccacatttgcctccattgtattggtgaaagcaagttatataacatgccttgttgtggattgcatcagaccacttctcacccttgtggcagctgaaataaatgataccaagcaatgtggcgtcagggtctttgtacaatgttgatataagaaatcgtatagcaggccaagagcatactgtgatagttctctaaaagattaaaagaagagtctaaatctgcatcttaacttgtaggcatgtgtactaataagttgaaaacagagtctgaagaagtatttgtatacccatgctacaaaagttgtttacccattggccaaatctccactgattaagtgaacaaaatggtgtattatccagcttccagtaaaaggaatattctgatgcttcacgggtgggccttgaagtcacattaagtgaagttaaattaatcatggaacagacaaataccaggtcatttacatatgaggcatcaagttgtcaccctcagacacagaagcacatagaggatgggattgcagtgaggcctgagggagtgagccttacatgggtctaaggatcttgtgatgacatgtgtcacacgtggagcaagaacctgatggttgtttctctcattgaaagtagagcttcacaagccagtttgattaatttaaacacaaatttaaaatttcatatagttgtgagtacatctcaatattttatatagaccaggaaaatagcgtcttttaaagatgcttactataggtactaaaagataatgtaaagactgctggtcttcaaacaagtagggaactatctcatgcggggcagcttgggacaactgtctgaccgtagaaagggacacccacactgtggtcctctgcttcagagtcacggcattaggttcctcactggtgacagttgctgctgcagtttctatgacttctctatgtaaatgtggggaaagacttagctccttttccagaaacctctttggattaagcaatctcttctcttcccagtacggccagtgccatagaggcctgaacgtctgagatggaaatagacagcgataacaggatgagcagagctggtttctcttctgtgctggtcccctgcagtaactcattcagctctcatatctatcctgtgccctcaatgactgtaattatccttagctgacaggtgaagacactgaagaatacatttaggagctgtgcccagggtgacacagtaaatagcagagctgtgtgcatgatagccatgcaaatgacatcatcttgccatatattgttccatgtaatggttactttgatgcattcccaattatttagagatctgaaagtgataagcatcgttctatcttttacacctgctttagggatgaagagaagccaaagaaccctatggtagagctgttctatggaagattcctagccatgggagtgcttgaaggtaaagtcacccgtttgctttcattacaagtcaggatgtttcctcttgggtcttctgtatttgcctgtgtgtactgctgctctttatctttaactgggtctactctcctagtagctgctgcttcattaacatccctgcaaagcatccttggcacttgggcatttggaggatgtcactcctggtgacctgacttttgctcctctcaggccttttccgttcgcactccccttacctcctgctgtccattaagatcactcgtacagacccctaattctgcctttcgcccacctctctgactgttgtgaaactcttccctgcccctctcctgatactgagtacctgagtgttgctgagttcacaaaaggatagttgtaatgctttgtgtgtaagaactctgaaccatgaggagaaggaaggagctctatgtacctgcgctacaaaactgcaaaactatagtctgttctccagttctctctctctctctctctctctctctctctctctcagagggattttcatggaattattttgaagcctgcaatgtctacccaacactctgtattgaattccaacatcttaatttctttttagaagaatgtaattccctctgtatgtgagcagcagatttcattagctctatccatgcactccttcaccacattctttccatctttccctttaggacctaagaatgcggaagggccatcccttcctgctcttagagtctgggcctcatggtcttacgtagctttagttcattcccttccctttctgagcccttaacttctttctctcccttgtagtccacctcagtgtttctatgtgttctgctacttcatattacagaaagtaaaaagataagcactaattcattcctaataaaaagtgtgtatgccccttgtagtgaggacatggtttcacttgattgctctatatattttacacaccttggtttagtagctggctccatgattcagacaaaggtagatcttgagaagttattgatttttctacctatgagcaaactcattaaatccagtttagttcttatcgatctattaatgcattagggattgactctttctcctcttatttatcttgcctcttcctgaaaaagaaagttctctggcctcaatacattcattttagaaagtgtgtgtgtgtgtgtgtgtgtgtgtgtgtgtgtgtgtgtgtgtgtgtgtgtatacacagccatgcatgcttgtgcatgtttcttattgtatgtgaaggtgggtttctcagggcttcatctgatctccctttcttttctacagttccctaggcagtcatattccccactgggatattgcactactaggaagcaaggagttagggaagagtcatcctcaactcttgaaatggaaatctcctgatcactctgaatcagtgacttttactgctgcacaacagtgagggaaagtagtcctagactcatgtgttcagtccctagaaaccatgcattgtccatgggagccatatggaactctctaatcttcaatttcatgttacgctgtttgcatcctgcatataacccagctacgtagccctgtccatgctccattttatgtgtgtctgtgtgtgtgtatgtatgtatatatattatatagtgtgtttgtgtgtgtgtgtgtgtgtgtgtgtgtgtgtgtgtttctaccaaagccagcttccgggcttctgagtccataccttcatggatatgattgttctgtaagaaaatataagcaagactgaaagacattataaatcttgccctccccacctgactacatcacatctccaagatgtgcttagctttctttggttccttaaacatgccaagttttggagtcttaatattatgactttgctgttccttagccaagaagagtccacagcccaacaacctggcctagttaccttctactcactcttcaagttcaaatctccgtttaaatgtcaacttcctgtgggagtttttactgccctactgtctgttcctaacagtatgttagctcttttattctctcatccataaccattgtcgtactgaatcatcagttggcttatggcaaatggatgttgtgatgtcttcccgtgaggctcaactacacacctacccacacacccatgcacatacacacatttatgtgtgcatataaacacacatacagtgttagcacaatgtcttatctttagagcttatatacatatgagttataattactgtctgtggctaggtttgaaggaatccacatacattatatgttatgccagtggaaagctctactaacccattatcacacatgcataaaaatgcatgcatgttactctctctctctctctctccctctccctgtgtgtgtggaggtaggaaagttttactcacccattattctctggagcaccatcactggtactctttcaggtttgggaaagaatccatatatctcatatatatacatttactttttgtaattgaaaagctaagttgaagaacattaattaacttctcccaccatcttataggaaaaaaatttgagaacactgaaatgttcggtcagtatccacttcaggtgaacgggttcaaagacctgcatgagtgcctggaggccgccatgatcgaaggggagatcgaatccttacactccgataactcaggaaagtcaggccaggaggtgagtgctccgtgtctatcctcctcctccttcctgttctcttttccatggcctaatgcaagtataaggttctgatcacatagctgggaatgacggacagaatactcaaaaatgtatttgcatttaattatagtaatctaagacatatttgtgaaacttgtatagaatatctgatatataatttatgttagattttaatctcaaaatttttaatctcctctttactctttgtctctttgtctatcttcaggacatcgtttcatgttttatgatttcccattaaggtagtggtcattagcagcatggtagttaacttaaaatggaaataacctggttagtttttacctaagcacatgttcgctcgcaatcacatgttcctgggatttgtctgcttctgtagagcaagccaggctcctacaaagcacacatgtctgttcttaggagattgctatttgattgcataaggtacaatggaagatcctactttttttgtgaaagaactgactttaatacaccccaaacctgtttatctacattgctgatttaatttccaaagccaagagtttccttctctctttgatagcatccatgtatcaatccatgtgcatccagctgttggagaaggcgcacactactgtagagaccagcacagatcattgtcttccaaatcagtcactgtgaagcgattgctgactgacatctggacatacgctccatgtagcaggatatataaatcttcagtgttatttcctgttacatttttagtggataggacagggacaactgcaaattgaatgacatagtttatataagatttctcagactctagcaaaacaatttgcagtgattgatcagccgcttaagaagtacaaagtgatactgagctgttggtgcatgcttttaatccccatattacaaaggatgaggcagaaagatcactagttcaaggctagcttggggtccatgcagggttcaagacagcctggtctttgagaccttttgaccacttctccttcccatacccaacccccaaagaagcattacatgataatgttaatttatattaatgagaaattgacacttgtttctttgggaataaattaatatattgtgctgaaaaatattctatttatatgctactatacttaaaatactaatagttcagggctaggtacacaactaatgattccttaaagtgaatttaggaaatgtctttatatattattttattattattattattattattattaattatttaatcttgtccccatgagctgtagacagagataatgaaatcttttcacctaatagtagaacagaagtggctgttgctgatagagaaaatgcattcccaatgcaggcctgctacctaatgttctgtgagcatcctttcgtgagttacagaaactgtgcggaagactccttatcatagttcgggtcacctcacttttctcagccactgtaggttctcatcaattaaaatgtgtctcacattagttgtaaagatgatatttaacgtattgaggtaaaataaggaagtaactcttctaaaactctttttgcctgtttgattatcacaaaatggtgcagggactattatcctaaggaatcaatcagaggtttgtttatgagatatcagagacaatgttttaatttttatctaactttagatatggtaaagaagtatagggtaggggcgggagagatgtctgaaaagaaaggagcatgcgcccctcttccagttgtgagttcagtgccaggctcccacgtcaggagactccatctccagggactcaatccaggattttctgatggaccataggccccatgtcagacacagacatggacaaagacatgaacagggtcaaagacacagacacacgcacataattaaaaatgaaaataagtcttgaaaaagaactatgccacatgctatcatgtgacttttctcgtttgcatctttagatgcttattatattaggttttgttgactcttataaatcatgtttcttatagtttaactgggacaatcttactcatgttcaatttaacccctgcttagccagtaatccttagtgtttggggaggaataaagagccacacctcagcacttagctttagcagcttcactggaagacaggtgccatcgtcaagattccagcccatcccattttcctcagcctgcaatgtttattcctggttttggttcaggttacgtttgtgcgcagtcactgagggatgtgtggtaccagtttttggcactgaaagctatgatacctgtaacatgggattaatagtatcttgttgcaggacttataaatacttaaaaatatttatgattttacacctctgaacttgttggcttttgaatgtatatattcaacctttaaaacaaatagcatccttttgtaaaacttgaacttgttacataaaaacaagctttttgaaaatgttaaatttcgtggttcactaaacaactgtgtgtgtggcgtgagtgggtaggacacactcagagcaataagaaatttaactcattgattgctagtttatatttgaaagcttttacaagtataaactttgttgctgagaaatctttatcatacattaatataatatatagttgtaagattcaaggtaaaagtaggaagaaaaaagagagagaaagggaagataacattttccaattttaggatgagaacagtgcgcatttgttccagacaaagatttgtttccctttgagtcaagtcttcggtttgacaatctgtttggtttcagtaagtgtcactcagcctgcgacagaaggtgaaggagctctgaagtccttccctcctagggagaatttggaatgttacaactgtggacgattagcagtgtgtagataaggtttccctctgtcctctgatgtggacaaaggctatggggacgtcaggctgaagttcagctgtaaggaaaccatcatagtccctctgcttgctgtagtacagtaacgtcagcaccaggatcatttaccgaccttaaaattgtgatggtgaaatctaacaggctgaccaagtgtctgttattgtttctttcagcattggttcactgaattgccgccggtattaacatttgaactgtcaagatttgaatttaaccaggcattgggaagaccagaaaaaattcacaataaactagaatttccccaagttttatatctggacaggtacggtttgtacaagtagtaggtttgtgaaaattgttatttccttgaagctaaggtttattgatgcttgatatttccatcttattatctgttaagggagtatattcattttatcttataaatatatagtaataaatattaagtattaaaatatttttgtgttttatacctgatatcttaaaaaacttcagttgaccttttgtagtaatagttagatttattatcatactagtttccaagatatttggtaacactaatgatggccttttttttttccttaataggtatatgcacagaaatagagaaataacaagaattaaacgtgaagagatcaagagacttaaagattacctcacagtattacaacaaagattagagaggtaattcagccttcatgggcttaagacaggaaggcatgtgcctggtggctaactcgattattaattttcaacatgctttgggtaacttataatgtaacctattataagcatatactatattataatattataagcttataattcattccggattgaattttgattaattacattagactctagattgcatccctactaggctgtagatgattatcttagaaattgaaatgaaagacgtgattatcaccagcttgttttcctggtgcggtaagtggaagtcaggaggctagcgcagagcacggggtgaactggaccgagaggattcgaactcttcccgcccaagcctcccaagcttcacacagtgaatccttcaggaagaagccgggcagcaaagggaggttgcgcagctcatagaagtgtgcatggcgtgagtgggtgctatcacataccagaagggaggggctgagtgtgcctatgctctcacaagtcacagctccatcagatgtggaatgtgatgccatgcaggccggataagcctacaggctgcaatgcagtttgactaaccccagttgtcgacctacaactttctgagttacgtttaatttgctcattaataacatacaatgttgagtgtgaacatgtacttccagggagcttacatcttaataagttccagtacatgtatggaaagtgttcacggggtaaaagatgataaaagtgaggaccttaaccatgaggctagtgcaggattcagagatgagaatgtttgcacatggtcctgggtttgttttcccacgggggcagtttagaacaccgtcttaggtgcggccatacataggacttgcaattttcatcagctttgccgtccttccatttctcaagtgtatattcagtttcaccttctttattagaaaagcaaagtcttattttataaggcttcaagccacaaattattttgacaatataggtaaaacgtgtatattttattaatagatatttaagctatggttccggtcccaaaagattcccattggtagatgttctacagtatgcattggagtttgcctccagtaaacctgtgtgcacttcccccgttgatgacatcgatgctagttcctcagcaagtggccccctaccatcacagtccttaccaaggtaagtgagtcacccttgctccttattcctcatcaattcaggaggtcttgtctatctgttggaatctttatatatttttcgctggtcagaattatacttttcaatgttttggtttgtagtttctgaacgtcatataatatgttgatgatgcttttagagtagaatttgtttctgataatgcaagttggtattagagagagaaagagagacagagagagagagagagagagagagatctttagttagaatatgcattagattttccattacaaagaagaaggcagtcttactttaaagccacgatttcgtccttataagattttagtcctcttgtactaaacgtctcgtctgatatttgatcagtttgtgtgtttcttaagatcatttcctcttgagattgtgaggggcttggatgctatcatctatagagctggcttcagtttggaagtttaaccagtcgcatgtgtgctttgaaaccacagcacaacagaacagcagggaccctgtgcttcagatctgcccggctcctcctcacccgcatcaggtgccgccctgcccttgaggtcagtgattcacaaacccttcactcagtctcggatacctccagatttgcccatgcatccggcaccaaggcacatcacagaggaagaactgtgcgtgctggagagctgtttacatcgctggaggacggaaatagaaaatgacacgcgaggtaagaagctcgctgagtgtggctgctgtcgcttcagatgatgttgtactctgagaaggaaaaatggcttggatttcatttttaaacatgtgtagtttttccttgaaaaaaaaaatcttttctgaaaagattttgtggaagacactgttttttggctgtcccattttttaatttttttatgttcttgcccttcgtgtcagattcacagggaccacaagggtttccccagcttacttagctgattaatgatgtaacagatggtctgatttgccagtttagtgttctaaatttatatcaaactggtattcacagctactccagtggggaaatgtcatagagcctcagaatttgtacttactggttctggactccgtctgatgcttgcataatgaagaggggaaaactgtttttctctaggtataaccatttaaaaagtgaagttttaatttctgtttctacctggacattgaatcatgctagagatgctgaaccccatgtacagcctcattgtttaatctagtctaagagacttacagatccgatccatggacccagtgccagtctataggaaattttcaggaggtatacagcaacataaggatttggtgtgtgggagtgcgtgtggatgaacacatgcattgctgagctatctttctttcttgaaagacactttattttgaattcatttctaactgttaaaatgaactttttcattttaaaaagatacttcacagtagattatattataattatctttacatgtcaaaatatacgttactaactctaaacttcagctatcaggaaaatagaaattgtaattttatattaaaaggttgaggttacattaaatagcactagctgtcttcttttagatagttaagttgccactttatggataagtatgaataaagtccagtttaatagagtagatagttgcattgttagtcttagtaactagagagtttgtgttactattgtgcatatttaaataactttacttatattaattaaacatagtttaatggctaataatagtttattgaatgctgtgtggagtattgaataattcccttctggacatgacagactgtatttgtaattcagaagagtagatgctgataaacttttgacattcaggtactgcacaaagtgagaaaacaaatgaaagtgtttgaaataatatttaaagaaaacagacacatggaggttaatgaccacaggcccgagagaggaatcaagtgggccactgaatttacagtagcacgaatactaaataaaatgtacttcaaatggacaaacgtgtgagtccctgcctggaagacaaagacagcatgatgagatcacagtggtcatttgtgatagatgaacctggggagcattcatgccttaagattctgtgcacatcatactggagatcaggaaagacttacttgggattcttgttttctgtctttaactcctatggatacaacaaactagcattgatttttttttttttatatgattgtgtagtattccaaagcccggataatgtatttaatattcatgtattaactgcagaaaatgttggtctattacatatatatgtatatacattacatatatacatatatgtatagaatattcttaaataaatagagtaggcttcttaagattccatttctcggctaaagtatatagattttaaaatttgaatgttttaaaatagttctgtttggaagagaatactctcaggagactctcagaccctgagtgtattttatttactctggagtagtctggtaggcgataaataacatctcagtgtcttgatttgcctaccattatgatgatagtatttttaaaaatgtcttatttatcttatttttctcttttgtaaacattttgggacagtttaatatataccataaaacaaatatatattacatattccctgtaacaacttgtaaagcgggtctttaacctatttttttttatagtaagcaatttttctagtttttatttcttccaagaaaatgccctcatttagacatgagtctttttgtctatagtgcatgctatcggtattactcttctagtttgtcatttggcctttgtgctggttttttatttgcttttgttagttttttaacttaatttctgtgtgggtgacttgcttccatatatgatggtaatcattgtgtgcagtgcctgtggaggccagaagtgagcatcagaccccctctcagattatgtttaggggagcaatcatgtgtgtgctgggaattgaacctctggaagagcaaccagtgctcttaaccactgagccatctctgcagcacctggcttttgtgttctgatgttgattaaagttttagatgtttgtactcttacatttatttatctcttatggtttcttaattttgtatcagcctaaaattaatctttccagagtttgaagttacttttttgtagtagccttttctggcttcttccagattctttcaactgattaacagaacgttacaattctgtgatattttaatgtatcgataccaacacttaccttattcagatttaaaaattatgaaataatgtagctgtgaacacccagtctttgaagacttttataaaattcttttctactgtaagtagaaataataggaaatggaagttccgttataaatttcacttggctattttagtgtcccagttgcatgcatagttgatttttcctattatctctacatgtatagggaggtgagcgttaacattccttgaaacctttctgtacaaacttgaatgcagtttgattttcttggccctgcatatttcctgagttgttttgttttgttgtatttttaactctctttgttctgaacatctcatttcacatagactgcaataatagcatcttaaagaatagtttagaaaacttttcttcctcaatagtgtgattataaaaaacaaaaaacaaaaaaacaaaaccaaaaaccccttcgtccctctgttactagtctcagtagaaacccaggtgaccgtgtcctccattaagtcccgtcttctatccaggtgaccgtgtcctccattaagtcccgtcttctatccgtagatctgcaggaaagcatatccagaatccatcgaacaattgaactcatgtactcggacaaatccatgatccaagtaagtgagcgctgggctgccggcccctgtcactctgttgccacaccgtgtgctatttgtaaggatttctttttaattctgtgtatgtttgtgtgtgcattggtgccctgggaggccaacgctgtagggtgactttagagccagagttacaggcagttgtggactgctggacatgtgtgccgagaatgttgagttatccttccatcttcaccttcatcctatttatctcacaccaattcttggtacatgttttgtcatacaacttgaatacattttattctaataagcaatatatttggtattatagtataaactaaggagaaaaacattctgataaaattttataacagatttccttcatgttatacctaagttactccttttaaaaaatcttacaataaaatttacaagcagttttccaaacatattcattaagaaaaaaatatgtccatagggaaaatgcatatgaccatttaaaggcaaataattggggtagaaaccctgaagccccgttcaactctaacttctttctgggtgtgggagcaatgcctgtaaccccagcgctcgcgatgctgaggcagggagatatgtttgggaggcaggccaacaggcttgcatagttagaaactgtcttcagagagcaacaagcatgcaagcctactttggatatacattgatcatgcagtctggtgtttttgtcactacaactgtgaagacagagagaaactgtgtgtataaatgtccactgtaactcctttgttcagtacaaagaagtactgggccagccaccaacacgtacaatctattttcagttttgaaaattactttctcttatatgtttgtatatttttagtttaataacttccatagattttctccctgaataattttgcatgttttgtttatttgttctgttgttttcctcaaaacctttaatcccagcgacttttattctatttagaaaatgtgccccagctttccttaaataggtagtttgcagatggccttgggaaatggtttagtagacagtataattcaactttgcatttctttccacgccaggtcccttaccgcctccatgccgtcctagttcatgagggccaggctaatgccggccactactgggcgtacatctttgaccaccgggagagccggtggatgaagtataatgatattgctgtgaccaagtcttcatgggaagagctagtgagggactctttcggtggttatcgaaatgccagtgcatactgcttaatgtacatagacgacaaggcacagttcctaatacaaggtaagacgatgccctgccatcactgctatttccatatctgagtgttttacctgcatgtatgcaagggcactgtgtaagagcctagtgcctgcccccaagaagataggtgtgaacccagagtcagagatggttgttgtgagccatcatgtgggtgttggaaactgaacccaggtattcaagagcagcaaactgctgagctgtgtctccaaccccacagtgtggcatttttgagtaaggatttttctgtcatgatttggctgtgtgatgaattcactgagggtggagaattgcattgagaagtgttcatgaaaagctggaatggggaggtgatacaacctaagctggactccaggaacgggacccacaccaggcagtcacactgtactcagagctaataaccaacataaatccgactgtgctccccatagtgagagctccttagctcctgcagccagccggacactggctgacggttgaccccttagtctagcacagagggcctttgtttctggcctctaagatttgctccagcctcatggcccagtttgaactttatatacttcactgacatttgagcttcatgccatctcctcttgcacagtttttttttgtatacttcccaaaacatcagttcaggttttctcaaaacatatttcggggctggagagatggctcagtggttaataacactgactgctcttccaagatcttgagttcaattgccagcaaccacatggtgactcacaaccatgtttaatgggatccaatgccctcttctggtatatctgaagacggctacggtgtactcacatacataaaataaataaatctttaaaaaaaaccaaaagcatttcttccatcagacaattgtgtggttaggtttgaacactgtaatctctttggctcaaagcccaaatccctgtgaaaatatactgtagtctttttatttctgttgtcctaatgtagtctttgcataaagaaaacacccagtatatcccttctgtctgtagccgtgtaagcttaactaggctgttcatttataactaaagtttaatgttgtaagaaatctttaatctcagtggggtttctatccctgcttttgatcatttagttcccagataaaagacacagacttttatatttctaataagccttcaatgcactacagctgggcaaatctaccttctgatctattagaatccacctctccatcaataactccgagttataactttccatgttccatctaggcagccctcatggccatgtttctgatctacttgtgccatggagtcttctcccctcccccctcctgctcccccctctcccatgctcaaccaggtaactgaaaaacctgcctacccaaatccctccagtaattggctgtagccattttgatttaaccaatagttttaaattaaggaacaaggtttgcataacaaaagcttgtaaacatgattacttactcataagcctagacctttgggtacagaatttagcattacaataaatagccacagagcaaacttcaacagctcactttgactattgaagtactagttgcacattgtttcagaacaccttgctgcattgataagcttcacagtttatgtgattttatgttgtatttaatcccttaacataaaaaacggttttagttctactttgagcttaacatagtcagagattgcttctgactttggtgaaacagttatttcctgcataatcagactttggatattttcttataatagcaaagtgaggttaggctcatgttagaatcaccagacattttaattaattctgtattgcctctccttgctactcttcagactctaggaacttatcagaaaccttcgactcatttttctaatagttatgtctttgtttttctgagcacttttagactttttaagaaaatgtaggtaatgtttgctatggtgactgtatgtaataatgaatagtatatagtttatatgccacttgaaatgcattctattttgaactttgcatttttccgtgacttcttaattttatactagtttttgaaatatgattttcagaggagtttaataaagagactgggcaggcccttgttggaatggaaaccttacctccagacttgagagactttgttgaggaggacaaccagcgctttgagaaggaactggaagaatgggacacgcagcttgcccaacgatcactgcaagaaaagctgctagctgcgccgaaactgcgggaagcagaggcttcggccaccacaggtttgtctgcttattaagttatagtttatagtagggtaatagcatttatttttattgtgttttattataaattgtgctcactgttatacacagtggtaggaccttgtgttctacacccatttaaaaaaaaaaaaggaaagaataatgttagtcaaagtaaacatttaaaactcttccaagcaaatggtatataggccattaatgttggcacatgtaagaaatcaaagcatgaagtttaactacagtcaagtatgaagaagaagtagaagttagcaaacatctaactctcaggatgaccgcaggccacagtttccttaatcactgtagacactaagactcctctctgtgcttggagtcgtctattctccttttgacaggaagctgtaataactgtgattaggaaagacacaaattggcttttctgagtctattaggaaacagctctcaacagacaatattaatatactcacagttattgcataatactggaattaacaattcagttggttttttaaaaaatttgagtttagttcagtatagttagggccatgtgatcaatacctaatgtttaaaaactatagaaggattttagtcaaaaataaacatttaaaataacgtccaagttaaaaattatatatagaccaataaaagtggcaaatgtataaaaagtataaatactagaaaatgtaattcttaaatattacctgataaaaccattaaaatattcaacataagtgataaattcaacacggtgagattttaggaaaattgaagttaaaatatcttttaaccatttttataaaaattaattacaaatttatcttagggccatacattcattgctgtgaaagttccatttttctgaactggatagggaattgaggaagtaaaaagtacacttagataaactctgcaaactaggggggaaaaaagggatacatatgtctgtctgtctgtctctctcgactctgactacaagtttatccctaactcatgccctttgcccaggatctgcgtgctctggtctttgttttaaaggaatcatttggggaaggttgcttgcttaccttcatctttcacagaggtatttcatcgtagnnnnnnnnnnnnnnnnnnnntttgaaataagttgatcagttaatttattgatactgaagaaatatataagttagaggctctaaaagacaaagataaaaatattataccaacaaaaagtccagtatttaggtatgtaagtatcggatgctctgtgtgaccatatagtgctattagtggccagtgagctttgtcatggtgcaggatggtgtctcaatggcttccttgtagaacatatgagcaaggtggatttgcagcattatagtttcagtaactaccaagggatgtcttggctccaatcttttttttttttttttttttttgccagttctattcctttaatttcttccttggtcttttgtataaatcattctaatcatttcctagaacttagccaatttgatttatgcacactccatccacatgtgattattcttcttactattaggaggcaagggctgcatcattgacccaagtgataggatctaagtgtgcaggcacagcgaccctccatttattgacctccaatgtttttcttgattaacctacattttgtgatatcaagacataacatttcagacattttctgcctctgtaaaattagactctaaatttaagggtagcattttattttcatggcaaactatacacatcctgtgttcatcctccagcccacccaccttatacattgtcaccttatctttctccatgacaaacgtcatgtctctgtgatccacgcactgtctttgtgatctttctttcctactaagaacttttgtgtgttttgaaattttagaaattccattttaatttttgaatatgtttctttttaatgtgtaaaatcaacttgataatagtggaggcatattgtttgaggggagtcaaaataacgaatatataaagaatataaatctttagttcacatacatctctgcaggatggggctgaggtttgagaacagctatactgtgagaacaagctttgcatcctgtttaagaagtgtgcattttgtcggagtacaagcaaaatgtgctgcatctataaatgtgaagaataagactgaaaagtttaaacacacacacacacacacacacacacacacacacacacacacacacacacactgatgtttctttttttgagacaaggttttcctcaagtccaggctgatttggaactcagagcaatgagttcacctcatcctctcagggctgggatttactggttttaggcaaatctgtggtgacattattttaatactgtaggagcttattctctgctgcagaggagttcacatataattaaataaggctagtatctcatgccaacttttatctcatcactagttcagaaaatgtaacactgtggccaccttctttttctctttatagttttcaatgtaaataatttgtttagtcctctatgttatttctagaatcggtgtgccctaggattgtgtgtgactaggaggaacaatgacgaaaaagctgtccagataatttacagtgtgatttttctcttccttccttgtgaacttttctcaataaagattcaagacaggagccaattaaaacccatacctacttaaggatattaggatatacaacattaatcaaactactgtttgttgtttcctaaatctagtggtgttatttttccactactattcattgcccacggaagggaaaatgccggacaagcaatgggaaagtgtttcccccataatcctgccactgcagagcaggccaacccaaacactctgctttgattcctaaaagttccttaagtctggaaggaatttcagggaggatctagagtatgcattgtaaaaagccacaggttaattggaagtatagtcttaagcatccgcaggtaactctagtggtccttgtgggtccttcttagcagcctggcataagaaatgggaaggttgaatgtgctcaaagccgagaatctcagaagtgagaaagacaggagtggagccattccctgcccgcctctgcctgctctggagcgcataaccatgacacccactgaggagcatgggtgagggcattgggtcacacggcataacacctggagttccgcactcatgaagtatctagataaccctgcgccttcagccaaggagcttctcttcctgagtatttcttcccaaaataggcttttactcttaagcatccacaggtaactctgaggtgttcctcttaagcatcatagttatatgcggttgtcatctgacccaggattctactgcagagagaaatagttcctgaactaatattcacttattttaatcctcatccagaaaagcatgtcataccttacatgggtaattccgaaattagtattttacttgttttaatccttatcaagaaaagtatttgattccttagaacatgggtaatatacttcaattcaaagcaaagcagaaaaagaaacaaaattacaggtagaaaatgatgcaaaactgtgtcggaagtgtatctcagaggttcataaatgtatgtaaatgtaacagacagagccctctctgggtcatttccataaactcaggcttacaggttcaaaatacaggaagtagaataaggcttgttagaatccaaatgtccctagcattgtcctgttcccatatagcaggatctgggtgttattcattttatatctgcatcattaatttaataaacactacataccagatgggctttgaatcctttctaaattgtatctttcctcgtggaaatttcattaatgtcattgtcagtgctcatccttagtgaaggctttttaacaatttaaaaaaattaccctttcataatttctgacatggatgtaatgtatgtagatcatgtccaacccattcctcacctcttcctccctacactatgtcttcttgttttcataatccactgtgccattagtacttttcatagttgcatgagcgttgagctccatcctctagatattgggcagaataccatgggctgttaaatgttaaactataaccatagagaagtaagctttaaagtacgccaaggggatggagagatggctcagtggttaagaacactaactacttccagaggtcctgagtttaattcccagcaaccacatggtggctcacaaccatttgtaatggaactctttacagaaacaaattatgttagatgaaatatcttaagggagaaaagattgatttcctggcttccttccttgtgtgcctgtggcttgctctaacatcttggtgcatagtacacagggagtacatagctacttattttctgttgatcaggaaaaagaaaagggctcctcactgtagcttttaaaggtgtgctcctgtgagctacttgctgttagaggaccacttcctggactaccagcccaaagcaccatcctcctgtgaacacatctccaacacgggagctgttgggaaacttaacaactaaacaatgatagaaatcaaggaagatttccaagaataaagaaagcaaacccaatcactccaggcccaacaaattgcatcctgaaggatgcattatttttgcccattagattctttgtatttataaggacctacagtagtgtgagtttatgtggtggcatggttaccgacattacgttggaacgtgctatggggtaaagtcaagctttcatcttcttgattgcatgacctgatacagaaattgttcatgtttggcaacatgtggatttcttgaacctttcattattagcaacttagtaaaagaaacaccactgaaaatgtctcttcttatttaagttttaaaatgtgtataaaaccattctttttcttttcattaaaacaaaattattagaatggttatgtcttgaaatagaaaatgccaaaggaaaaaaaatcttagtagtgcctacatttgggtattagaaaacacatttctctttgtctctctctctgtttctgtgtctttctgtctgtctctctctctgagtaccttgtgcattgagtgattctctggtttctattctatggctacaagacactagttagtcccttcttttactgtaactctatcccccaaagctctcacctagaggggactttccgacaacagtgacactgttaacgtgatttatgactttggatgttttaagatactttaaatatcacaaactctctatgaatcctttcaggatcacttcaatttgttttcactgcgatgtttttttattacccttcttaggttgtacttaattttgatttgcttattaccttatttatccttaaaatggtttctataaactatttcttctgcctggatgccccttatttccaaaacaatcttgcctaaaagtctttcaagacacacatcagctgccatatctttcaaaaaaaatctttaataatcaacaccatccgaagagtatatattgagtccataatttattcataggaggctatgaatatcactatatttaatatattataatatacttagattcatcttaatttgtagaaaattaaaatagttggaatatataaatatttatcttagtttttttctagctagagaaagtagttctgtgtgatacttagtcaaaatcatttaatattacccataaagttttttagaatcacatttctatatagaggcacatcttggccttcatgaattatagtggatacttattctcactcttaggcaacttactattcctaagtcttcgactgatagttagaccagtgtctgatcagattttcttttttttttttttttgctcatattgtgttaagctcattattctatcagccattatttttgccatatggtgaaaagaaactgtgccaaacacaggaaaatatggtcctaagctccaagcatgaagcttaaggttcctgcaggaagctatccagagggagatgcctctccagtagactccactatctacaccctctcctcagtagggaaactgaacatatcagtaccaatcaggaaatagttatacatgtagggaaaaaacgtctttcaacttccctccttccttaatacacatcctttaagcggtcttcacttctagtttttcttatagtaaaattcacctctattttcacaattgcccctgataaaacttggaattacctttgtgttcaagttctgattcctaatatggcttacaaactactctttgtatctcatcgcgtctgtgtgcctttgttgctgcctgttattgacagtgtaatcatctcactcagtattcaagtaacttagaatacttggcctcagttccactttctttaattcattattcaaaatgcaacagtataattttctgtatgtgctagagctagatctgagagacttttttttgcatatcagccacactttgcatagcccgtgattttcttctgacagacttgccctgctgctattgtgttagaaccttttcaacctcttggtcaactaaaaacatttatagcattcaagacggttaacgctttgcccactcaccttcttctgttagtacctttgctgtttgctgtgctgtgtgtgatctagctgactctttgtgttttctttgagagaagggagggggagagagaggaaataaagggtaaagagagaagagagagagacacacatacagagagacacatacacacacacacagagagagagagagagagagagagagagagagagagagagaggagagtgcttttaaaacttaaagtctatctaaaatgcctctaaatcttttccaaacagttgcaaaaactgaggatcaaacactcaaatgtatgaatttatgaaggttctcagtcaaattaccctttgttacaatttttacaaattcttcaatttttcatcagtgactttgtccacaatttattctaagagacgacattactgtttattttgtttctccttgagacttactacctagccttgtacccagggcacatgagtttaattaaaatgtattggtgaaatgaatgtccattcgtgtattttgaagttatagtactacattttgaatggaaaacattttaatgataacaataaaatgtccccatatcttcgaggctctttcaacatgtaataaggacacatgctccactatgttcatagcaaccttatttataatagacagaagctggaaagaacccagatgtccctcaacagaggaatggatacagaaaatgtggtacatttacacaatggagtactactcagctattaaaaacaatgaatttatgaaattcttagacaaatggatggatctggaggataccatcttgagtgaggaaacccaatcacaaaagaacacagatgatatgcactcactgataactggatattagcccagaagctcagaatccttcttagaatggggaacaaaataccattggaaggagttacagagacaaagttcagagcagagactgaaggaatgaccatccagagattgtcccacttggggatccatcccatatacaaccaccaaacccagacactatggcagatgccaacaagagcctgctgacaggagtctgatatagctgtctcctgagtgtctctgccagtgcctggcaaatagaagtggatgctcacaatcatccattggacagaacacaaggttcccattaaagagctagagaaagtacccaaggagttgaagaggtctgacgccccataggaacaacaatatgaactaaccagtacccccagagctccatggaactaaaccactaatcaaagaaaacacatggtgggactcatggctctagctgcatatgtagcagaggatggcctagtcggtcatcaatgagaggagagaccctaggtcctgtgaaggttctatgccccagtataggggaaggccaggactgggaatgggagtgggtgggttggggataagggggaggcagggaaggggtaggggattttctgaggggaaacttggaaaggggataacatttgaaatgtaaataaagaaaatacctaataatatatataaaagaaaaaaaaatgttaagtgggggctgcctgtagctctggtctgtctcatggggtagttcttcaatgactcattccttccagtagcagtttggagaatttaccttgtcactcctcatgctcattctttatcagaactgcagattcctttgttgtattaaattatgttcctattcgtgctgggccttggagaattagcaatgcagaagggaaatagcatgcttgctcatgagacttttgcaggtggcaggggatatgagcttcaaataaagtaatcattaagctataattgaggtaaagtcatctttaaaaggcaagtttgtgtgtctgtagaattgggattctcctctgttagtgattttctctttgagcaagagtcatttgcctctatggagccctctgcattttcatattttgggaggggacaaagggattacatcaaggagggatacagtgggtttacaagacaccccctcccccacacatactatagacttattaatactaacaggtaaataatattaattacatgaggtcttaggaactctgctctaaaactgatacttaaataaataagcaagtttccagaaagtgttagaacacataggcggagtatgcaaagctagggcaagcgtctcttagtgtatgcagaagtggtagtgtgcaaagctagggcaagcgtctcttagtgtgtgcagaagtggtagtgtgcaaagctagggcaagcgtctcttagtgtatgcagaagtggtagtgtgctagccattttgagccgaggacacaggatgacataggaggaaaatgctgaaacccagtaaggaaaagctttgcttggatattcagagtagtgttggaactgttaggtggagctcaaaagataggttgagttggaagtgtactttgaattcttttcctgaatgatatttgaagtcacaaattcatattggcatcagtgtgccaacgtggtgtcatttccattcagagagcttacaaggggcggaatcaaaatggagatggtaggattgactcacggttaggatttgttaaatgggaaaacaagcaaacaaccaaccaacttgtactcattgtggaaccctgtaccaaagctgttgtgtcaatacagttctccttttaggcaaaaactagataacttttcaaaaagagactggtccttttcatgtagaaaagtttccttacataaaacatactgtgagtatgttctttagtagttgtatactcttggttctgtttgtcctgtttgggatactgtttgttggtcacttcttggattcatgcagtatttcatgcatttttcattgaaggatgtgttttgacagcaccgaacttagcttggttcctgtataacttcagaattagacataagctcccggtttctgtatagtgccttgtggtttatgttagatacacattgattcttttctctgcagcacaagcaggaggcgcagactatctagagcagccatcaagaagtgacttgtcaaagcactggaaagaagaaacgctccgagtgattgccaaggcgtcacatgatcttgaagataaagggccagagacagttttgcagtcggtaagaacttttcttctggctctcggaacatagccattgcagcgttcccactgtaatggagaagcagcctggctggcagtcagtggacactgggatttggccatgagcatgatctgggagtgcgggctgtcatttcctcagtgtgtgattttaaataaaaccctctcatatgtttcttgtcagaggactaaaaagactcagactacagactaatttttttcatttggctgggaatttaaagagaagcacaaagttcaacagtattttttcccttggtctgtgatgtgtcaatactggagtaactgagaaagtaaggcacagttgccaatgttccatggaaagtctttaacaaaaagtgagaatattaatagaaaagaaatattacgtgaagtttgcgtgtgtcctggagagaaattgtcattatcattttactgtaagtgggcttttcagtttgttttataagaacaaattgaccagagatgtagggttgagtcagtacctgaagaattctgtactgcaccccccacccccatttttgtagttaatacaaacagccccatggaggctgactggagatggaggctgactggagatggaggctgactggagatggaggctgactgaggctccctcaggatgtgaagagtctctccctggagaactgaagatcattggatagttcagacatttacatgacaaaagttgtactttgcaagtgatgctggtctcaacaatagcctcctgttaccttaaactacccattaagcgaagtttccagcaaataaggcatcctacaagttatatctaatgacctaagtaataaccagaaattcttttacttctagcttgaaaaatattattacagtcttcttaatatgaaaattaatttaaatatattttatggttataaatcctgcaaatgtcttagattctataaatacatttaagaacctatgctaatatctataaaccttttgggtaaatactttgtttcatgagtctgaaaactctgtcttgggggccttgggaacaggaaagctcgggaaacaaggactgacagttggcatggggagagagtacttttaccagtacaaaattttaacttgggctcttcataaattggtgctgtgagtcattaaagcctaaaatatatcatgcttttatctgggctcagaaaaccaaaatcataacttgtaatatagaatcatgtttcatctcagttcaactacttaaatgttttaattcatgcagtcatcacataaatttacattccccagattcactggtttgtgtacctttttataaatagcgcaggggactaccgtgggaaggctcttctcctcgttccttgtctcctgaaataatacctgtattgttgcccctgaagtctggacttgtggaagagttgtgagcttctaccatctgatgagtttgtggctcttggtctcaggaccactgcttaggcctctacaaccacttcctgttatcttttttccagttatacttagcatatatgagaaactacagtgagaatcttcagacttcagataccatttccgtgactttggcgtattcacttcatttcttactagaaatgcaatcttgaggaaacttcttacttgactttcaggtttcttcttctttttttttttttttttttctgcaaaattgaagtgcctctgaggttaacgctgaagattttatctggtttgttttattttgatagtgggtgtcagtgtgggggttccttgcttgccctcagccctgggcttctcacagcaccttacgttccagctgtagagtaggcatgacatcccataatacttagacttacagaagatatgagcagccttcaagtgttgaggcagcttgctttcctagagagttgtttaatttctaagtgaacactttaggatatttgtgagtatggaaagcagatggcaagaggaagatgctgtgcctggcttcagttgctggccagtgcataggcactggcaacttggcctacccgttttctatggttttttagaatagagtccctgtatttacttattaaacagggttccatatcagtgccctggtgacatgaaagtgacacctgatgtcaaaataaaacacaaacatactcattaacttcatggttacttcagttttactgaaagaaacagtttaccctggaagggatttctagtcagacgtaagttctgtagtcctgtgactcatgttctcaatcccttccatgagaacattttacaaaatcatacagccagtgagtttcaggctattttaattttttctatcatgctaacggaaaaccttcctaattttgtagcctttgttttatttgtgttaatttgttcactatgcttgaaataataggacattaaaaataagtgtttactttagtacaccttcagctagtttatatgaaaaatatcctgcatgagtttgagttcttttgtgcttccaggattgccagaaccaacatcatgcttttgagactgaacagtagcacaaagggcttgttattaaagggtgtctagggccacctccagacagttcttttacagtgtccctgtagctattttcatgaaggtttttcttttatttcacctttagttctatgtatgtgagtctttgcatgtaggtttgtgcacatgtgagtgcaagtgcctacagaatccagaaaaggacattgggtccctgtgagttggagttggaggttagtgtgagatgcctgatgtgggtgctggaaattgagctcagtttcgctgcaagagcaggatgtgttcttcatcagggagccatgtctccaggcccccctttctgtctttacaataatagattgagctgctagtaagtcaatatcgaagtctcaacatggattgcaacttacgagcttacagttcacttttgttaatggagatcttgcacgttgtctcaaatgctagaagtattaacaattcttaattgtaacaaattcatctctataaaatatgtgagatagtaagattggtttaaaataattacagtataatttttttaatgatttggcaatatctaccagttttacagctgataaacacaagatacttaaatattagctcaagatcacaacaacaaagcagggaatttcctttggagatgatgaaaattgagataagtagagcaccctaaatgtgttacaaaataacactcttaagataaacctttcttttaaaagacaaaatactgttcttgaccattacttctgattccattgtcaaagtctatttggatacgtatttctagagtggaagaaaatgtgcacaacattaaaattcacttatatttcaaataggaataaaacttgtaagtgtccttattcatattttgtatttgaactcatgtctatttttgatgaagaaagttctggtccacattgcaacgactgaagcaagctgcccagatacgccctgcgcttctgccgcctgctgactgagacattgggggcattcaagctctaagcctattggttaaacaagactatgtgaaagccttacccttgcaaactgctgggattagagtaggtcataatcttaacttcatagagttgcaacaaaaagctttctggagtaactaggactgtttgcctcaaatactaccattcaatgtgactctggtctttagtatttttatatacccttaagtctaaaatgctttggtgaaagctacctgaagtatctggtatgcaaaaagaaaggctacagttttgtattacaatttgattaattaacctgcgtctaatatttactttaaagtggtttcattttatatgtagtgaatagagatagtatataaagagattataaacctctgtgtgtaaagagatcgcttccattgttgtctttctaatctgcttgccaatggttttctcctacagaaacctgcaaacaccacgagccaaccaccttctagccagcaaggtgtagaggtggagattccccacttagggaaatttgtgattgaggcaaaagagggagggtacgatgacgaggtaccttggttgcagtgctcggcacggtttgctctcactctttgcagatatgtacaaacaccgtaggcatgactgtacccacacgcttcatgtctgttgctgcataacctacagctttgcctctgatggtgtgaagccttgccagttactaacagaacctggatattaaatataagatgaaagcagcaagcttagagaatagatgaaaagaatgattttttttaacatcagtttactctcaggctgataattagagtaagatttgcttaattatataatgcccatattactttaaaaataactgatattttcctagcagactactaaattacttgtatacttcactttagactttgtccatcatcccctaccaccagaaagccctacagaatggctgcaagatgggtaattgatagtcttgctgctgttgactcatgctgtaacaacaaacaggatgcctggtgggcatcactgaatgcctggcagcgccttcttctctatgggcatcccgtcttcctccttctctgctgattgtcttagctactgagttgttccaccagcctccagctttgttctttctcatggtaaagttctcttccacccagtagtctgcttcatcggactatttatctatcattacttgggatgtattttccccttgaaattctttaggtggttcttttctgtgtttgagagaggacagataagcaattttttaagtaagcgatggggaagcttggatgatttgtggtcagagagataccacagctttttagtggttgtatctttggataagaactgaatgtgtgtgaaatatatttaattcctgaaaaatgtattcctgaattttaattatgattatgtaaaaattaatcatcaaatttggaagtattgtaagacatagtatcactgtgccgttatgagaaagcatgcctactgacaggctagatttaagagagaaggaatgatcaaaggacttcggtaagcagacaatgaatggtggacacgtgcaaccttacatgtatgatccagaataaactatgagggacagtttcagggaactcgagggagtgaccacagactcttaactgcactgagacagcgtcgtgctacttatttctaagacattggaaaggcaagcagctaaggatgagccattttctagaactgtctatagtatatgtaatactgccttacattgttccgtgtttgctctcatacaaactgatccaatttaatgaaagtactcacgtattacaaagcatccagttgcttgttttcagtgtgagctggttttggcatttgtgaaagaattgtgactactctctttattgaatatactacctttggtggggaaatttctgcccttagacctgtatgttttgatgtactctgttggcgtccttgcctaacagtgcatgtgccttgagactcttggttgcttacagatacactggttgcacagttgtacgaagggcctttgcctgggagcaggaatgagattcaactggagttttcaggctattcatttatttactaagtgttggtgccagttttgaaatggttctcttggagaagtattcactttctgctttgtccagaagggggcgccttcttacaattctgcactttagagagaatgctttctgatctttgaacagacaggggcatcctgcaagccagctgggccactgcccagaggactgaatggtgctttgactcatacatcagaaaccatttgctcttttataaacgcatgagtggtagaaaacaaaggcttttaagttgcatgcaagcagcttgtttcattttgttaaaggttttttgcttttgtttctgcattttcctgttaaccgttcagcaagcttcctttcaacccccgtggcaggtcatgatgacccccagtatgcaaggcgttatcatggcgataggtaaatccaggagtgtgtatgacaggtgtggccctgaagcagggttctttaaggtactattaccactttctttttttttttttttttaatgtattgtcttctagcaccttatctctttaaataaatttctcttttcctgtctgaattatgacaatctggtattctaggagctgcttgtgtgtaagaatccaacatttcttttgtttttttttaatgcaaataattaaaaaacaatgagaatatttcacctgagttattgcagtagcgtgtctctccctcgttgccagtaatgtaatcaagacattaagggtacgggaaaacaatgacatgggctgtggaattgcctctggtcacggtttatttcttgtgtagaggtcacactgcaggtcagtattgcaatatgctccctttaattttcccgttgactcaaaactagttctgtttctcaaaattattgattccattcttaggttttgcttcatcttccttgctttgcatctattctgagttttaaatattctcctcaactcaagaaatgggagagcgtcccgttgcttcctttcaccgtcccacgcattcattcccttttaagtgtgtgcactctccagagccttattgtgtgtccttttcattggaaagagaagaaacatcatgtccaaggcattactttctgagatttaccaaagacctcgtgtgtgcatgtgagcgcacacacactcgtttaccaataccctaaagctttcccttcaccttctataggttgtcatcacctctacattgtcatcacctctacattgtcatcacctgctctcttcctcagaagccagaccctctgaacagtgtacagaacagaagcagtgtactaatttgccttctcaataagtccttatggatttgttagaaattatcaattttactgatattccctggcctttttgaatatccaacttgaagtgttaagttgcaactttctgttactatggttaaaggagaaattgagcagccttttaagatcaaatgtaagaacttaaaaaaaaatctcttctttaaaaaaaaaaaagaagaagaaagatgacaaggccaccagaaaaaaagtaaagaaaggagattggagtagcttctgcatgtgttgctagctgtgctccttatgggtggcattatttccttccctccgttggacctttcatttccctctagttgcccccacccatacacttaatatatttgacatcagttcctccctctaccagttgcttgagtcttctcttactttctttttaccaattttaaatgctttttaacttttattttctgtcattcggtattttgcatacatttctgttacattgcattacttcaattgcagctttttattcagtgctcacagaggccagaaaaggacatcagattctcttggaacaggagtcccagatgatggtgacccaacatgtgggtgctgggaattgatcccaggtcctctggaagaacagccagtgctttaaccacggagacctctccagcctgctgttacaattttgtattctcagagcaatagaaacctaggttacctttagccaggcatagctcattgatttgaaacctgttattgttgttaccgtggatattcacttgatgcgttttctatatttcatccattcctcgcctcctcgagtaccaggtacttatgtacaatgaaaggaagagctaagaaagggaatgagaagtgaggttctgaaacagggattggttagacagattgttcgataagttctacctttttaaatacaataaatctgcctttcaaaatatagtgaataccacacttaataatctttgaatcgcagattagtaagaattttcaggaatcattacagaaaactggcagtttgaagactcactagtggctattaacatatgagcctgtgacctttattacatttagaatcctccggtgtctccttcccaacccatgcatccacctctccacaattccctgggactccttaccagctctgcgtgcacacatcacttgtaaggatgagccggcacgtaccaggatgaaaacctagtattggcccatgatggcgtctccaccctacctgtgctccttgaactatatactctacatgttattcttttcagggcctaatagctaataacttgggaggaaaggttattttctctgtatcttaacattatcagaaaaactttaagttgactttatagaacttttttattgtgagagaaataaaatttaactctgagcttgattaagtactttcagctctacttattaatgcgttatcatcagaccaatttttatgttatttactgttagaatgcatgtgtgcgtggcagggtacacacaccttaactcgcatgtagaagtcagaagtcaactttgtggagtctgtcctctctttgtgcctttatgtgggctctgaatggaacccaggatgccaggcttacagcacaagtgcctttatctggtgagacatctcaccacacacattagttttcaaatgatatatttgattggtagtggttaccttatgaattacaggataataggaaattatcctgtgggaatgtcatcttacaagaaataggcttgagtaagtgaactggtatgatttaaccttgacttagagtcacacaaaggccttcccactaaggagtctactgtatgtacgtagtatgaaagagttaataggcaggcagactgggctaaggtattctaccaaatcctttcccaagctgtcttcttttgttaagaccggtttccattttaagaataaaacaaaacacccatggaaggagttacagagacaaagtttggagctgagacataaggatggaccatctagagactgccatacccggggatagatcccattatcagcctccaaacgctgacaccattgcatacactagcaagattttgctataaggacccagattagctgtctcttgtgagactatgccggggcctagcaaacacagaagtggatgctcacagtcagctattggatggatcacagggcccccaatggaggagctagagaaagtaaccaaggagctaaaggggtcttcaaccctataggttgaacaacaatatgaactaaccagtaccccggagctcttgtctctagctgcatatgtatcaaaagatggcctagtcggccatcactggaaagagaggcccattggtcttgcaaactttatatgcctcagtacaggggaacaccagggctaagaagtaggagtagtgggtaggggagtggtggtggggggagggtatgggggacttttgggatagcattggaaatgtaaatgaagaaaatacctaataaaaaattaaaaaccaaaaacaaaacaaacaaataaaaccaaacactgtctggaagaaaatcagtagataagtgtttggtgtgcaagcatgagactctagtgtgatcccgaggaccccatgaaaagtgtagacataaaggtacatacttgtaatgctagcttacaagaatcacaatggggaggcacagacaagtggatccctggagctcatgggccagacaacatagtgaatgaattctagtgaaagatcttgtctcaaaaaaatcaagtagtggtgagggagacaactgggttaatgtctggcttccatacatttgtatacacacacacacacacacacacacacacacacacacacacacacgtgcacaatcacacatgctgcatggaaatgcactcacaaacatacacatgcacatacaaacaaacaaacaaaaaagaataaaacctttaagtgaaatggtttaaagagaaagttccctgaaaaggcaaattaaaattgctccaatgagaaaaattaaaatttaagagatataaaaatcaaagaacagttgtaaaggactggttattattaagtatttgtacatgctggaagcaaagaccatacggtaatatgagaatagctttttattttccttgaaagacataaaacttcttttgtttgtttgtttgtttgtttaaatgaaacagctgtctgtagctcgtacagtcgtatactcagggttttgtgagataagtggacttctgtattatgaaataaggttcttgatagggtatcattgcctcacagtaattattccaagctgataccttccaagctgaaggtcacttccttctacaccttagtacctattaccactgctgcacctttctttaactttgatatggaaagtaaacttattttcatttataaaatgacttaaaagtacagtggtagtaggttacaacccaatagattatcacagaagggacagatgcccatgtaactatcaatcaggccgtgaagtggaactctgaggtgctcctgggtcactcacctgtgctcctccctgtaagcttcttgaccaattgcagccgtgcccttctgttggtagtgttcctgttggtgtgacactgtaccttatatacttgtaatgctttgttcttcattcttcttagtgtgtctcagtagcatgtttagaattctgtatcattgaatgtacctgtagtttgtagtataccatgtggacataatggtattccattgtaaggcacttgattgatttaacggtttataaggcacggcccccaatggaggagctagagaaaagactcaaggaactgaagggctttacagccgcataggaggagcaacaatatgaaccaaccagtacccccagagctctcagggactaaaccaccaatacatggaaagacttcatggctccaactgcagatgtagcagaggatagccttgtgggacatcaataagaggagaggcccttggccttgtgaagactcaatgccacagtgtaggggaatgctcggacagggaagcggaagtgggtgggctagtgagcagggggatgggggtaggatagtaggatttttggaggggaaatgaggaaaggggataacatttgaaatgtaaataaagaaaatatctaataaagcattttgttaaaggaaaaaaaaaaaagacatggccctaaacccagtggataccgttagtatagttttgggttggacttcttcctgagtgaatcttgatttctagtggggaagcaaacatttattaaattgcaatatatgataaaggaaaacggaattaagaagggattacataaaataaaagactgagttggtatctagaaatcttcttagaggaagtaatatttaaacaactaatacatccatggaagtataaactttgaataattttctctgacagctgtttcctccgaatcctttaaatgactgtcgtattactttactttattggaatttagctcattgacagttctatttggtttgtcttaagcatcagtgtctttgcagaaatattttgtgtgctggtatttaacataactgtcgtcgttcattttatattgtggaaatatataaatataaatatatgaataaaaatttattcatgttaagtgagatttgataactcaacagtagatttccagttgtattttgtggtttataatctgtattttatgcttctttgtggtaagaactttaataagtaccttttttataaatataaaagtcttgatgactgctaaaactactgaaatcattcattcctatgatttcatgctttgaaccttgacttagtttataggatttcaactttcttcaaatggaaaactatctaacacttccaaagaactttgtctaatccatcttttaatactgatttaaaatcccacgtttatcatataataattctccattggcaactaggattgtacgtgtttctgtattctactcgtgtattttctaagcaatgaacatattgcctcatgtgttattagtatatttgatgttttatataaaaacacctcatttttattttttataaatgaaatacttcaagaacctttttaagtttttatgattttttagcattaattgttacttccccccccccccgaactcttaatgaatttgagttcatgtgttaatttaagatgaagttggaaattatgttttaataattggattatttttttaaagttacacagatatgacttttcaatctgtcatcctttgctatgtctttttataagttttcatcattttgttaggtaaattgcttatattttacattgttcttaggtgcataaatgttttgttacaaaattgtacatgcaagttaggatgaacaaggataatacattttagaatatttattttattataatcctatgctttttaacaaatttacagtgtagtctcttgattataccattaaactgttctcccaaaagtatctcattactttcataatatctgtttatgtgatataaaaatatctggttttatcatgttgactatagactttagtacatattcttaatgttagagtcatggtaagaaattcatttatttagtaacacattatcaagttcatagtagaaggctttattctattataattagtactagaatgtagacattgggccttttagagtcaaccaggtttattgactactttaatatttcacattataatatgttatattcttgcaatatctgtagtaattatcctaaaatatttctcaatgtagacagctaaaataatgaaaaatataatcagaaacacgatagagactcatttgagacagtttatcatgttcgctttaatccagtggcagttagactctgctagaagaaacagcacagaaatctgtccatttctgttactagttgagaaagtatacatggaaagtgatgtgactggagtcaccttggaaaattaggagactcactgagtaaatccaggagataagcatattaaaatgcaggggcatataactttaatggtgattaggatacattggtttttaaaagtacatgtagctctccttaccaaaaattgaaaaataagatttttaaaagaaatcattgtgaaaactttatatgtgctacttaaatatgcagtaaccctgataatcttaaatgtcaaaatacattttatttttattgtgatctttaagcacagcaataagacttgacagtatatctggagggggaaagtcatttttccccacagggaaagtatttttgaaaatcttattactataaaaaatgaacatcatcttctatttgtaatgctttgttgtgtaggagggactgactaaccttaagtattatttaccataaataaaatatttcaacccatggttttagttattttccctctaaaatatagcaacatagcttataggattacttgaagttataaacaaaaagaaagtgaagggaagaaactaataaacctttttaattgaatgaaatttttgtaatgtgtgttgtatgcaagtatttttatgactagcagagctacaacttagacacaaaaataaagggaaaatttgaatgtgttatttttaatcatgtgggcttcatgggattaattcatcagtattagatatgtgagtctacaaatattcagttatatatcatctagattgtgctcatatgtggaaaaatatattaatattttgtgttattagttctcaagtttgaagcatcttatggttaaagaaacaagtgatactatagcatgtatcatcactattactatcgtcataaaatctaaatactgtaatagcagtcatagtcccttgtggtgactaggccccaaagcaccttcctgtgactgcctgtgaaatagttgtattaatgtaacttctcgcaagagcccgctttcttgtacaggtctgggtgttctaggaatgttcaactcctggaactcttggtatgtaatctagtgtggcaaatgcacacagatgcacaacacagctagtgatgtcccaagagagactttggcaaagctctttcacaaaagtctgaatttcacaaagtgatccacaccatatgcagatacactgcgtcatcgcttctgtgtgtagaaacataaggacatttggaagatgatgggatagtgaagggcctatgtagttgatcattcagaaaattcttttaaagtatggaatttggggacacttaaatgaaccagtttacttacacattaaaagtaaaaatgaacatttaaataattaccattaaaacagtgatgaagtttaagttaattaataataattaataaattctttgctcttgttttctaggcaattaaattagagtattctaggctggttaagttggcccaagaagatactccaccagaaacagattatcgtttacatcatgtcctggtctactttatccagaaccaggcgccaaagaaaatcattgagaaaacattactcgaacaatttggagatagaaatttgagttttgatgaaaggtaacctaaaatcccaaagcatctacttcatgtgttcatacttgtcttattctggtttggtttggatttgctaatctcaagtgtaaatcttttgtttgcacaaaaactataacaaatatagcacaaacctaccttccattaatttgattgtttgcttttccatttctcttaaagtttctatctatggccttttaaagttttacctaaaagtaatttggataattcaaattatgaaagaaaatgtgatttttcaccgtctatactgtggagattttaggctaagtaattttattgtcaggcttccatgtggcttatcagatacagcagcaactctaaccaatactgagagaagccagtcccttgggttagaaagacccaagcatctcccatatattcccagtagccactggaagctggaggtgagtttgcttctctgagacaatccatgaagaaagtcgagtgtatacagaaattttgacataaaatagttaattttttcacttgcaactatattttgtcagaatctgttataaaactaatgttattttttttcttgttagtctgaatatcatttaaaaaagactccaagtatagaatttcaagatactaaatgttactttttttttttttctgaaacactttataaccatgatttgtcttttggaactcattgtatagaccaggatacactcaaactcacagagatcttaaatctgatttctgagtgctggaattaagggtgtgcaccactgtatccagcccttttttaaatctttaaaatttttgttcatgtttgtgtgcattgttgggggttgggagtaagacatgcttgacatggtatatgtgtgaagttatttgtgtgtgttgctggggtggtgaagggggtgagacatgcctcctgtggtatatgtgtgaagatcagaggaccactctaggcacttgtgagaactgctgattgacagtgatcaggccaccaaacctttgcgtcatcccactggcaattgtgaagattttgtttttatgtgtttggaaatttagttttatgcaacatgcttttatggtttttatggattttgtttttaatttagaaatgcctttcttatatttgaaggtgtcacaacataatgaaagttgcccaagccaaactggaaatgatcaaacctgaagaagtgaacttggaagaatatgaggtagtgtgcttttgggaaatactgacctctagtagacacattgcatacgtcataatggagaatggaacaaaatgttttaaatggctaaagtgttttaaagaaaacctttggtttttatgtttataagtgctcttgtatttcataaaccagttttcaattacttctatacatagtttttctctttaataagagcaatttactgcattaatgttgaaattgcaaataaagagcctgctgaatgttcttctaagcactgcgggtgtattgactaatttaatccagatattatcctccaattccatgggacaatggcacagagaggtcctcttacctccacacaattaccctgggaagcgtgcctctctcttccccacagccaacacacacacacacacacacacacacacacacacacacataaatttgtaagagaatgtttaaaaacagccagatgtggtggtacatgctttttatttattatttgttttattattactggtctgtacatgaactcaggaggtatagggataggagctgaacgggctgaaggtttcacaggtaggaatttacagctctctgactgcacacagaacctacaagtctaactgcccttctgtctatcctgattatttgctatgttttctgctttcccgttgatccatcctacatgttagaaagacattaaacagtcattttagccatcacgtggcatctgacatggtgatcctcagacagtgctgtctctgagtgtgtacatgcacacttgtctcatggctaatgagatttgtctgggtgtatagacaaaatcctttgttgacattggtttgaaaatatattttaacttaccaaatttgaaatgtagtgtctatttgtgcttttaaaattaagtttgaaaaatttacttttacgtatgtctttcattaatctttggtcttatttacaaacttttaactttgctgcttagagtttctaagggcaacttcagaataggtaacaggatcttgtaggattttacctttttatggttatcaactcatagtatcaaaattatgacttgcaagaattgaaattgtgtgtttggggaagggcgacgtagagaagaatgccctcctctgcatttgcccgtcagaacggagtcggagcaagtttacaaggtttggtggaactatctcaagataaaccttatattgagttttttattttttaactaatttttattaagcatcctttaaaaagcaggggctcttgctgttgctgtggcttgttggccctgagtgccctgcctaccattgcttgtgggagagggagtcttacttttcaccgtaggtcagcagagtgcttggcaacacgattgaaatcccccatatttcataataaataagtgaactatggcattttttatttccttaaaattctatatcaagcaacaagttggagctctggacagaactgcatcaatagaatgttcctgtctggactcttctaatattagtacattttatactgaagaatgtcttctgggaaaaaaaaacatttggtcatcctgccatttcattattttatgccttatattcttaaccttctagtaatattaatttctaacccctgactaaatgcctgataagtattgttactactataattattataattattataattaaactaaaaagtagtgtgctaagttatttaaattttaaattcatttctctttgtttgcaaaactatcagaacaatacattgttttatattcttaccatagttttattcttttcatttttactattttatatacaggagtggcatgcagattataagaaattccgagaaacaactatgtatctcataactggactagaaaactttcagagagaaaggtaaggcagagaggacgaatatgggaaaaatgtttgttcttatcattaatgctattcagtaattcacatctgatgcaaaatatccatagaatacacgttagggaaagttttagctcaaaacaactttaaatgatagaatatttcaaatttagtacaatgttaaatatcctcactataaagtgtattttgtttttactctaaatccaaaaggttgccatttgtgtttttgtttttcattagttacttttttgtttcgttaaagtttgatcaatagtttcccacatgtacacattgcatgttcacagtcatattgacccttgaccctctcccatctccctccctgacctctgcaactctgccccaccaagttcccacaagcattcatgtctgctcttgtctggttttctttttctttttctttttctttttctttttctttttctttttctttttctttttctttttctttttcttcttttccttgcccattgagttgaccagggctgagttaaaacatggtttattgtgaccatgagcttggatacgccttttagagcctagtggactataatggaaagttttgtatgaaacccatccataaaatatgggaacaaaggggcccagcatatgtaactagttgcattccctacagtgaacctggggcgtcactggttactatattcttcctcatctaagcttgacttacatcagaggccagtctttgtcttcatctgaatccccaggtaccataaacagagcatctgtggttgaaaggtattcagtgatagtatccttgcctggtatgcacaaggcctaaggtttagtcccattgcacaccaacaaaaaaaaaaaaacccaaacaaacaagtttttctgtaaaaacttctaaatgatacttttaaattgaagataattttaaattttcaatgtataaacttgttattttacttttttctttttctaattgaaagtagatttttaaatataattattttgttcccctcccccataccctccacactctcccacccacccaaatccataccttttctttctgttatataatacagtcatcttaaaataataaaaacatcagtattttaacttgtattatgaaaacatttcatgtactttttgtttctgttatttgctagcttatattcatttttccatatattatataatttctaactgagtatcaaaatacttaacctagtcatttttttaaaagtgactgctttattttcaatgcagtgtctttctgaagccaagcaaaatgactactgacctattccttcgtttgtgttaataaactgtaggaaattcccactaaggcaatggcgtgtttttaatgacaagtaggcacttatttctaggatgtaactgtccaactgtccaaggtactactaaccttgagtgacaagttcagattctgtaggtatagattcagtttcttagtagtactggccacattctttgatccatttatgaccagtgcccactctatagagtagagtttctgctgaggacctacccccgtctagccacagccccttagcctactgacgctgcctgtcgtttatgaggttggtcttgtacctgggtatgtaaatactatccgagtggtcagccactcccacaatgcttgtgctgctgttgtcagtagtcatttttgtagttgtgctgttttcagcagtaggagcttgccctcaagtcaagtgttactaaagacagtgcagcttgtaatgtttgggggtctgtggaaaactcagtggtcaacagttccaaaagaaataactcagacagggcactcagcttttcatttattctcttctggtgtctagtagaggcattgttgacctgttatagtgtaactctattttaaggtgtgtgtgtgtgtgtgtgtgtgtgtgtagatgtatctatgtatgtatgcatgcatgcatgtatgtattaagcttatttagtatatatctttttaaaatgatctttggtagtgtttacccctccccataccagctcctatgtcctcccttcactcgcccttcccaatttaaccattcttaatttatgctaatacgtttccaaattggaagtatgttttctgctttctacctcaccatctcctttgggcatttttctttgatgtttttctcagaggccagaaatttttctcttcatacaaaaacctggcttacatagtcactgcatgagccaaatgatccatgtaactataaagtaaacaaaaacaatctgtttacagaaaaatattgtgttaaaaacattgttggtctcacatcaggcttaaattttggtcctaagtggaaaccatcaaacccccatatacaaagacagcaggaggactcctgagtgctgtagctgaggccattcccatgttctttcttcttttgtcttactcttctaccttcatgctttgctcttgttgaaaggtgtgtttgttcatttgatgcgccgaacttattgtgttgtagaaaatagacatttaaacgtacacttagattgttttataattggagattataatattgaaatactaatactgtgtgtttatttcaagttatatagactccttgctgttccttctctgtgcttatcagaataacaaagagctcttgtctaagggtccgtacagaggccacgatggggagctgatatcacattacagaagagagtgcttactggtgagtataaattgcaggtgtgtgcattttcctatgttagacacagtttacaggcttgcacataggtaattgactgtaaacactgttggataaaaatcatgatatctgcataaaagtatttttaatgataaaacactttccttgatttaatgcaacactgcgttccttgtagtagcagatttttatcatcatattgccactccccttttgctcaaacgggaggactagtcatgaagaaagatattctctacagcaaacaattagtttcctgagagtagtaaatcatgctggactgaagttgcaaactttccttgaacacactagcttctatttgcagtgggaggctgatagtttttcttcagatatttttgtctctctaaattattattattattattattattattattgtcgtttttcaagttactttaaaaatgtttttagtctacattacctaactttacatatgtagagactttgattaatgcatactaaatcagctagctctcccatatggaattacaaattcccccaaaatgtatttgattacgtttaactcactatttcctgccagtattgctcccatctataatgtaagccactgagtaataattgttttccctgtttaagaaagatgagaaaaaacctctctagtgttgttatatgtattaaatgtaggaaaagaatttttaagtgactcttttcatgaaatattttctcttagatattagaacgactcagtttacatcaattttagtgtgacgtgttgtctttacaggtttcaatcagacaactgaaagactctgattttcttttctttctctattgtctttgttatctacatagctttttctgagagaggtgtgtgtttggtgtgtatattagtagcgttatacctgatggctgtttgttctgctactcgttgaacatattgatgaggttgtctgcagtatcatcatgttcaggttctcctttcttaacttacgatgaagcaaaatgtgttctcttctcttgttccattaagaaattaaacgagcaagcggccgagctgtttgagtctggagaggacggagacgtgaacaatggcttaattattatgaatgagtttatcgttccctttctgcccttgttgctggtggatgacatggaagagaaagatatccttgctgtggaagacatgaggaatcgctggtgttcatacctggggcaagaaatggaaggtaagtttgagcagtgccgttaggccccagggaggggctcggcagcagaagagggctttgtcatcttctgcctggtttgatattctggagtcctgcctccttcactctatggccacgcccctccctccgttacaagctagcaagtgcacatttccgttgccatgtatgtaaaaatcaacaaaagccaaactcagatccccaaatgaaggaaatttcatgtgtttgccgttgtctcctctcccataagaagcctgcagaggtgcccctttcacctctctctgtgctgagaaaaatctatttgtatttgcagcaaacctccaagaaaagctcacggattttctgccaaaactgcttgattgttctacagagattaaaggtttccacgagccaccaaagttaccttcctactctgcgcacgaactctgtgagcgattcgcccggatcatgttgtccctcagtcgtacgcctgctgatggaagataaactgcccggacttcccagggtcaccatagaaactctgttctcaccccggctacctgccgcggggattgcttgctgctgctagagtttttaactttttattttaataactgcaaaagacaaaacgactatgccgaccttagccaagactgcaaacaataaacccgagaatcgcatggcactcaccttgttttatccgaaaccaatgtataattacaaatgaattgatttcttgtggcaaaagtatgcttttgctgccttctattgcagtattgcctctcagttttctttacaaacagctttccatttagtctgggacctccaagactaagccattaagtgtttagcactgtctatgatacataatatttggtagcttgtaaatgaaatcaaagaataaagttttatttatggctacctaagtgtttgtaagcaggtatattgtataatggtgtgtattttagttatatacatgagtttagccatggggtggacattggatgatgcatacaataatagcccttttgtgttagtataatggaaccatattggaaatgtactgagtgtttagcacttcactgtgtctatatccactgagttcttggacctaaacatgttatgttcagtcagatttcactaaagtgagcgactgggttttaagtcaaactgcactgaaacttttaacctttacttagattaaacgtttgttcttttctgtatgtataaataatacaaggtgattatttcaagagaaacctgaaaaagtacttgaataagggctattgtgaaatttaaaaagaaaaaaaatgtgcacatatacacacatacatgcacatacatgtattcttcataatggagggcaatgtttttcattatataattattctatttttgtaaattatatactactttaattgagaaatgtcctctactaatcaatgctgtgaaatgaaattgatactgttcaactaggaattataagaatcttaactttttatttgcctccttttttttttccaaaaaaaaaaaaaaaaaaaaaaccgtaaaagacgtagactattttatgaatggaactactgttttaagatcaatgaagtgatgttgtgaatgaaaatttagattcatgctttaaaggtaatcatgttaccaccgatctatttttgaatttataaaaattctttataactgatactttgttagcatagtaaaatatatccttatgctgtgtgtctattgcttcttgtagcgtcaccatacactctacaagtgcctgtcactaagaatccaacagcccagccagccagggcttctcaatgttcctgctgctcggaccctttagctcagttcctcatgttgtggtgaccctcagccataaaattcttttgttgctacttcataactgctactgctatgaattgtaatctctgatatgaaggatatcagattatgactgcaaagggggtcgtgacccacagattgacagccaatgcactagagaaagctaacacagccacttgtgtgatcatttggccaagggaattttgtgcagtgaggcagccaggaggaatcctggggacccgacctgtgtaaaatgaggtgttgcatatcgtgggcatcaaagtgtgtttgggtttagagtccttgtccttttaaaggtctagaaacttgtcactgtggttgccactttgctagttattacacatgttatgatatcctattaaaatggcgaactgctttatattgatgtatgcagttgcctgccagggcacaaaaggagtcaaataccaggtggacattattctgtcaagaagcacatccaaggaattgcatggttcttaggcatgaggtaagcagtatatttagttcgtaagaaactagctcttgatcctgtgggacagctcagtgggcaaaggaatttgccaccgagcctggcaatcgagttcagtgcgggaacccccccagggtagctggagggcattgactctcacaggctgtcctgtgaacacacacggacatgctgacactaaacaataacgaaacagaatcatataagcaagtgtattcatccctaggattgaatctgaaatagcttagttataatataaatgaaatttacccacacctagacattcaacatgttttcctgaggctgtttcccctgttctcaaggtttaggtctttggaatttatgttacttgttgagttttaagtgtaacttgtagcttgtgacttgagagatggagcttcataaaacagttatccatgacggggtcaacattcaaacagggtcattttggttcctgtaagtattcctattccccttttacattttgaaatattcaggatatacgtcagttaagaaagaacctaagacttaaatattcatggcttaaggggaccagaaaccatgaatagacctaagatattctggcagtatctcatccttttaaatcccgagtttgcagacactgcatttaagggtattagttctcaagaggttggctccagagcactgtttaacctgactggtatcatgttagcacagggagttcttgaccctgcattcatgcagaccccatcttcgtgaccttgtacatctttattcatctctatcgaggcttcaaaaatatgcttgctctttggcagaagcaattcactttgttccaccccagagttgtctcagatctttgggtttgcctttaaaaatatcttttgttctcgaattgtttactgcttctccggtagtattaacttgtgcatcaggaatgtgtaagccactattttttaattactaagtgctgatgtcatattagttgagacaggctctcctatttaaccagctctagcactcttctatatagcccaggatgtcctagcattcaataagcctcttccctcagctgagcatctttgtattattaaaatgcttcttaggtgagaactgactcaatacacaagattacatagttgttccactttttttgttgttgttttttgttgctgttgttgattttaatcctactttgacagactgggtaattaaggagcgtggacgagttaggtttttattactgcctttcagtgacgacagggcctgaaagtgttgtacttcccctagacaggaagcacccccattttgccatgtgttccattgatgctgcacgtagagggttcgcacacttaatttattgtcctccatctttttttttccagtttgttggtgttagttactcttgctctgctttccaaggtctgtgacttcctaaaacatttcttcaattgacttttcctacttgtattctttattattcataagccagtgatttctgactgaaaacacctcttggtgttagaccggtgtattcctattgtctgtctcctcagaagtgggtgtttcagacaagctaggcatgttcatggccataaagctgtagatattcctggatatttcaaaggtgctttaaccaggcagctttaatccaaattaaactcctcattgttccatggatctgatgctcttctctgcttcagtgaaggatataagtctagaaatccagtatatatatatattctatcttcactaatgccaagtgttgtcgagggagctcctgaatctcatggctatcacccaactctgcctttggacgattggatttattgaagagtagcctcctgtcctggctctttcccctgcaatccacctttcacactgtgactcggtgaccttcctatggagctggtttcatgtgtgtgttttccatggcaggactggactcctctaaagcgagatgatgctttttttttttaatagctcaagtacctgctaaactatctgggaacttttctgattcacttttgcaacttttctaaccctcaagacattgaatctgtaatgtgtttgcctttagctactttaaaagaataccacttagtcactcgggccgtatttcagatactcagtagtatcagatgacttgtggccacttataatttttttactatgttctcatttaaatgatgaagcatcagttccttagtatcactggactgtctctgacccacctgtcccaataacaactcagagacttattattatttattagagcttaggtcttagctggctagcccatagctagctctaacctgactaattctagtccttgtcttgccatatggcctcttgcctctcattcagaactggtttctgtcttttgcatctctgtgtcgcaatagccaaatcccccatgcctaattcttccccagagttcctatgtcagcccagaagtcttgcctttcctctttgcccagcagttgtccatcagatcattatgaagccaatcagaagttgatggaggtgggaggtgtatgtttacaaaatactcaggcagttgattatccataaaaataataccaaaatccagtcagcattcagctctctgcctgtacagaaatcaacatttgaataatacaaagacctttacaagactatcccaacaccttacttatgtggacttttcatctttgaaataatatccctttgtcaagcatgtttagaaatcctaattagaacacattaggtttcagtattgatttctatctcaggtctgccataaactagtttactgtctgtgtaggtagcacctctaaccacacgtgtgatgaaggaatgccagactggctgtgaagtagctgtaaggaccttgacttgagaatggaatcagaaatttaaatgcaggatacatctcatagtcctaagagcagggaagcacaaatgatgtcagaacgacggagcttcaacaagtcagctggacactgatgttcagttctgctgggaaactcacaactgggctgtttggacacatcatttggctagttctggaagtcctgagagttgttcaaaactacaatgaactaactatgttcttagttcaacattgatagaatcagcaatgacgagaagaaaatagccttggttttcctaccttccaactttcctgtagcactaattgtcaaaacctgaaatgaaatgaaggcaacgttgaaataagttgaggagttgaggacagaagcttagaggtctagcctcagcacccagagcctagagcagaaggacacagttacagctcagataaatgaggtaaagagctgtacactcatttcctgtaaggatccctttttatactgaaactgattccaaaacttgtatgcagggatttgtgtattatctctgggtcttaaagtgtgcttgtgattgaaattttctgtataagtctatgtggttcccacccttgatctctaactgagaaaatgccttacagctgtatctcatggaggcatttcctccagggaggctcctctctctgtgataactccagcttgtgtcaagttggcacacaaaccagccagtatggttgtctatgtatttgcattcagctctatgtttatatttgtggcagaaaggcttcttagaaatatgttccatgatggctaaatcatagaaatcttttagatggcagtgtactagtaagatcttagagtaccatgaatttctccacaatcaaaattgatccagaatgatatctttaaaagatgctatttttgatttgtgtatatcctgcaagtacacacatattccagaagatggtgtaagatcccctggagctgaagttgcaggcagttttctggcaagtgtgttatttctgcaagaacagcatttatggttatctgctgaagcatctcatcagcttcaggcaaaaagtccctcgagctgggggtgtgactcagtagagatggtgtatgcttctgggaacgaagcactgaactcaatctgcaggactgcagagcagctacaaaaagactccctacagatcaggaacgcagaaagtatgcactcgacagagatatctgcaaggtgcaagaggactgtgtccaggtaacaagactgtgaaagctagagttggctaagatcattatgctatgttccttgagatattcccaagttgtgacttagcagagtcaataaactgattatagaaacacagagcccagaaagtatgaaagagtacagtgccaaactgcaagcagcaatggtggttttgaaagactttgtaagtcacagaagacaaaggggcatcaaaggaagtaagttgcaaaggagaaaaatgcatatatgatttgaaatgcattaaaatctctgaaaatacctgatcattaaaaataaagtatatgcaatatgtgtatatatatatatatatatatatatatatatatatatatgcacatgggcagcatttcaccaaatcagaaatactcaaccaatgataatcctggaagatagtcaacttcattagcaatcagggttcagttagaccaagggagaaactacaaacacattaagactgacgtcaggctttgtccctgccagaggctgcagaaggatgtaacacagggtaaactcaccatataatgtaggtgaatgtctaaagtagtgcaaccacttcgcaaccaaaatatttcaagttgatagtacatcattcagcagatcctatgtatcttctgtatcctatatattgaatatatttgagacacacatgcctcagtttatatgtccgaagaattcttagaaataacattcaaatctgggcacaacctacatctgtcagcagtcaactgacaaattgcaccatatgcatgcagtggattattacatagaattaaaagcatgctcactgaagccacttatatcaatgggaagaaaccatgaatgaacgccgccgcacaattgtgcacccagtagagtttcatgtattaaatgttccaaaacccaagttaaagccaagttacaagaaggcgctcacagatggttaaactaaattaaaaatggaaggtgcataaagatggccagccatttcaggaaatggttccatttgagggtgatatgtgatttgaaagggatatctggagtccttcgggattgcttccagtatgggatttcatttttaaagtttattttgcacgctttcaatgggcactgccaatttggggagtggaaaagaaggctcagctctgcgatgcactaagcatattttctgtaacttaatatgatgacacagagaagtgcagggccagaactgagctctgagggcatttgaaggctgcagccctacaccaagaatgacaggcaaacaaggaatgctcagagtgggagaaacagtctccctcagaaaagaacacaccgattggttatccaataccaaattgtaatccctgaaaatgtacacacaagtaacactatacagattgagcagtttgtatttgggtgtatatattatgtatatacatacatgcacgtaatatctattaatgaaaaaaaaagccaatggatttgaaagccaggagaggagggtttttttaaatatttttattaggtattttcctcatttacatttccaatgctatcccaaaagtcccccatacccttccctccccccaatcccctacccacccactcccactttttggccctggcgttcccctgtactggggcatataaagtttgcctgaccaatgggcctctctttccagtgatggccgactaggccatcttttgatacatatgcagctagagtcaagagctccagggtactggttagttcatattgttgttccacctatagggttgcagatctctttagctccttgggtactttctctagctgagaggagggtcttatgggtaggaaaggaaagggagagatgattatattaacccccaaaagaaaaagaacaggcctatgtttgaaggaaacccacagaatagagtgtcaaatgaagtaggtaagttctgatgtttactttaagggacaagttttttgtttgtttgtttgtttgtatgttgttgttgttgttgtttttaaaattaggaacagacatccttgagtaagagcactgaggtgagaggtgctaagacaacagaggcaggaagcacgcagtggcttcagcagttcaggaggtgtaagagagttagttacaacaggacttcgggccacacagccagaaggcaagacgcctcagacgccagagaaaaatgttaaaacagtgtcagtccatcactgtacgagggaaaaaagcaaacttttctcaatgtcagaagaaaaacctggctgtgttctaattaataaacactgctaagagaactaaaacgcttttttctctccatgaaacaacagaagagaaaaccaaaataagggggcagcaagacctgtgaggggtttagttaatgatggcaatctgttgctatttgtcatctctggctatttgtcaccatgtatgttggccgttccttaaatttctctatgctaactgttaaaatgcttctagtttgaggaagagatctttagatagctgagctgttttcttctcgcttcccagtaggtggtgttataataccgcatttgagaacttaaatagtaaaataaaatcggaagagagaatgcctatctttgctgaaatgtgtgtgcttttattttcaaaagtcgttctgtttttatgttgtgaaatccatgagcattttcattccatgtgtatttatttaatttacattccaatcatatttatatatatttgtgtgtatttttgttcctttattctcaagagttataaaaaaaatgagttacttagttaatagaacaagatgagcaagagagttaacagagacaattttccatgatccttttgtacccatgcctcttagctgtagctgaaaagatactgtgcctgtcctggaaataaaacaggagaatcgaacctgccgttcttactagcatcacttctattttgcttgcagaatgcttttcatttgtggctttgtttttcaactgtcttcagaaaaaaaatggttgaccatgctgcaatgccactctttgtaattcagctgaatatagatataaaattcgacctaatattgccgaagcccatttgattccatttggcaatccattgcttggactcacgtagctgttctcacaatctctgtccaaggatggctcccaatacttcatgagacatcccagtgttttagcatccccaggactgtaatatacaacctttcatggtaagatcagtgccttagtatacttttgtggcctgaacataggcttgtcttcaactcagcaaacacgtatagtaaatattgaataaatgtgatacaatttaaataattatcttcttatactacagacatgaagtagctgccttgggagagctattgttagttaatttagtgcttgtgaccagtcaggaatccagaaccagaaagggcatgctctctgtctatgcattgatctttagtgggacactgtacgttcttgtggcaaaattatatttcccttatggataagctcagcagggaagtaaaagccctgttccctttgtattttttcctctgataactaaaaattaagctgggataacactaaataaaagttatgtctattttaaaattgctgagacatcttaccaaacttgagcagatgttgaacatgtctgtccttgagaaagacagagaaagtcagcagtgcgacagacagagtgcaggaagattgcagtgtcctaggaacattgtccctttattgcatcagtgaataaagtcaccattttcttaagacagtctgcactttattctaaattctggcgttctctgatatataaaaatatcaacactcctttttaaaattctttcttttatttattgagattataaaatagtatcatttctccatccttttcctccatacagacccatctctccctagtacttctctccccctcccacttctctttcaaatacctggcctcttttcattaattgttgatacatgcatacatatatacatacatacatatgtatatacacacacacacacatatatgtgatcctaaatacataaacacaaatatctcaggctatgaaatgttactttatgtatgttttgggggttctccatttgttatttaaaaaacagttggtatacccttccctgggctatttctcctgctctcaacattcattagcagatggtgggggcttgtgtagtgctgaaagatcctgggctttctctctgcatgataccaaatctttcgtaactctctttataacacctcaaagctaaaatccattgtccctggttatttcattaattgtactacatctgactgattttgaggacttaccctgagtacctacaaggtactgattatgaaaaaaaaaatcagttgtttgaaagaaccaagattgtgattatttgcacaaaaccacaaaaccccaatcactcagatagtgagttatcaagtttttgagtgtataaagtggttaaaggatagaaccagacatcaggacctcctctcctcttatgctggaaaagggggtggggtgggtcatttagtagaaggtggcacatcgctgtgtctgatagttttggtatgatggtgtactggctggttttatgtgtcaacttgacacaagctggagttatcacagagaaaggagcctcccttgaggaaatgcctccgtgagatccagctgtaaggcattttctcaattagtgatcaagtgtgggagggctcattataggtggtgtcatcccttggctggtagtcttgggttctataagaaagcgagctgagcaagccaggggaagtaatccagtaagcagcattcctccaaggcctccaaattcctcctgcatcagctcctgcctccaaattcctgccctgccctgcgtgagttcctgtcctgacttcctttggtgatgaacagcagtgtggaagtgtaagctgaataaacccttttgtcctcaacttgcttcctggtcatgatgttttgtgcaagaatacaaaccttaagacagatggcaacagtgtaaatagtagtctttcatgaaaaactaagaagaatgttagtcaaaatgggtctttttggtctttgggggaggttgtgcattccttttttaaaacataca

SEQ ID NO: 30 - DNA, 4247 bp, Mus musculus
cgggccgtccgcgtcgctgccccgggcccggtagagcgcgacaggcggggccgccgcgggggccatgaccgtggagcagaatgtgctgcagcagagcgcggcgcagaagcaccagcagacatttttgaatcagctgagagaaattactgggattaatgacgcccagatactccaacaagccctgaaggatagtaacggaaacttggaattagcagtagccttcctcactgcaaagaatgccaagacccccccacaggaggagacaggctattaccagacagcgcttccaggcaacgacaggtacatcagcgtgggaagccaggcagatgcaaatgtaattgatctcactggagatgacaaagatgatcttcagagagcgattgccttgagtttggcggagtcaaacagggcattcagggagacgggcataaccgatgaagagcaggccatcagtagagttcttgaagccagcatagcagaaaataaagcatgcttgaagagaacacctatagaagtttggagggattctcgaaacccctatgacagaaaaagacaagagaaagctccagtcggtctgaagaatgtcggcaacacctgctggtttagtgcagttattcagtcattattcaatcttttggagtttagaagattagttctgaattacaagcctccatcaaatgctcaagatttaccccgaaaccaaaaggaacatcggaatttgccttttatgcgggaactgaggtatctgtttgcacttcttgttggtaccaagaggaagtatgttgatccgtccagagcagttgagattctgaaggatgccttcaaatccaatgactcacagcagcaagatgtgagtgagtttacacacaagttattggactggttggaagatgccttccaaatgaaagctgaagaggaaacggatgaagagaagccaaagaaccctatggtagagctgttctatggaagattcctagccatgggagtgcttgaaggaaaaaaatttgagaacactgaaatgttcggtcagtatccacttcaggtgaacgggttcaaagacctgcatgagtgcctggaggccgccatgatcgaaggggagatcgaatccttacactccgataactcaggaaagtcaggccaggagcattggttcactgaattgccgccggtattaacatttgaactgtcaagatttgaatttaaccaggcattgggaagaccagaaaaaattcacaataaactagaatttccccaagttttatatctggacaggtatatgcacagaaatagagaaataacaagaattaaacgtgaagagatcaagagacttaaagattacctcacagtattacaacaaagattagagagatatttaagctatggttccggtcccaaaagattcccattggtagatgttctacagtatgcattggagtttgcctccagtaaacctgtgtgcacttcccccgttgatgacatcgatgctagttcctcagcaagtggccccctaccatcacagtccttaccaagcacaacagaacagcagggaccctgtgcttcagatctgcccggctcctcctcacccgcatcaggtgccgccctgcccttgaggtcagtgattcacaaacccttcactcagtctcggatacctccagatttgcccatgcatccggcaccaaggcacatcacagaggaagaactgtgcgtgctggagagctgtttacatcgctggaggacggaaatagaaaatgacacgcgagatctgcaggaaagcatatccagaatccatcgaacaattgaactcatgtactcggacaaatccatgatccaagtcccttaccgcctccatgccgtcctagttcatgagggccaggctaatgccggccactactgggcgtacatctttgaccaccgggagagccggtggatgaagtataatgatattgctgtgaccaagtcttcatgggaagagctagtgagggactctttcggtggttatcgaaatgccagtgcatactgcttaatgtacatagacgacaaggcacagttcctaatacaagaggagtttaataaagagactgggcaggcccttgttggaatggaaaccttacctccagacttgagagactttgttgaggaggacaaccagcgctttgagaaggaactggaagaatgggacacgcagcttgcccaacgatcactgcaagaaaagctgctagctgcgccgaaactgcgggaagcagaggcttcggccaccacagcacaagcaggaggcgcagactatctagagcagccatcaagaagtgacttgtcaaagcactggaaagaagaaacgctccgagtgattgccaaggcgtcacatgatcttgaagataaagggccagagacagttttgcagtcggcaattaaattagagtattctaggctggttaagttggcccaagaagatactccaccagaaacagattatcgtttacatcatgtcctggtctactttatccagaaccaggcgccaaagaaaatcattgagaaaacattactcgaacaatttggagatagaaatttgagttttgatgaaaggtgtcacaacataatgaaagttgcccaagccaaactggaaatgatcaaacctgaagaagtgaacttggaagaatatgaggagtggcatgcagattataagaaattccgagaaacaactatgtatctcataactggactagaaaactttcagagagaaagttatatagactccttgctgttccttctctgtgcttatcagaataacaaagagctcttgtctaagggtccgtacagaggccacgatggggagctgatatcacattacagaagagagtgcttactgaaattaaacgagcaagcggccgagctgtttgagtctggagaggacggagacgtgaacaatggcttaattattatgaatgagtttatcgttccctttctgcccttgttgctggtggatgacatggaagagaaagatatccttgctgtggaagacatgaggaatcgctggtgttcatacctggggcaagaaatggaagcaaacctccaagaaaagctcacggattttctgccaaaactgcttgattgttctacagagattaaaggtttccacgagccaccaaagttaccttcctactctgcgcacgaactctgtgagcgattcgcccggatcatgttgtccctcagtcgtacgcctgctgatggaagataaactgcccggacttcccagggtcaccatagaaactctgttctcaccccggctacctgccgcggggattgcttgctgctgctagagtttttaactttttattttaataactgcaaaagacaaaacgactatgccgaccttagccaagactgcaaacaataaacccgagaatcgcatggcactcaccttgttttatccgaaaccaatgtataattacaaatgaattgatttcttgtggcaaaagtatgcttttgctgccttctattgcagtattgcctctcagttttctttacaaacagctttccatttagtctgggacctccaagactaagccattaagtgtttagcactgtctatgatacataatatttggtagcttgtaaatgaaatcaaagaataaagttttatttatggctacctaagtgtttgtaagcaggtatattgtataatggtgtgtattttagttatatacatgagtttagccatggggtggacattggatgatgcatacaataatagcccttttgtgttagtataatggaaccatattggaaatgtactgagtgtttagcacttcactgtgtctatatccactgagttcttggacctaaacatgttatgttcagtcagatttcactaaagtgagcgactgggttttaagtcaaactgcactgaaacttttaacctttacttagattaaacgtttgttcttttctgtatgtataaataatacaaggtgattatttcaagagaaacctgaaaaagtacttgaataagggctattgtgaaatttaaaaagaaaaaaaatgtgcacatatacacacatacatgcacatacatgtattcttcataatggagggcaatgtttttcattatataattattctatttttgtaaattatatactactttaattgagaaatgtcctctactaatcaatgctgtgaaatgaaattgatactgttcaactaggaattataagaatcttaactttttatttgcctccttttttttttcc

SEQ ID NO: 31 - protein, 1063 aa, Mus musculus
SATGGAAAGAMTVEQNVLQQSAAQKHQQTFLNQLREITGINDAQILQQALKDSNGNLELAVAFLTAKNAKTPPQEETGYYQTALPGNDRYISVGSQADANVIDLTGDDKDDLQRAIALSLAESNRAFRETGITDEEQAISRVLEASIAENKACLKRTPIEVWRDSRNPYDRKRQEKAPVGLKNVGNTCWFSAVIQSLFNLLEFRRLVLNYKPPSNAQDLPRNQKEHRNLPFMRELRYLFALLVGTKRKYVDPSRAVEILKDAFKSNDSQQQDVSEFTHKLLDWLEDAFQMKAEEETDEEKPKNPMVELFYGRFLAMGVLEGKKFENTEMFGQYPLQVNGFKDLHECLEAAMIEGEIESLHSDNSGKSGQEHWFTELPPVLTFELSRFEFNQALGRPEKIHNKLEFPQVLYLDRYMHRNREITRIKREEIKRLKDYLTVLQQRLERYLSYGSGPKRFPLVDVLQYALEFASSKPVCTSPVDDIDASSSASGPLPSQSLPSTTEQQGPCASDLPGSSSPASGAALPLRSVIHKPFTQSRIPPDLPMHPAPRHITEEELCVLESCLHRWRTEIENDTRDLQESISRIHRTIELMYSDKSMIQVPYRLHAVLVHEGQANAGHYWAYIFDHRESRWMKYNDIAVTKSSWEELVRDSFGGYRNASAYCLMYIDDKAQFLIQEEFNKETGQALVGMLPPDLRDFVEEDNQRFEKELEEWDTQLAQRSLQEKLLAAPKLREAEASATTAQAGGADYLEQPSRSDLSKHWKEETLRVIAKASHDLEDKGPETVLQSAIKLEYSRLVKLAQEDTPPETDYRLHHVLVYFIQNQAPKKIIEKTLLEQFGDRNLSFDERCHNIMKVAQAKLEMIKPEEVNLEEYEEWHADYKKFRETTMYLITGLENFQRESYIDSLLFLLCAYQNNKELLSKGPYRGHDGELISHYRRECLLKLNEQAAELFESGEDGDVNNGLIIMNEFIVPFLPLLLVDDMEEKDILAVEDMRNRWCSYLGQEMEANLQEKLTDFLPKLLDCSTEIKGFHEPPKLPSYSAHELCERFARIMLSLSRTPADGR

SEQ ID NO: 32 - DNA, 169865 bp, Homo sapiens
taagtacttcctcaattagttcccctgaaaattgttttttgttttgttttgtttttgtttttgtttttgtttgagacagagtcttgctctgttgcccaggctgaagtgcactggccagatctcggctcactgcaagttctgcctcccaggtttacaccattctcttgcctcagcctcccgagtagctgggactacaggtgcccgccaccatgcccggctagttttttgtattttagtacagacggggtttcaccatgttagccaggatggtctcgatctcctgacctcgtgatccgcctgcctcagtctcccaaagtgctgggattactttgggagcgtgagccaccacgcccggccgaaaattggttttaaaagaagtgtgacacctctttcccctctctccttgttttcctctcccaccatgtgatttctgtgtagtcggctccttttcccctttcatcattagtggaagcagcctaaagccctcactagaagcagatgctggtattatgcttcttacacagcctgcagaatcatgagccaaataaaccatttttctttataaattatccagcctcagttattcctttatagaaacataaacagactaagacaactatagtatattagtgcaataaaattatatttattaaaaagcactgtggttatctattggagccaattcctaactttcacaatttcagtacttccaaaatactgtaataactcatagcaatgtcatacatttgaattgttctttaccatttcagagtgcctgcaaataattcatctttgatctttccaacattaaaaagtgaaacaacattctttgctttatttcttcatgcacatatttctaggattatattttctatatagttacataattgtttctaacctagagctcaagtagcttttgaatggtacttggataaagatgaaattttgatccaatttatttctactccaatttcttgaaggttcactataatgataaatgagacgtgagagacataaagagctgtcagatcagttttatttctagttcttgcaaaatgcccaatgacagtagaaatctatagcagtggatctcaatttttttggtcctaaggctgttttactcttaaaatttattgaataccacattgagatttcatgtctgtaggttatatctattattatttattgaatttttaaagatgtatttattacttcattaaaaataacaagatacccattatattttaatataaataataatgttattaaaataaccatattttccaaaacaaaaaacagtgagaactatgactgtgttgtttttgatttttgcatctaaaacacctgttaaactaaggtctggttcaacagaagacaatgaaatcatctaatccgccttcactgtcaatctgataccatacattgtttgaagtatatgaaaaatatctagcctcacacagatacatggttggaagcagttgtatcttgccaagcctctgaaaaggttttgactacctccacaaatccatcaaccaaattttaaaatggccactgtctgagtccatatttacattgcaatatataatcatggctttcttttatacatgctgatttctctagcaagctactgctccacagcaatcttggatttctctcctgaaaattcgctttccttctctatcacacggccaggctgtgcattttccaaatttttatgctctgcttctctttcagtcataaatcccaactttagttcactcctttgctctcatatctgatcataagctgttaaaatcagccatgcaacttctttaatgctttgcttagaagtttcttctgccagattcattaaggttatcattcttaagttcagtgtcccacaaagccctagggaagggacaccatgcaggctaattctttgctactgtgtaacaatgtgacctttgttccagttcccaataagttccacatttccatatgaggcctagttagcctagccttcactattcatatctctatcggcattttggttacaaccacttaaccagtttctaagaagttttaaagttttcctcatcatcctggattcttctgagccctccaaactcttccatcgtctgctctttacccagttataaagccacttccacattttccggtatctttatagaaatatgtctctgctcagtaccaattttctgtcttagcccatttgtattgctataaaggaatacctgagattggataatccataaagaaaagaggtttatttggctcacatttttgcaggctgtataggaagcatggcaccagcatctgcttctggtgagggcctcaggaagttgccaatcatggtggaaggagaaggggagccagtgtgtatagattacatggcaagagacaagcaagagggaggtgccaggctctttttaacaaccagttcttatgggaactaagagtgagaactcactcccaagagaatgacaccaagccatttataagggatctgccctcacgatccaaaaacctcccgccaggccctaccttcaacattggggatcaaatttcaacaagagacttggtgagggccaaagaaaccgtatccaaaccataccagctcgtttgcagtgtagggggtgtaagtgcaaaagctttgaagtcacacaaaactcctaccttggttcaaactggtttaacaggtttgggttgtgtgcccttgatctgtttacttcaactataagccacagcttctgtttctgtaaaaagagggtaattattccaactttactggattattataaaaattaaatgataagtgtaaagtgcctagcacaggtactggcacatagcaagaatataaaaaatagtgtctgtccctaaatgtatcatattttcccacatctccctcaaaatagaaggcctggaatagccatctcagctcacctgagagtaagaccaaccttagagagaaggttctgaaattaaaactcatgggatctaattttaaaatatgctattctatttttatatatacaggatttattcagtcatcattcccatacatttaatggtatttatagtatcatagtccaacctgaaagctatggtagatttgaacagaattatccaatgaaccttcatattaaagaaatttcatgagttgttcttgatgacaaacagaccaaactaataagctaaggcagtggtagattattctattcatatctcattttataaactgatattaaatatactaaacatactgaaaatgttttcttaaagcctagaaagtagttattcatttcaaattatctcacattataaattcttttcaaattagttcaaattaaaagttcatttcaaattgcaaatgagttattcatttcaaactgaaatttatttcaattatacttagtgagcacccatgctgttaaatgtcattgtgcagaatccaaaaatgatagcatttttgcctaacatttaagtttttttcttttctttctatttgctaatagcatggtttgcctagaaataaatttctgatttcctatatcgctgatatgtgttttttaaaattaaagacattgacacctgagctttgtgtcttttctactattcaagagagaatacaaataagtatcaagagtctgaaactaaagtagctgcctaggaattactaaacaaattcttttgcacatgatctgatattttaaatcatacagaaatatcactggaatagtccccttcttagactggcagatttttgacctgacctcgcttaaccctgcttcttgtcttgtcttcctagactcagaacattcaatcccaactactttttcttgctgctcatctaacaattttaatttctcaacttacaggtcacaaggaagtcttaataaaatagcaagtatgtgctaacatttatttagtaccttgtgccttaaagtattccaggaactttatgtgtactaaatcatttagtcatcaaaataactgtatattattcttttcattttatagatgatggaaccaacacagagaaaataggtcagaaagggttatgtcagaaaaacagaatactctctaggtggtgttggggccgagaaaccaatatcccaaatatggcactctgacatgctgaactaaagaagaaacctcaatgtctctgtgaccactcccttcccccatctctcattctctgtgtcttccaaagcacagaatgaagttgttctctgaagtttccttctctctctaaagtctggacccacataagaagaaaaaaaaaccctatgaacccttttctgagttttcatgaactgaattcatatcacagaaagacaggctgaagtttgtcaacacacttgaacagacatatatcccaagccattgtcttctctgtggacccaacaggctttgtactggccattgtacatgctctaagtccactgacttcctctaaaaatcattttctatccccttaaaaatatcgatacttcctggactcccttttccctaagagcaagggtatataactctctggacctcatatggttgggaagtaatcgctgtgattttcctctgtgtgtagtgatacaaattcgtatgcctttttaaaattaatttgatttttgtcagttgattttcagccaaccttcaaaagatgaaggggaaggtttccctttacccctacagtggttaaaacaaggaatatctatccaaagaatttgttatataggcaatgcagagctgaaaagccgaacaaggggagtgagttaagccagagtttagcaacatcaaaaaggcattactacccttaatttggagagagaagtgaggatgcacagcttctaaatctcagggacctacctcacctcactggggagacctagaatcaggcaagggcagtctggtgagatgggaaaccatccaagagatacatacagcccaaagagatgccatcagaggagagggaggagaaagagaaatagcctggctataccctttctcttgccctccagtacctttcctttgcctgttagccaaatctgtttcaaacccatctgacttacgagcgtgaaacatgcagggatagtcctctctgtgatttacagcagaacaacagacgctcaaggaatcaatctcgtagcaaataggaactaaggcttaagtaacttgcccacgatcacagagctagaagtccctgggttgttcttcagggatcatgtgcgctgaacatgggagataggtcttggaaagtgacattagtcacattctgacatgtggttttctctgcccatatatatcataggataatttcagggaaatgtgtgcccaccaatatggtgggagagactttgtcttttgagtataggtgaatggactaaaaagtgatgagaaaaggtctgaggcctccaagccattttcagtgtgcaagtataacttcgggcctgttcaaggtaagtgaaagcaagtgatgcaggcaagaaataacacacttttgcactggctctccgttgataaattctagctgtttctccatagtccttactttctaggtggaccttgcaaagcacattagactagattgcttttcaatgcacaaaacttgtttcccccaaaatgattctaattggaagtgccaatactggcagaaaatgtgtgcaggtactagcctttaaagtgctaatgcatctcttaccaatctacgaagttacaggatggggcatgaaaaaatatatttgacggcacaaaagtatgaagcataggattaagtaaagcagattgaatatgactgttacgggctgaattttgtctctctaaaattcataacctctctaaaaagtcctaacccctagcacttcagaatgtaactgtatttgaaaacaaagtctttaaaggggttattaagttaaaatgatgccatctgggtgcggctgaaatcaagtatgatttatgtcctcagcagaagatgaagagatactgtgggcacacacggaccatggaaagaggcagtgagagggtggccatctgcaaggcaaacagagagggtgcaggagaaatcaaccctgctggcaccttaatcttgaattcccagtgtccagagctgtgaaaaaatacatttctgtatttttaagacacccaatctgtggcattttgttatggcagaacagacaactaatacaataccaaagaagcaacatctagaatccctcaaaatgtgaggcactattgagggctggagaaactaataatgacacattttgtcatatagaataatatggctgggctgccaggaccacaaagctatccacttggaatgagaagttagagttagatgtgcaccacaaaagcacaaatacatttgttttctccccttcatggctgcccacttaattcaataagcattttattgtgcatgtattaggcaggcagtactcttgcaggttgtaatctatgaacacctgattgctaaatagtaccattatgacatcatagaagactcctctttaaatgattgcttattgttttctttttgctcttttacatggagtcttgctctgtcaccctggctggagtgcaatggcacatctcggctcactgcaacatccgactcctaggttcaagcaattctccctgcctcaggctccgagtagctgggattacaggtgcctgccaccacatccggctaatttttgtattttttagtggagacagtgttttgccatgttggccaggctgggcttgaacccctgacctgaggtgatccgcccaccttggcctcccaaagtgctgggattacagaggggagccaccgtgcccagcctgcttattgttttcttattggtggaaataaaattatcccagaatgccaacactcctaaaggaggaaaataattcagatcctcattgcagtagatttaaaaccactcttttgtaatggaaattgtctaaatctgctccatggattcaacaattctttgctgacatgcctgtaatccaggtagctacttcagaggctgaggcaggaggatcccttgagaccaggagctcaacaccagctaggggggaaacaaagaaaagtcctacaaatgtgttttggcaatatggtaaacttttggtatccggaaatggatttttaacccctttctaaagatacctaaggcggaagaataccaattttcttagttgacatataaaatacaatactgagtattgctagaaataacgttttgacccaaaacagaaaaatagtcttgcagtttgtctttgtctattttatgctgctacaacataatacctatgaatgggtaattgataatgatcagaaatttgttggctcacagttctggaggcagggaaggtcaagatggatgggccgtcatttggtgaaggccttcctcctgtatcattgcatggtggaagagctaagagaaggggagaaagagagagagggaaggaaaggaaaagggaaagaggcaagaaggagccaaactcgtccttttataaggaaactgtccttttgatagggactgcacatttgtgatagcaccattaattaattcatgaggtcagagctctcataactgaatcacctcttattagggcccacctccacactgttgcattggggattaagtttccatcacaccgtttttggggggatacattcaaaccacagcattgttacacacaaaatatttcatattatatgaaatatgtcacttaacatttttacctgaatgtcaacaacatagagtaatgcagcagtttagaagttattaaataatatcttgaggatatataattccgacacacatgcatattaaagctgactcatacaacacaattgtcacggcgcaaatttaaaaaatgagttaggaaatcccagcgatgggttttgtgtgccaatttatctcaattgctcaaatttctctaattattcatcccaattgtaagccttctaaaaaggaatgcctatgaggaaacttgaaattttcttctcaatgttcttcagtacaacagttaaaaatatttaaagaaatgctgagtaagtaggaaaccctcagaagtaagctgaaaatgaacagtctcagtgggcaaataggtctaccatataaaagctctatttgatgattatctattgtaagatcatctttttttttctgtatggaagtaacaaatttaactcagagaaaagttgtattgccaaattcttgaaattaaaccttagtatctggcaacatttttcctcccatggtactagattactagatttttatgttaaatttaattttcttgaattcaaatgtatgagcttgatttctaaaaaacaaacaaacaaaccaaaaaaccaaaaccctcatatggagaaacatgaagttagcatataaacaagaaaagaagaaactttgatctataaatgaagaaaaatgggttttgataagctctctttgacaggtcaccctccttgggcttcagagttataaaaaaatcgatacgtgagattagagatgtgacagtatttctaaatttctgtttccaaccgtttcatgacttttcatttcctctagaaaagacataggatattaatataataagatttgcaatttgttaaatatcaaatgagtcaacaaatatgaagcttcaaggaaaaggtgacaacaggtggtacaagacatctgagctgcagaacaaagatggttgtaaagtgcacagaactgttacaaagccttaagagctactataatccatgattattaaataacaccacatactatttcaattagcatttgccaagcttgctttccttgtcattggattaaaaattatacccggattttcaagtgtattctatttgtgacaatatgcattgataatttctctcctcacactgctgcactctcacctccgttcccagattagctcctggaactcgagatatttttgtggctagagattgctttcttaatgttagattttccttacaattccatatatagtcaagcattccatgcatggtagttaattgtttgcttaatttggcaactgggatattagaattatgtatcattaggcagtgatatttttgtaaggttgtttgctagatagatcctatttcatttatattaagtcttgggaagataaactttatttttccagagcctagcagtgactgacacatattcgaatgaatgaaggtagatagaaaatgtctatattcatttacgtaatgattagttaaggagaaaagtacttcccagcataaagatttctggcaaccctttgcttatttgacttttcccttcaggcaagttcaaggcttgtgaaattcctagaaaggcgaggggagagaacgcgtgacacagaaaggggccggagttcgggaccctacgcagttttgggacgttatgggcatggagggaaatgtttgctttggaggctttgggtaagctagggatccgacaagccctgggcgcagggaggaacgctgccctccggcctccagtcgcgctccccgaagcccagcgccagcgtcgcgcaacctgccgcaggggcggctcccgggccaggcagccaggcgcgccctcgccccacccgggaacgccaggcccgcgcagggaggggcggggctccatggcggccccgccccgccgcccggagggtcacaatgtagggttagggcggccggcgggcggggctctgcgggggaggagccgccgggcgggggcggggatggcgcgtgggggaggggagggaggaggactcgcggagggaggaggacaacgccattccgggcggccgctccctccgtcccctctctcccttccccaaagcagcccgcggaccggcagcaaaggaacgtgcgaacgcgtgacgccgcccgactggctcgcgctctcccgtgccccggcgtcctccgcccgctcatggcccgggccgccgcggacgagcggcgctgaggcgggccgcgtggagacgtgaggcggccgccgtggccctcacagtcggcgtttcgccgcctgcccgcggtgcccgcgcacgccggccgccatcgccttcgcgcctggctggcgggggcgctgtcctcccaggccgtccgcgccgctccctggagctcggcggagcgcggcagccagggccggcggaggcgcgaggagccgggcgccaccgccgccgccgccgccgccgccgcgggggccatgaccgtggagcagaacgtgctgcagcagagcgcggcgcagaaggtgaggcgagtccgccagccggcgggccccacttctccttccgacgggctgtcctctcccgctgcggccgggcgccccggcctcgccgccgccgccttcccgggcttcctccccggtcacccccggcccctgcccatcgcctcgggggcgtcgcgcccagagcccagctgcgtgtgggaagcagagtgtagtttgcgggcttcaatccacttccttctgccgattgttttcccgtagcagacggtgccaggtattgagagcgaccctcacattcctacagtgctctgtgtggcatcttaatgaaactttattctctccccttaaatgagaaagaatagctagttgtcatcctttctgaaccgattttgtctttcaaaggtagtagtgtaccaggcctgctattttgcaaaacggtctccaccaaaatcgaattacctgcctcgcggggcaggcgtgttgaccaggtggactctagaagtaggtggtttgcttggtttcttttccttttaaggtttccctttcttcttcttcttttctgtttttttttttttttttttttttttcaatatagaaactgtccctaagagaggaaacctttctggccatgttattccaggaatcttttgtcccctaagtttgaccttgttctttcgttcaccctttactcttgcatcagtcacacattcaaatggtcactcactaaagaaaacaattaaaaaactgtttgtgaaactttatatctttaaagtgaatagagatcattctgctattttagattttgctttcagaatcttaagtgcactatcatggcttgcaccatgttctgaagagtagttggccatgatttaacttctttttttaatttttaatttgcgtgaaaagcattttgggcaaaagagtaaaccgtgccttagttgtgttggtattacggggacagttagggtttactgtgatcaaccaccagagttatgtttggtttatctgggtgagtaatgaatgccccaccctgttgtagatttggtgtagattgcaatattctacctgtgcttgactttagaataagacctgttctaaaatgggctgtctacatacagcctgctaaatttttgctttgagattatttttagaattttatgatactgctttaaagtaatcgaagatactcaagtttggaaagcaaggatagtgcattgttattttaggcacgttgggaaagttgtttttgagacttgtatgttagttgatattattggtaaagttagaaggatattgcacactgcactttatttacagtgaaataattcaagatttaataatgagaatttaaaagagtttccttcctaatcctccctattctattttgaataccttcaagttcaatttttaaagacttaaggcttaggaaagagcacatggtcatgtgaacgctaagcaatatttaatatgtatggtaccatttgtttataattgtcttcagtgttgaatattaaagtctgtttcaaagtgagaaataccaatttttcacttcctaagtttgaacaatgggaagaactttgtaagtttaggatttttttattttcatttgattttgactaaactgtattaaataactatgcaggctctattgtatggttcagaggttatgcataaaattgtagaatcaagaatcaagttaacgaaagtgatcttggctgtcgagtccaatttcctactttaatgaatcccctccacacacaaagggagtagtagttaattcaaaatattatcattatgatgctacttttagtatggctgtgttttagatcatttcattgttattggggattttttttagagaaacttttatacttccataatatttagattgttttacagaagaaacacttaaatgtgtttgctttccgtattaatacacgattactttgttactcatattagaactatttaaaaatatttatatggatacaagtaaaccatctacctcgataagttgacagatttaaatccgtcaagctagtaaccaggaagcggacttaaagctggtaactaggaagtgaacttcacacttagaagaaacaaaagtgaaagtctgtttttactcagacactttatgggttatctaaaaggagaggtgtgtagtgtatattgcatagccaacattttagccagttttcttctcaccttaaaaaactgtgtgtacatatgtgtttttaaattttaagtatttactatttaaaatttaagtatttactatttagctatattattttcaagatttttaaaacttttattttgcagatggatgtaagtttttttgttgtttgcagcaccacactacacaaaactttcatgattttttggttcgcctatagaattcattagtctttgtcacaatgtagtatgatgaggcaagaggctgcctttcccttttgatgtgttctttgcttgattgctggagtttggccaacccagggacttatgagatgtagtaaaactgcagaaagctgcttttctgaggtttaggtatttcaggtgaggtgcagttggcagcagatgagttaaattctgtgataattttggttttggacatatatcttcagcctttgtgcttcatgtttaccaaagtgtaggagccttagatctcagaaatttgatacatagattcaagttccaaatgaggatactccacggcgccccccccccccccccccaatctatctaacccgatgaaccaagctaggattctttagggcagttattattgggaggagttttgctcccagggaccaaattaatttacagagtgaaatgaacaggatactatttaattaaatgtatccttctgagttgaataaaatatattgtttcactctagggcttagaacagttctttacacatagtaggactcagcaaatatgtgatgaatgaaataagtgactggtttccaaaaggagtgtagtactttgtttcctaactgaatcttggaatttaaaaattattgagaaacaatgaggctgggcatggtggctcatgctttaatcccagcactttgggaggctgaggtgggaggatcacttgaagccaggagttcaaaaccagcctgggcaacaaaatgacacctgccaggagtggtgtctcaagcctgtaatcccagtactttgggaaggtgaggcaggcggatcacgaggtcaggagttcgagaccagcctgaccaacatggtgaaacccagtctctactactaaaaatacaaaaattagccaggcgtggtggcacatgcctgtaatcccagctactcaggagactgaggcaggagaatcgcttgaactcgggaggcggaggttgcagtgagccgagatcgcgccattgcactccagcctgggcgacagagcaagactccatgtcaaaaaaacaaaaaaccaaaacaaaacaatgaaagcttgaaaaactgtgcgtgctcatgctaggagaataggcagtggtactgaaagacaggatgtgggatagatctcaaccacctttttgtcaccttgggcaagtcattaagtgcttctgaaggttctttcaaagcagtaatattagtatgttaacagtagtatgttaaggctttaaactttagcaacttctttagattagattgtttaatggtcctaagcaagtgttctgtatagggagaataaaaaagaaacagtatagaatggaagcagaggaatctaacagatctacagtcaactttcactgaattcctccaaagatgagggttaggtgggaaggttgtcatagattagccaagttcaagagttaaaacttgaaaaacaatgcagactggattcagggtaaatttcttacttaaaataacatgtattttccaatttaggattatctaaggttataaaactataccatgcagcatttgatagttaacattacttaaatcactttaaatgttacttaaaggaggcattctttattaggaatcagttgattatcttattattagtataagacttgatttgggcagagaggtttccagctgtttattccttttcttattctttccttttcacacctacttttgacttgtagactcacattgtatccagtcttttaaatgaattcacatcatttctaataaatattctgttgattttcttcaatattatatgtatacagtccatatcctttacaaatacttaatattctgacctctttcttgtcattatttttaccacttattactttaagatgacagaatgctactacaatttatgttagtttctattatatattgtttccttataatatggaaattttcttacattcctaagttttataaatgtttcaaaactagatttagatgttgactgtcatgtctttttctttgcagtgaatgatattttatgtcagtaacataagaaccatttgtacatacgatatatgaatatttactatataatccgtgtaaggcgctgtgctgagccttcttacaaacttttttcatttaatctttccaaccaccttatgaagtgagtgctatttttctcctttcttattgaagctgaagaaacagtattggagaactaaagcaacatttcatctctagtatgtattaagggttggataaactcaaaagtcatgtgatacacaagcccctgctcttaaccacaatgttgtatcgttttggctgtccttgaattcctgataaaaccccatttggtcatgttgctttactattttaaatatgtttctatatttaatataataaatttaaacctagaatttggtatacaattggccttctgtatccacaggttctgaatccatagattcaaccagctgtggattgaaaatattctggaaaaaaaaagcattgttgcatctgtactgaacatgtacagtctcattttggtcattattccctaacaatacagtataacaactatttatgtagcatttacattgtgttaggtattataagtaatctagaaatgatttaaagtatgctggaggatgtgtggatgtgtaagttacatgcaagtattataccattttatataagggactttgacattcgcagattttggcctctgggggtcctggaaccagttctccttggattctttaatgagattgcttacaaggtttggtgtgcccatgagggctattaagataaggttagctcataaaatgattagaaggctttctgtgttttcctgtgcttttggaattgtttagtgtaggattatgttgagtcattcaaaattggtggtgtatgatcttttttgatttgaaaaattagatagcgttcaactgaggtacttgttactttgaagatttggtgaacatgactgtatcagggctgagctgctcatttagagcaaattttaggtaaagtttccaaattttgcttattgtcttttaaattttctatcttttctagggtcaaattttaaatttttttagttctagaaaattctaaatttcatttaggtttctgtatttattggtctaaagttttgtcctaaatctgtgtgtgtgtgtgtgtatgtgtgtgtgtgtgtgtgtgtatgtatgtacatatatatatatgtatgtagacatgccattttttttatccctgcttgttttgtcgtcagtagtgtttgccagatgctgatcttatttcctgcttttttttttgagacggggttttgctctctcacccaagctggagtgcaatggtgcaatctcagctcactgcaacttctgcctcccaggttcaagcaattctcctgcctcagccttctgagtagctgggactacaggtgtacaccaccacgcccagctactttttgtaattttactagagagagggtttcatcgtgttggccaggctggtcttaaactcctgaccccgagtgatcagcctgccttgggctcccgaagtactgggcagtttctctttgtatttctaatggattcaatccaaacttgtgtttttgtcttttagaatttaaccatgcacatgtggtgataactgataaatttaatctttttattgtcatctgattatccatttattagtcttgttttctccattcagttttgatggatagaccaaattttcattgtatcaccacccccacccttgtctttaacgttttcttttcaattttggctcttttaattttaaacaaatatatttttataatataaaattttgataatataaaacattaatagcttttttcggtaacataaaaaattaacttttttctccacccatttgccccaaattaggtaagacattttagcatgttttttcttatggtattcctagttttgttgggataatatagaattgtaattctaggtgatgaattttcttagtgttgcagatgcattattagtagctagttttttttaattaactatttaattttaactgtgttttttggtctgttgtataatgctttttgatggtttgatgccactctgctttttttttttttccagataagttaactctctgtgttaccttgtaagattttactctttgtttttaagagttcagaaatttcacttgcgtgtgtttatgtatgtatctttttaatggtcctgcctaggatttttcgtctgaaatctgtgttctcaggaatttttcttccactcttttcctcatcttcatttaaaactacattatttggattttatacgtcacttatctttcttcctggcttcaaatgtttcttctctcccattttgtcctgtatgctgtggtaactttttagtttgattatctagattattatttttgtaatgccagttctgtatttactacccttatatgtggtcagatagtttacaaagagtttgtttttaataatatatatttttagtttggttctgaagtacacataattgaattaattttgccaattttctcatgatcagctcttcctgcaaatatattttcatttatttgttaaattgcttattttaaataataaacacacacgaaccccctatttaaaacaaaagctggaacttcgataataacctatatcccttatcctatccctttactttcatttgagtgtatcatcttgaatcctctgttcatcttcctgttgatttattgcatctatatcaatggctgaaggtattttttttaatgttagttgttttaacttaaaaattttaagaacttttccctgctacaatatctagaaggtagtcgtctgtatttttaaccaagagttttaaagttatatttgcaacattttatactctttttcatctgtgcttgagttttgtatatggtgcgaggtagggatacagttttattttcatcatatacagattgaatctctcatatccaaaatgcttgggaccagaagtgttttggattttggacttttttttttttcccttcagattttggaatatttgtattttgcttacctgggttgggtaaatatccgaaatttgaaaatctgaaatctgaaataagccagtgagcatttcctttcaacatcttgttggttctcagaaaatatggagttttcaaattgtggagcatttcttatttctggcttggagttttgggatgtgcaacctgtaaatgattttaaaaagttcttttgttatccttgctttattgaaaagttaatgctctcttctactgaattgataggccatctttgtcatatatgcaaaagtttaatgcaaaatttttttccctttccttgactttcatcattcattttgtgaatatcatcctgtgttcattgttgttgctttaaaataatctctcatactggaaaagaaagttctttgcctttgttcctttttttcagaagtaacacttgacttttccttagaaattttagaatgatcataccaagctctctcaaatcctctgtctttttgattaatttgattgaatctgtagatccatttgggattattaagatctttatgatacaggatgagcaggatatactatttttattaggtcgtgtttaatatctcttgtatggtttataatttaacacaaaactattgtacatcttttgtttcaggtagttgataatttctgataactgttatatggcagtgcttttaaaaatttgttattggtgtatgcaaatgcagtggtcttttgtatgttaattttatacctagccaccttgctaaatgtttctaataccttttccagagacaattttgtactttctgtgtaaaagatcatatcattaagggaggagaccacgcctcatattgtcttatgcccaatttctgccctcaaagaaagaaaaagtaaaaactaaaaggcagaaatgaaatccacaagcagacagcccagggccacaccctgggcctggtagttaaagatcgacccctgacctaatcagttatgttatctatagattacagacattgcacagacactgtgaaaatcccgatactgttttgttcagatctaattaccggtgcatgcagcccccagtcacataccccctgcttgctcatttgatcatgaccctctcacacgcaccctcttagagttgtgagcccttaaaagggacaggaattgctcaccccgggagctcggctcttgagacaggagtcttgctgatgcccccagccgaataaaccccttcctcctttaactcggttctgaggagttttgtctgcggctcgtcctgctacatcatgattaaaaagttttatgtataatttcagtttttgtgcctgtactttcattttttttcctgtactagcaaatacttccaataaatattgattagaagtgataacaatgagtatttttttgttcttgctgatctaaaaaggcagttacctacttttgtacctcatgcatttctgaaatatttacatgtgttagttgtgcagatttacaaagtaggttctgtttaactaaaagatattgtagtattttcagtcgtgatgcttgcaggtattttttctttgggtactggtgacctttgtttaagctttcaccctaggtatcctgggtgtggtggtggaggggtgctggtagtttgtcagtctcttctctgtcatcctaggaactgtgaagtcaggcagggcactttttttttgtattagtggccctcactaatttccttctccaggggccactccacaattgatttctgccctgatgtgcttagagtaaggtgtctacagggtctttcttcccctgacactggcataattttactctctaatgtcatagaattgctttaagcactgacctgcagcagtggcctgcctttttcctacaatataatcactgatttttgttatgtttgaaggaccaaatttggcttgtgaaagtgagtttaggaatgtcactatataatgtgagcaagtagatgatgtgaaagttgaatttataaaaggatgaggccttgcatttattttggcagactttaattaatttccaaggacatcatccttgtcatgacatcttgttttatgtatgtagtaagtaatttttcagtttttctcttttttgccccttgattaactctgcttcagtacagaccatctgctttatttttagtttttggttctctgaactgctggatattttaaatgcccagcaatattttccttagtcttgttactataggtttagatcagtttcgtataatatggtttttatggactgtcttaattatctgtagtgcttgctaaaagtgcagacttctgtgcctcaccctagacgtattgtttcaagatgttgagggttgggctaaagcctgcttaataagaatcgcagattattcttctgcacttaatgtttgaggatcactggttgaagttaattagtattcttaaaggtaaaagtgccttgagcactgtgtaaattgactgcaggggtcctttagggattgaattatcacaatacaccaaatttaatatggaagcagggtctttgaacggacattgtttttttttgtttcaggtgtttctctccatcagtgcagcaacatgtttccttgtagaggagctgtctcctccctcaggcttttctggccaacatctctatggaaacccaaagcttcaggtggctaggtgggatacttgcccctcttactcctggaggcacaaataagttgaatcgatggattaaggagttggaaagtgattgtacatgctaaagttgtaatcttcctgtttctttctggctgtttttttttttttttttttttttttttttttttggtatgtgcgtgtgtatttgtgtatgaataattcctataggatttttttgtgggggctaaccatagcatatgaaaacttatgtacaacttaaatatattaagattagtattctttgtacaattttagacatgaaatagaatatcttattgtcctggaaatttcctttgttcctcattcatactgtccctcttttctacaccaccccccacccccacactactgctatcttgacttttttcaagttaatgttatcgtggtatgatttacactgaaagtgtgtaatttgatgaatttggccatacagaacatttctgtcactccacaaaatttgtcctgtatcacctttctcattaattatcaacaccgtcattatttcaggcaactgttgatctgatttttattactgtagatcagttttggctgttctgggtcttcacatcgatttgtttataccaaattttttttttttctcgcatctgactgcttttgctcagcaaaaagcttttgagattcacccatgttttattgcatgtatcaatatgtttctttttactatggagtaatattatataaatattctcacatctgtgtattcatgtaccttttgatgtacttttttttttttttccagttttttgacccatatataatgttatgtgtacatttgtaagcaggtctttgagacgtatttctatttctcttgggcaaatacataggtgtagaattgttatagtactaaattgttatccaaattgattgtatcattgtacattctcattagcaatataggagaatttcaggtggtctacatttttgccaacacctggcatttttaatcttttatgttttagccatttggtgaatatgtggtgtacctcattgtggtagtaattgtatatttccctaatgactaatgattttggatgtctttcaagtgcttgttggccagtttgaggatgattttttttaacattgcttctcatacattatccagttttaacactcctacacgataggaatcacagtagctgcattcttccaagtcttaaaatggcaaaaatgtcagagatgtagctaaaggtagaacactccaggaccaagtgctaatatgttcacaaaacaaattgagattgcacaattttttttgtttgcttgtttaaactaacacctgataaaaaggtacattgctgaaaaatgggaactcatttcttcatcatgcctcaaagtaaatattaaatttatctctttaacaattaattgcacacatacatgagaaatctttatgatacatattttattacaccgtgtacaaaaataatttcacattttagttgggttggaagtttgaaaagaacatagtgcagttgcaggggtgggatgaactgtggtgaggtaagtaaattggacagaaattgggcagaaagatacttcctttttttttttttttaacagttttttatctgtctgaagacagggaagaagaggaatctgaattggaaaacccccactatatctgttgggtttttgttgttgctgttcagtctggaaatgggtggtgtgtggtgagaggtcattaggtcatcagggcagaattgtttgcagagctgggagctacatcctcacggaagtgggatagatgtgctggggaggggtgtgcagagaggagccaggaatgatgtaccattagtggccagggcttgttatggtaacaccaatgttgaaaccaactgtgcattcacatatacaaaagttttgtgtcttaattcatgccagaatacatgcataatcaaatgtctcagttaaggtggagctacagaaacactgggctgaatgaagttctggggttttctttgtcttcgtgtgaggcctctgggctgggtctgggtgtctgatcaagaatgccctgaagttttcccatggggctttggagaacggctttggagctgggcagagctgaggatgagcacagaagaaaggaaacgagaaatggtccactacctgaggtttaaaatcctcaatttttggagggaagaagtgacacaagattttatcggtgccacttcaccagcaagaaacctctaaggccagcagtgcctctgcccaggctttgcttacactcactgggctcgctctgcctgctcggcccagcagggtgctctcagctgatccccagcccagatcccacgaccactgccactccgtgctcagcccatggcgggactgggtataccgcatgtggcttccacagctggactccagcattcagatgaggggaacgtggtggaacccagaaactcggagacggcagcaaccgtggagccccaagggggtgtcatagcttctgcctggggagtcccgaggtctgagccaccagggaatgccacagccctctcttgttcctgccgctcacagctccctgaatgggggtgtgttagagcttgtttattcctgctgcgcatggctttgtgaatgggggtgtattatggttctagttcgaggggtcctgatgtttgggcccccagaggggtcgcggctcatcactcccatattccagcaattgggagtgtgtaacagctcttttcatgcccactgcccacagctccaggagccagccaggtgcgtgttacagccgttctttgttcccaccgtttggcgagttctgggtttttgtccagtgaccaagaataatgaggtacgtggacaccagagagtgaggaaggcagagaagaatgttattgagcaacagaaaagctcttgacaatgagaggggacgtgaagtggatagccctctgtgtgagggggccccaaaagctggtagccatctttgcagttgagtccagggtttttttaggtttggaatgaggagatgtgggctggaggtagccttggaaaaggcaacattcaattggtttaaaagcattattcggaaagaaccaattgggaaagagtaggcaaaaagaaaagttttcactccagctgtggactctatctatatctagaacaggcagcttggtaggctttaaactgtctttggtttgaaggtcaggtttcaccagggacctgtccctgcctgcctaggagttggtctactgtggcgcctgcctaggaattggtctactgtggcgcctgcctaggaatttgtctactgtccctgcctgcctgggaatttgtctactgtggctatcagaaacagctctgcgcaggcctcctggggtcagtggacactctctttaccaattttggtagcatcatgcagatttgcagaactggcttctaggcttcttcccaagtgaggcaggaattgaagtcacttagaacagtggaacttacagaactgacagtgtttccattcttgctgggtggcgccaggaggagagcaccagtgtacctgagcatgtcgaactgtagcagagtagctgaaagcagcatataagatgaccctggtcagctctgtggtttctatggtgtaaagtgggtaggggtttcaggcctttggggttacagagatcagagccactccctcaggtcatggggtcctgtgctaggaggtgtggtcctagggctgtgtgaacattggtggggtttgccattactttatttttgtccatcttggtgttggcttaggcaaaccttagggtctgcgtttttttgttgttgttgttatttttgagacaaaggtctcaccgtgtcacccaggctggagtgcagtggtgcaatctggctcactgcaacctctgcctcctgggttcaagtgattgtcatgcctcagcatcccacatagctgggactacaggtacacgccaccaggcctggctaatttttatgacggggttttgccatgttggccaggctggtcttgaactcctgacctcaagtgatcttcctgtctcggcctcctagggtctgcagttttgttgttgttgttgttttggggcagagcttcgttcttgttgcccaggctggagtgcagtggtgtgatctcagctcacggcagcccccacctcccaggttcaagcgattctcctgccccaacctcctgagtagctgggactacaggtgcctgccaccacacccgtctaatttttgtatttttactagagatggggttttccatgttgtccaggcgagtcttgaactcctgacctcaggtgatccacctgcctcagcctcccaaagtgctgggattacaggcgtgagccaccgcaccccgccgggtctgccgcttttgaatgaaagtaaatgctcttccaagcatttcttgcatgagcagaagagtgtgtagaattctctcggtttgctgtctaaagcaagagggctgactgaccactttagggccacggcctccatccccgccacttcccctcccttcccctcccttcccactccttcttttcctgagtgctgatgttgttctgccttaagcttctaagcaggggcatcttttatggtcggggggagggaggtgtgggaggcaggcaggggatgttgcaggagagctactgataacccagggcctctgtcttttccttattgaccatttttatgtcttctttttaacatgttaagattatttcccaatttcttagttgggttatcttcttgctgttgagttgtaggaattctttatattttggttgtcttttatcatgtatatgtaattacaaatactttctcccaatgtgtggcttgtatttgcattttcttaacagtttctttgaagttgaagtattttaatattgattgtttaatttacttttatggttagtactttaaccattttctttttctttttcttttctttttttttttttttttttgtgacggaatttcactcttattgcccaggctggagtgcaatggcatgatctcactcactgcagcctccgcctccctgggttcaagcgattcttctgcctcagcctcctgagtagctgggattacaggcatgcaccaccacgctcagctaatttttgtatttttagtagagacagggtttcaccatgttggccagcctggtctcgaactcgcgacctcaggtgatccgcccgcctcggtctcccaaagtgctgggattacaggcgtgagccaccacgcccggctgctttaaccattttcttgaaacttagtttgtaaattttttctccctgtgttttgttctagaagttttgccattttaggtttacgatccatttggaattcatttctgtgtgtgttctgaggtgtcactaagtcaaggttcatttattgcatgtggaatctagtcccagcacctacttttgaaaaagctgtcctttcatcattgaattatattggtacctttatggaaaattaattgatcatgtatgagtgggtttatttttgaactcagttcctttctatccttatgtggtgccgttctttcttgattactgtggctttgaaatgtgccttgaagtgggtgaatgtaaattcttcaactttgttcttgttagaaatttgttttggctattctagaattttttgtatttccatatacaattctgaggtactttgaacagttggacaaagagccttctggggtttctgagtaggattgtgttggatgtatggattctttctgactgtttggacatctttacagtattttagcctttcaatccaagaacacatatatttctccatttatttaggttttgttttttaacggtttaaaggtctttgcatatcttttgttacagttgacttttttgatgctattgtaagtggtattttttatttttatttttattttttttgagacgcagtctcactttcactgcaaccgccgcctcccaggttcaagcgattctcctgcctcagcctccctagtagctgggactacaggtgtgtgccaccacacccggctaattttttgtatttttagtagagatggagtttcactgtgttatagccaggatagtcttgatctctggacagcatgatccaccagcctcggcctcccaaagtgctgggattacagttgtgagccactgcaccctgccagtggtttttagtttttattccaattgttttttgctggtatatagaatgtggttgatttttctgtatgaagcttgtatctgcgactttgcgaaattcacttattctaataaatgtatttaccacttttattcattttaaaaattgtgctttttggggtattctctaaaatgtttaatagaagtggtaatgacagacatctttgtcttgttcccgattttgtatggaaagcagtcttttactactaagtatggttttagttgttgcacttcttattttgttaaaaatgtgttattgttaatttatacttctagatatactacagcttaaccattctacagttaaactatttgtttatatatctttttatatatttatggtccactgtgattcttttctgtgaaattgacatttgtttctcttgcctgttttttcttttgggctatttatctttttctttatgatttgaggtagttctttatggtttagatactacttttgtttttctatttacaatagtccacgtttactctcatggaatgtgttccaagacccccagtggatgcctgaaactgtggctagtattgaaccatttatagagtatattttgaaagagactacattcacataacatactgtatatgttttcaaaatatttgaaatagtataccatatatagtatggttcagtactatatagaatatagtatatatagttttttcttatctatatatacctgtgataaagtttaatttataaattaggcactatataactatatagtacatatagtttttttcctatatatagtatctacctgtgataaagtttaatttataaattaggtaatttataaattagtagagactaacaacaataactagtaatgaaatagaacaactatgataatataatgttgtgtgaatgtagtctttttcaaaatatccgataactgagatggctgctgactactaagtgggtagtatacacagtgtggatatgttggacaaagggaagattcatgttgtgggtggcatggagtgagatttcattatgcacagcactcagtcagaatagtgcacaatttaaaacatcgtttctggaacttttcatatttttggactacgcttgatcattggtaactgaaacttcaaaaagtgaaacgagataaggggaaactactgtatatgttttgcaaatattttctgttttcacgatgtctttttattctctttatgtactttcatgagtagacatttttatttttaatttagtttcatgtataattagcttcctttaatatttgaacttccatgtcctgtttcacaaagatagtctcatttattgccctctaagtgttttcttaatttgtcttcatgcagggtttaagtttcattccacttgggtttgatttttgcatgttgtttgagtagatgtcagaatttttcccctctggagaaccagcgactttattgaacagttcctccttcccattaatactctgcctgacaacagtatgtatactttttaaattcttcagttgggaccattgtaaagaaaaacaggtgtcaggaactttcgcccttgaattaaaaaatatatttttgagacagagtcttgctctcttgcccaggctggagtgcagtggcataatcatagcctgcttcagcctcaaactcctggacccacactatcctccctcctcagcctcccaagtagctgggactacaggtgtgtaccatccacccagctactttttagttttttttttttttttttttttttttgtagagatggggtctcgctctgtttcccaggctggtcttgaattcctggtgttaagcaaacctttcactttggccttccaaagcattggcattacaggcatgagccactgtgctcagccaaattaaaatatttttattatggttttactgaaacttgtttaaatataaactaggcatacatttattatgttctgttgggtagctcttatgtaataagatgaaaaaccaactactaacttaaaggtaaccaaaactacaaaactggagaaattcagaataaaaaggttagcttaatttgacagatggcagtgttttgcagaagctaatttggcatttgtggcttcaactaaggaaatcggtatatgtatttcaggatattgtaatatgttaagcttttggaagtaaattttatttctgttgtcaactatactgcatttctgacttgatacctaattaataaccattattgtagagtgagtggtatttttggtctttttattgtaaaactgtaacagatatgctctcaagtgtgtttttttttttaatttttttttcttaagctatagctcagtaaatgccgatatttccatgttgaactgaacaggttgtgtgatttaatgtagagcaggatacacttgctgtgaataagaggtaacaattatagcttacctataagttagcgccaaataaatattcatcagaacttgtgagtactttgccttgtgtacatatttgagtgcctgggcaatcaagagagtgacatactatgcagcgtgataactgcttttgtagacattgtgaaatagtattcttatactgaagtaataattgtattctaaatattgctttattgctagtatgtgtttctgcttatctgtgggaattttccaaggtttgtctttgattttctgatttctttgcaagctttacctttgagagattatatattttccgagtcatatatgttcattactatcaagtatgtgtattgaaaataagtgtaatgttacatcttcacataaattctagttttaggttttcaattgcatgtgtacatttctgcttagtcatcactcagtatcatgaccgttcatttatgtattctttgttttaagcagactgagaaatagataacatacaaaaagcttttaaattggtagtggctagagccagaggtgcacagataatattgaaagttaaataaagtatttgtaggtagaactaagaggatctaggaagactaggaaagatcttataaaggaggtaatagctgaaataaactgttgaagatttgtaggcaggtcgaagtgttattccaagtaaagagaagtctatgagcaagggacaaatcttcaatgatttagtgccttctgttatctacacatggttttatttggctgagtgtgatataataataaatatttggtctttttcccttgttcctggcatggagcccctaaagcctttggaatttactctctagtctgtgctaatcagatgagtggcgtgggtctgggtgtttggggaggagaggctgtgtagcttccacttcagggtgggtactctttaccactgtagttagagggtgagaactttcaaccccagtccagcatccggggagggaagaggggctgcagattgagcccaatcaccaatggccaatgatttaatcaattatactttaatgaaatctccagtgccgtgtgtgtgtgtgtgtgtgtgtgtgtgtgtatgtttttttttttttttttttttttccttgagacagagtctcactctgttgcccaggctggtgtgtaggagtgaagtggcacaatcttggttcactgcaacctccgtctccctggttcaagcaattcttctgtcagcctcctgagtaggctggactacaggtgcatgccaccgcgcctggctaatttttgtatttttagtagagatggagtttcaccatattggtcaggctggtcttgatctcctgacctcaggtgatccacccgcgaaaggctcccaaagtgctgggattacaggcatgaacaattgtgcccgaccccttatatccttttaataagtgttcagtaaatagtagttctatgataatgctcagcgtatatggttaactttttcccctaattctttttttttttgagatagagtctcgctctgtcgcctaggctggagtgccgtggcgtgatcacggctcactgcaagctccgcctcccaggttcacaccattctcctacctcagcctccccagtagctgggactacaggtgcccgccaccacgtccggctaattttttgtatttttagtagagatggggtttcaccgtgttagccaggatggtctcaatctcctgaccttgtgatccgtctgcctccgcctccgcctccgcctcccaaagtgcttggattacaggcatgagccaccgcgcctggccctttttttctcttaaaactgtagaattatattattaatacactgttagtatacagaaattgttttcaaggaatttgtttcagggtccagtgaggacaaagaaaggacaaaaagtagaacaaaggagatttggtgtaaagaagtattgactaggaacagatgattggctgctagagggtaaagagaactctaaagtaagaaatgaatttgggagaggcccttcagaagccccaagactctgagagattgggttcttgttggagaggttgtgaatggagcccactggatggcagagcagtttatagaagtgctgtagcttgggacattcctgccagtagctcttttgaagtggtgtagagtatgtgctttatcgtatctagatgaatggagtttccaagagaccataggacatattatataagtaattagcatgaccaaaaactgtatttgctttaaagaattgtgacaaatataactgctaggaattatatagtattccagtttcagagttctacttagagcacgtttattttgttttattagtataagggagtttatttttggattataagctaattaggcaaacaagtacagaaactagagatgcataaagatttaattggacaagagagctataataggaatctgattattagcatcaacaagttaaatacatattttatttaaactgcagacatagtgatttaaggatatgatttgattcataaaagttttgtttacctacttgttttccagaatataggcactctaatttaaaaacagactgtgttccaaaagattttgcaagttgggtttttggaactgaaaatacatgttcccatagaaaccatgtttcctggtggtgtgttcttatttagaaatgtaactctgtgtgaacttagcttatagtgctgagtaacagtattttttgggagaaatacatttagagtttctactcatgatgtatttattttatctactaattaatagggatggggaatactcttttacattgtaattaaaaaaattttttttaagacagagatttgctcttgttgcgcaggttggagtacaatggtgcaatctcagctcactgcaacctccgccttctgggttcaagctattctcctgcctcagcctcccgattacagggattacaggcatgcgccaccacgcctggctaattttgtatttttggtagagatggggtttcaccatgttggtcaggatggtctcgaactcctgacctcaggtgatctgcctgcctcggcctcgcaaagtgttgggattacaggcgtgagccactgcaccctttttttttgagatggagtcgctgttgcccaggctggagtgcagtggcgtgatctcgactcactgcaacctccacctcccgggttcaagcaattctcctgcctcagcctcctgagtagctgggactacaggcgcctgccaccatgcctggctaatttttgtatttttagtagagactgggtttcaccatattggccaggctggtctcgaactcctgaccttgtgatccacccatcttggcctcccaaagtgctgggattacaggcgtgagccactgcacctggcccagatggggaatactcttaagggtcataaacatgatgcagatatggttgaaaggttgggtgacaggtaggaaaaaggactctgtggcaagggaggatggaaaccatcatttatctaggactaactatatccattgttctttgctagctatttctcataaagtatctcatttcttttttctggattgcatgaatgcttaatgttttagctctggaattctataaaaagtaggaagagacttaaaatttagaattcttggcatttttaagctttaatggaaagggtataccttcagatttatgtgcccatagaggtatatgagtaatttattttaatgctaaagtgctgttaatccaaaaagattgagaaaaacttcaatctgtgacagtaggatatgcagcatacctgaaccatttgttacccgccaaaaacttgaaaaccaggattagttgcctggtgagtaataaacaactcttcaagagaatgcaggttttggtcagtaggagttttactacttgtcacaaataaggagaatacttggagtattctttagagcattgttgcctctagggaaagtgacagggaggttttatggggtgatggagaggggagagggtgtgacatcacatgtagaggaggggtcccagtggtgcaaatgcagtgagtcactatgtcagcaggtaggtcacgtgttatggtaatgaagctgtagttcccccccagggtgctgactttagcatgataatgaggaaagttcacttgggttcatctgcatgttgcgagggtctgtcaggagctggctccaactgactaggtgagagctcattcctcacagggtttgggaaaaaacaggtggcaaggtaggaggttgtaaacaggccagttacttaagttgattaaattcctatagtcccgggggaccctccttgtctgcttacacattcatgggactgtcatatagattatttgcaatagggaatttcagtaatattatattttatacaaaccttcaagtgagattgacaggaccagaactgggaaattctagatggaatgtaggagtgtagaaagtttgcttagtaagtgggcctgacttatgtcatttagaagaattcttcaatttagaagaattagaaaatgtgcttattagttggcctgatatatgtatgcttctcgttcctgtatgagagggaaaaaaaaaaaaaggcttctctttacctttctaagttctttggctggactagaaattaaattgacaagaggcagattaacaggagaaaacccattttaattacataggtacttacaggagtcccacaaaataagagacttgaagaagggtcacatgattgaagcttatgtagcatccagagctacaaaaagtgataggggtttggggcttctgggaggggtggcaacacaagttatgagagggtgggggaggaaatgtatggtgaataaagggtgtcttgtgtagataaaaagtcactcaagtaataaaagttgttgcaaccctcttgctgatacagatactttttctaatgtagatttcctttaaaaatggattttttttcacaaaaggacagtttttcaaggttactcttgtgtccgcagtttctcaaaataactacctcaaaatatgccaaagaagtatatttttgggtggcatattctagtcgcctgcagtcttatttggaggtggtgtgtcctgagccccagcattcccatctccaataattagttagtgcctcttttctgtgggataagcttgtcttgtgatatggcttgttccagctcacatctgcaggctctgctgtattcatttattcagtcaatgttgattgcttgccatgtgccaggcattatatgtatgtaccaggagtacagtgatgaacgaattatggtctcattgataactttgaaatgattaacatttggtgcctagcagtgctttagtgcacgtgcttctgaagtttaagagttcttgtcgtctttggatttaccttgtgattaaccatagtgtattattataatttgtggtgagtctcacagaaggcacctacatgtgcagagacctttgcattatgaaggagaatggtgttctgtagaccctgaatgaaagagagggaagaggaatgccagggggaaagcaaagcaagttagtgctggggacagaggtagggactctagcatgcagaggtcctttaagctgtgaggactatactataggaaaattcctcagacaagtcatagaatattacagttgagggaaatgaaagatccggcttacacattaacaagaaaaacatgactcaggagattttttcttcttctttgctttctggctatttagagactggtttggacttacaaacatgaaggatgtgttatgtacttgaaattcttggacagtgagtattagaggtttcttatggtaagagaacatgagctagagcagtgtagtgttagcaggtagatgcagaggtttttgcaaaatcaggtgtgtgtgtgattactcactttaaagacagtataatgaattaatcttgtcattgacaggtaactttgaaatgcctacatttggtgcttagcagtgcgtgtgattctgaagtttaagaatgtctttggagtttctatcagttttttttttttcctctgttcttagaaaatttggaaggtttttttagaggtcattctaagagttgcgccccccgccttacacctatccccaaggatggaaacctttgactttcttttcctgaaccaagtttcatttatatttggaaatttagctgaaggagccaaggactgacttaatgagtcacccaccgcttaacacaaactgtttttctcctttgttgtcagtggtgctttagttttcttttaccattttataagtattttacatcaacataatagtggatttttgcactgagttttcattttttattgaatctttaatctccaatgttagatatcctagagttgagaaaatatggcaaggacatggaatttgaacgaccaagtttcaaccctgtctctgcacttactaatgtcttgaagtctgtgttagctatgaaatgagagtaactttctagagggtgtgtgggtatgtctgtattaaatgagagtatatattggaaacattggaaacagtctggtatagggaagtttaaaccttcactctgaaagttcgattaattgagtgctgaaataaactgacagtaaacagattagcaagagaaagtgcatacaaatttattgacatggaagcatgggtgggagctacaaaaaaaatatgaggctctaaaaagggccagatgattgaagcctgaatcccctcttcataaagggagaagtggaggatgcaggcaattttagaggaagagtaaatgatttcaaggggagatgagtgtgcctgaagagcagacaatgacctggaacaaaattcttccgggctctgggagagatggtggcaattttttgggaaggtgaggggcagaactgtactgcaaacaaaagttgtctttgttatatagataaagtctctgaggtaagaaatagcccttagaagaatagtcaaaagaataggtgaaaagtctgtctgggtatggtatgcccaggtgcatggcaatttttagttttctttcctgctataggagttaatcttctctggtttatatagattccagggaattatccaagacaatttcgttccttctggatgaacgtccctcagtcagataagggaacttcagagaaaacctctccctgtgctttggaagggaaaacggggaggcaggagaatgttggagagagaccttgcttctgagtcctttcaattgcttttgttcagagcactcagcaagccagaatgccatactttggggcattgttttcgtaacctcaacattgatatacagcaagagtataataaattcatattttcttgccttgtcttgggccagtgatccctttttttgcatcctcaaaaagttatactgatgttaaatatgccctctttactgaaacagattttaaaaatacccagcattaagtggggtcacctgagaagggaaagaatttctatgaaactctcaggtttttaatttatattgaaattaccaatatttccttatatctgaagtgcatagtactgtattttgcacatagtagacacttaaggatgttattgtgcagtaaaaataacaggaaggaatctgaagacttgtaggtaatcttgacttctttgcttattaatttttgtggtgtttgcaagtaactgaatctctttggacgttgcatcttgcccctttggtttagcagtgggaagaggttgaacccacctccctgtacttaactagagaaaaaaaatccatacaaggagcatctcagagcccagaagaggagctctagatatggaagtggattggatgggaaccaccttggatttggaattgctggtcagggagaggaccatatttaggacatttccagttgaggatcagggcgtatcacaggtcagaagtttcataaatgggaaggtacaaaccttgaaaaacagactagggtcttaatcacaacagaaatggcaacaaaacccccacataattgcaggaaatgaaggttcagggtttcaaatacaggaaaaacacaactggaagatgccagtaacaaagggaaaaaaactttgcaaatgaggtggcttctctaacttaaacttaggatttttctcattgctcacctcttcccatttctctctacctaggtttagctaagaaaattctttcactttttttgttttcttttccacctggccttctccccgatcaccagttcttttcattgtttcattttcagtcaagatttatgaaaacatgaaccatactagagatacacctgatttttttctaggatatttgtctgaatttatagtaaaagataaaacagcaaaataacagtttcaaagaccttgctcttctccataatatactcagtattcttattgcactttatcaaaccaccataacaaaccacctcaaaacccagtggcataccaaaatattgtcactcacactcacagatttgctggttggctgggttgacttttttcacatgtgcctcattcttcttaggcaagtgggctaccaagtcatgttcttcttaagcaggttgcagaagttcaactgggctagcccagcgatgcaggtagtttcatgtctgcttgcatgctggctgctaacatgccattggtcaaatcccatcatccatgacaaaaggaaatacatcatgtgtgaggaagtaaaagtggcaaagagtatgaatacagggatgggagaattgggaggctagcataggcagtgtaatcttttctgggatttatattcgtgtttgtattttactttgtggttattaatttgtgtatatactattttgtattctgctttagcgtaatgtgattttgtaaggaaaacttctgtatagattatatatttttcacttaaatagttgtatgtgtaactgagactctgcttctaagttgatctgcatcaaaatcatttgaagtgcttattaaaatgccgatccctagaccttaacccagaccctctggaatcaatctctggggatgaggcctggacatcttcattattagcaaactcatggagtcatccttctgtacattaaagtttgagaactactttcttaatggaaggacatgcatttgtattagtctgttctcacgctgctataaggacatacctgagactgagtgatatggttagcctttgtgtccccaaccaaatctcatcttgaattgtagttcccataatccccatgtgtcatgggagggaccaggtggaaataattgaatcatgggggcagtttcccccatcctgttctcatgatagtgaataagtgtcacaagatctgatgattttataaagagcagttcccctgaagatgctctcttgcctgccaccatgtaagatgtgcctttgcccctccttcaccttcagccgtgattgtgaggccttcccagccatgtggaaccatgattctgttaaatctctttcctttataaattacccagtgtattagtctgttctcatgctgctaataaagacatacctgggactgggtaatttataaagaaaaagatatttaatagactcacagttccacattgtcagaggcctgacaatcatggcagaagggaaaggagaagcaacggtgcatcttacatggtggcaggcaagagagcatgtgcaggggaactttccttcacaaaaccatcagatctcataacccttaactcactatcacaagaacagcatgggaaaaacccgcccccatgattcaattaccttctaccaggtccctcccatgacacatgaggattatgggagctacaactcaatgtgaaatttgggtggggacacagccatttttaaatttttataattaatggccatcaacatttgtacaaatgactgatttccttgggtactaagtaatttttctctgagccatgattgaataattttcagttgaggaaaataatactttatatatgaaatcagatttggagtgctggtagcagtgacattacagacttataaaaattataaaggattttatattaactaaatgaagacattgaattgaataaagataatttctgtaaaacttttatgcctttaattcgtaatgttgggtattgcatggcttattcatgattccattgctatttattagtaattttctaaatgaaagtagtataaaccaaaaagtatcttaagacaagtctcaatcaatttagaaagtttattttgccagggttaagtacgtgcctgtgacacagcctcaggatgtcctgacaacatgtgtctaaggtggttggggtacagcttgcttttatacattttaaggatacataatatatcagtcaattcatgtaagattcacattggttcaatctggaagggagggacaactcaaggtctggtcacagggtggcttccaggtcatcggtagatttgaatatattctgattggcaattggttgagttattatcaatagaaaggaatgtctgggttaagataaggagttgtggagacctaggttttatcatgcaaatgaagcctccaagttgcaggctttagagagagtagactgataatgtttcttaccagacttaaggtctgtgtttatgttaatgctggagaggtatactgaggcatgtctaccccccacttccagtcatggcctgaaccagtctttcaggttaaattttagagtgccttgaagcttcagattttgtttttggtttacggtataaaaactgataggtttaaagataattttatttttctcaattcggctctgtaaatttggcagtttattcatccattttgatacttcctggcattttatatgactttgtttgtgtactttattatgtattttatttttaggtagcttggttatctcagctctgtaaaaccatttttatggaagtgaaattctttggtggcatggcagacactgccaatgcctatccaatgaacattcttttctttttgatagcagaaccctgatttcattttcacagcagcctttgcccacccaaaaaattcatttcccaatctcctttgcagctatgagtggccatgcaactgtgttgtgctttgtgaggcttttgtaagtggaagtttgtaggtggggcttgttaaagaagtctcattcatttgggagacaccttttgtcctttgcccttctctttatcctacctagaacttggacaggatgatggaggaggagaccatgcagtgacaaacattctgatgcatgttccactttaaagacttgatgttgggtgtccctactaggtctggactgcccattgtgtcttctaagttagaaaagaaagacactccagagtattgaagctgctgtttagttgggaatctgttacatgtagctgaatatagtttctatctaatacatatgatttctgtaaaagatacttgggctgcaatatctcttaaacctttcatgtaatttgtttaggactttttagacttctgaaaatacatattttatacataaattgtcaagcatgttttgaaatgcacattttacaatttgatgtcaacaaagctgaatgcagaacattttaaaactttttattttgaaatttcaaatttaaagttgcaagacttagtacacagaacttccataactttttttctccccaaaccatttgatagtaagttgcaggcatcatgcccctttagcacttaaattcttcaggatatatttcctaataaaaaagatactctcttactatactggagttatcaaattcaagaatttaatattaatgaaatgtcattactaagctgtgcatatttatatttctccggttgtctcaatatcctgcataacatttggtatgggatgcagtcagttccccctttggctcacatgcttctttagtctcctttagggtggagacttcacctgcttttcatggcatagacatttttgaagatgatagaataattatttttcacagtgtccttcagtttgggtttgtgtgatgcttcctcaagattagatttcggttgtgcattttcggcagggctatctcacagattatagagtgtcaggaggcacgcactgccattttatcctattattggtaatactaactttgatctcttggttaaggcagtgactgtcagggtttacactgttgttacagtaggtagctagtcagacatgagcagggcagaagggggcctcccccccaggaatgtcaggcaaccattaggcggtggtcaggctgttattaaccatctctctgaaataataattggtcgcagccggtgccagggaaaggcagtctcccaatagatagaaacacctgaaactggtgattagcaacttcctgataagattccaggatttgagtgaatgggctcaagcatatatgcactaagaggcaaaacggtggagtttaactgacatatgacctttgtttaggaacacccaactggtaagggaaaaacgccttaagtgagcacatgcacaatttcagtaaacacactgtgcgtgcagcccctccccagtgctggcaggccactgcacctgtggacagccatcctgtaggaagaatcaggggagaagaaatgcaaaccctggaagcatgccagtgtataaaaccccaagtcaaaggtcagctgttcacttgatctttcaagttgcccgcttggcccccttccaagtgtactttacttcctttcattcctgctctaaagctttttaataaactttcactcctgctctaaaaacttgccttgatgtctctctctgccctatgcgccttggtcaaattccttctgaggaagcaggaagtgagcttgctgtagacctgtacgggttcgccactgttaacacaataaagttattctttctccctttataatttgtggaagagaatttaaaatgatgtaaatattctgttcctgatcaaactttcattcagtagttttatcatccattgaagattcctgactgaattattgctgagataaatgtgaaacatctttttaaaaaagatttcaatagatcctattctattgactaggtttgcttttcctatcatatccattgtgattttttatttcatggtactgttctatagtgttgggaacttcaagaaatacagagatgtaaggaggaagttggtttttatttaagggccatcaggggagagtttgatagtgaaatcctatctctctacctcttttcccttccagtacaatgcagtcaattttataggccaatagcatataaagaactgaagcaaatgggggcaaatgatctattcaatttagaatcttttatgacagattggacagtgaaatgatcttctttttaaagtagatctgaagatctccgtggtataattacccaccgagttatgtcttgccgaaagcatgtcttttccaaaggtgtttctctccttgtgcttaccatcatggataaggccccttttcttgttaggtggcataaatgaggggatgaagaaaaggacagaaactgctaattcagtaagacttattggggagtaatgtagagaagttaccttttcgaaacgtgagaatgaaataagggttctccacagcatgattcattctttctaaaagaatgaagttgtttggcctttctcaagttctttttccttttttactctagtttactttattctgttttttgtttgttttggaaaaccaaaggtgatttgttttcttttcctagtatattttcagagttgagaatataatgattttgggtttttcctccctctagcaccagcagacgtttttgaatcaactgagagaaattacggggattaatgacacccagatactacagcaagccttgaaggtatggcctctgttttatgatatacagtttgtggtatatgctcatctctagtgcgtattatatttgatagttgattttttttttggggtataccatgtggtagttttagagatacaggaatggactttgtaaagtaaaatcctcagttaacacactgcggttttgaggatgttagctttcagcagtctgatgtccatgataccttagagtgacagataacctctttctatatatgaaatgctttttgtgcaagatagtgggatgtgaatcctaattctaatggatggttttacttacgagctgtgattttagagtttaaatgagggttcaaggtggggtgtattagaggatgaggtgtaagagaagggaaaagtagaaaattaatagaagtctgaaaacttacatttttcttctcctgagaagcagagatataaatttgcacccattcagctaattacaccctaagttaaacattcgatttcaaactcttcagtataggcaacaactaaaatgtatcattttggtcatatcttagttggaccttcagtttcacatcgacatccaaatgagtcatatcatatggatactcacattgaaaaagagtgaatgaaagctatttaagaaccagaactgtacagtattttaagcttatttgcatattactactataggctaaaaacaatatagcatttttgccactgcagtcatatacacagctccaatcctttggaacttgatttcaagcctagagttctttatttgtttttagaaataatctattagatgattataataaaagtcattataacaataagtagtaccgattaaacatttagtactaccaggcagtattttaagtactgtatgtgggctagctcatcctaataataaataactctatgagataagtattagtttcatcccctttatgaaaagatgagcaacagagaggttaaagtaacttgcccaggatcacacagcctgtatgtggagaagcttggaatagaaaccaaggcagcctgatcccaggtgccacacttaatttatgcttcttttactagaagctttgcttcaccttattcccccatcaggaaaatcatgaaatagtagtgtttagagcattaatgcggggtgtatgaagccactgtaagtatttggagaggaagcagaagtgctatacctcaatttttatgattatgacgtttagataattgctagtccctttttattctgataaatatcattactaaattccatgtttgttttcagaaactgcctttttcattatgtattactgagtgtgagaccatagcctatcaccttgccagggtaaatttggggaatttgcttttttttttttttttaaacttagaaaatatgtagctcgaatgaagtcttatccacatttcctttgatagaggttgtgtgagcataggtatttttaattttccaaaatttttgtttcagttaccagtagctaggggaaaagagtgtatttaaaccttaattgttgcccattataaatactgacgagaagtctacttttgagcactgtaatgtcattgattaatttcagtacttttaatttgagaacatatttttagctctaaaaagtaaatgaacttcaatttgtgtaaattcctgctgtgttgttttaaattattatatgaggtaatatatgaaaaacacttagcacatttcttggcatatagtaagtgctcaataaatgttagccatcattattgcgctttattttattgttagattacttatttaacaatagtgtatcttacattttggatgagtcacttaggaatcgtctaatgatcatgacagatagcatttttgaaagtggtggtgcctttgaaactgcatccttactccttttgtcactgactgctacaactggaattggggtaggtcttggggactttattctgccagctgctcagtccttaaattttggaatcatcctgatcctacttctgtcatgtcccacatttaataagatagcaataatattggatgctgtcttctgccctttctctcctctagtctattcttaatacatggagtaaactttttaaaatgtaagtcatactatgtcattcctttccaaaacactccactggcttcttattacacccgtgtgcatgtctaagttcttagggaacctacagagccttccatgttttggttttctgttacaaagatagcttcgttgtgaatatctgggtttcctatgttgttttggttaactgttttagagctaacgttttacttgctgtcagttgtgcagagaatataaagatgtaactgggcaagtctcttctcattttgctgttttaaattaaaattcttattctggcatctgctttcttctaaataaactttagaataattttattcagctatacttttgatgagaactatgcaaaatgtatctatttaatttgagcaggattgtcatcttgacagtattgagtatttctgtctagagttctatgtgtctttccataattccatattatcaagcccttcagtacattttgccattttcttcccatgagtccttgacattttgcttaagtttgcccctaagtatgtatccagcacccagattaaaaggaatatcttttattgtccttgtttgtagaagtactaattttaatacccattttgcactctttcgtatggcaagttccagaagaccttttttagtttatttgttcaaaagtataagtttgtgattcacttttattaagcagataggaaagtaatgaagactaagaaattagagatggatttttacattgtatcagtagttttaattagtaagaaaggtattactattgatatagtatactttatgtatgatgcatttacactataaaattagaatcacatatagattaattgcaaatttaaagcaattttgttctagagagttatggagaatattgtataactttttttgatggataaaattatttcaaaacacttgatactcctttcttgatatttgaaggatagtaatggaaacttggaattagcagtggctttccttactgcgaagaatgctaagacccctcagcaggaggagacaacttactaccaaacagcacttcctggcaatgatagatacatcagtgtgggaagccaagcagatacaagtaagttttctttcttttcttattattttaatagaaacatactgaaaaacttttcttggtgtaatatattaatgttgcttaaggagaggtaaagaaccaaaaaagaactctattaaccttggttctttttaatgtagttgaaaggaacatacattatctttttcagattataaggaaaagattttatgtaagttatatagtttttcatagagcatttcatatagaatttattgttttgaaatatggaatagctgcagatatattcataaaaggaagaactagaatttttagtgggcacagttattttgcagattttaagtgctggtagaggctttagtatttcttttgaggttaaagtattatttctaattactgataggtttaccatttaataaaatttcccttccctttccccctgcttccaaataaagctttggcaaagaagtttattattgtgtaatgaaattgcctttcatccaaaagaaaaaaagaaaagaaaacttggaaaaagtgttttggagatacaaatacgtacatgtggaagattctatgtgggacttaagtttttcttcataatatgaatactttatacttatgtagcgcacagtttttcaaactatgttcagttaccttcatatctcattatagtttaataattgtactacataaaaatagttacttttatgccttatggatttgcaaagtttgattattaacatatatttggagagaatttcttattttgtttatagacattctcaaagttaggaagcaaccagaaaagagttcgtttacatagatgtttattaatgtttattgataaaatattttaatttttagttttcaggataatcttagcatttttgctacatagatgatcttgtgtcagagaaaactagaatactcctgtctcacttagttaataggtgatgggagaatgtttgtagcatatataagatagacctgtttacttaacgtctaagttcaaggcaagctgtgactgggcccccatccacatttctagcctcattttccactgttttcctcctgtcattcaacactgtgataatacagaatggcttgaagttctcatgtactcagtggtatttaatttctctgtctttacatttgctgttccttctgtttgaatgcactctggccttttcctccctagcctaatttgttctggtcttgaaagatttagctaaagagctgcttgctggagaatgtttttcctggcctctagctaggaccaagtgtttctccagcatccagggcatgcttctgtcttaatgaatactctgttattttgaaattatttgcttgaacattattggtgctcaaaaaatgttcactgagttatgtttgataatatgtgcagtaaagctctttcaaaaccaatgaaagggaatgaagttgagaagcttgttgcaaaaagttgaaagagaagtggtataaaggtcagaaaaatgagtacttaataatattttggatatttcaaagttccaagactcgaggggaaaaagaaactagatgggtgataaaagggaaaaggataattttgactaaaatgctcctggtttaagtgaagcaagcaggaaattgactaaacagagatcattgttgttagttgtgaactcttaatatagatggtatacttggtgacatgacatggtatatttatagaaaaggggaaaattaggattatgtgtgtcctgcacaaaagaagatatttgctgtgcaaagtgagaaaatactgcataaggcaaatggttacacctgtttacgattttagatagggaatagtgaaaatattatggaggacaaaaaaaaattttgaataggttcccttagggagaaggcagcctaatttcaggaggcacgtgtctcatttgctgataattaaaactttttttgtgtgtttgtggatctcttgaaaaatattcacgaggtaattttattttccacttgaaataatgtagagaaatgaagtttctgatgtcatctcaaccgattgtcatattgagtaaattgcttgctgttgtggtttctttatccataaaacacataatacgtaatatgtatcaagtgctttccctctaatcagggtgccaattgagatagtgtgtccataaagttggttagaggttattgacagcaaacagttgtaggaatttaatgtggcaattgtactatgatagtatcaaaccagaaaaaaattaactgttggcgtaacagtaatacttttccattaaacattcctgccagtagtgtcataatgcagtgttactggtttaaaactgagaaagtggggagatgtcatgcatttcagcaggtattaaaaaaatactctttaagtgactgtgcagttactgttgagaagaaatgaagtcgtgtatttttaattcttggaagatgtggtaaaacatgagggaaggaaagacaaaataattacaaatggatatacattcaaatgcaggcctctatttaaaaaaatctacctaactgctgtaggaatgtagaagaatagatcagagtgtgagttttcaagggattgttgtagatataaaaaccctttttgagcactttctccattttgtgtgaaatacattgttatttaaaggttgaccacagtttcacttaattctttcaaatatggcagggatttttattttcagtttttttccattcttctttttgaggtataaaatctcttaaaaccagggctaaagcagaaacaaagtcatgctaactttaagtgatacacttggttgcagtgctgacaaaacgtctgtcttctgaaatcgaaatctctaataccaaatacatatacctctttgttgatattagctggaatatcactgtttacaatggactgtttcttttagaaggaataaattttttttttgctgactagaaaaatttagtttttaaactaatatcacatggaagttatatttggggcatatggagaaatttttgtttatgcatacctggtgtgtcagaggctaaactatattatgtcactggatttgaaaaacaatttgtgagccttcctttaatattgaagaagtaaatatattttcaatagttagtaggacaattatatgcctttttggtgtactttttacctttcacttttgagagaaaaaggagacatatcaaagaaatcttgtgctctgcataaaaaagaatttagaagtcgtacacctcatgtctttacttgattacattccatactgtaattctgttgaattctggaaaaaagcccaaatcatttgtactataattagcaaacgtactaggtaacattttttattatttggacctctgttcagatcagatcaaatattatagattgtcaaatgagtgcctgttgtccctggcttaaattgagaataaaattgttttggagttttgctgtcaaaaacacaaatgaaaatgagaccaggacacgatacccggtattgagcattataggtgtgattaatagtcagaggagagattctgccaagtttttgtgtcacggcaaactctgtcatagacatgaccatacagctcttttgcccaatttgaagtctaatagtaatactttttattttgtgaccattaaattctttcgaacatttttaaaacaggaaaaaaacagtatatgctctccagaacaagatgtgctacaattgagcgatcaaaagataagagggatttgggtaggtaattttaacacagaaagtaatgccacatattgactcaagttttagagaaattggtataagacttgaaatgagtgacaggtggtaagactcttcaaaaatttataagccgttttttttttctttttttctaaaacaccttgaatttgaaaagatggcatagaaagggagaaaaaccttgaggttctatcctagaattctagttatggctatcttgcttggccacagtaatagtgatttaaactgtgataaatagatccaattctagtgcttttattcttaggataattctcttatgctaaacagtttaggatattgttaattgaacactgatacttttcccattgcccaagtaacttcagtttttccctagaaatttctaatatgtaaaacgatttttgatgactcacagaaagtcaagatgaagcctaaaaactgagatgctaaatggtgtgaaaattagttccaactgatgggtgcaattaggagcttcagattgattagatgcattttattagatatgaactgtagaatgacttgtataacttgatgaattttctttagttttgggttagaatgatagccatggtctttgtacttttgttgactaacatgggagattaattttactttttttcacaataaaaattgaaaaacatagtagaattaatgacaaaactctggaatgactcccttactacttactcattttccttgcttaccactgctgccactgtgattttagcagctattattaaaaacagaactagaccatttaaagctgagctgttcaatatagttgccactagtcacacatggcaattaaaatgaaataatattgaaattcagtttctcagttgcactttaaatgtttaattctggtggctaccagatcagtgcacataatgctacatttccattatcacagaaagttctaatttacaacactcttttaagagaatctgagtttaacagtgagaatattgaaagaataggaacatctgaaggaagctgaaagcaagggaaaatgggagagtggagtgggaaacaatttatattgtttatgtcttctggcttttaagattcttgcaacatgataccttactatgctgtctgccctttcacttgaaaaaattttgaatatataaaagatatgttctcatcttctaattagtgccattatgaagatgactcaccagtttttatctctattctgtatttctttaacaaatatttattgtctaatatgtagcaagtacttttatagaccattaagaaagcatgcagagcctcagtttacatagaggaaagacagtacacagtaaacaaacagtatcagatagtaataagtcgttcatgaagaacagtagacctggatatagacaaagaagtgatgggggtgtgcttgtgggctgggcataggataatatgtgattttaggtagtgtggaagagctcatatttgaggaacagtagacctggacatagacaaacaagtgatgggggtgtgcttgtgggctgggcataggataatatgtgattttaggtagtgtggaagagctcgtatttgtacagatacctgagcgaagtgtgagcatgaacttttggctctctgaaggttgtgcgtcccagaccagggcctgatggggcagtgtgctggccctcgagatgaatagtgaggacacagccttgttgaagctgaatgagcgagggtaggaatggcagtattctcgtttctgatctcttgctgcacatcctgatgttcatatttgcctttctttcttaagggtatttccattcttctggtggtccagggtattttttttttctttttttttccttttaatagctcttctgtcaatctcccaaaacaaccatttggtttgcagatctgtcagtttttgtatgtagacttttcccttcagttactcctgccctgctacatattcttattgcaacgcttctcaaactcttcactacccagtttttttctgtcttgcactcccttgcttagaaatctttgctgacagtaaatataaacttggcttattttttttaaaaaaagtatttcctcttggtttagcctgtgtagataaggaaaaacaatggaagaactctttttttcttctgaattcaaaatatttacatatataatagttcagctagattatgggccaactaggcttttgtgaacttacttagaaacctgaggttcaagtaagattcacttacataattcacgttcctatttaatataatattttcatgggaaagtgaattatgagttataaacaatgcatatattttgtttgaagtctagttcattgataagttgatgactagcatatattttggagttagcagagaaatgtttggtagttggtgtataagttttactcatggtattcctttgtaagtgaaagatttagtaggatgagtatcacgttttgatatatatttctcactttacaggaaaaatgttttaatttggactctcataaaaatgtagattactgcttagatgcatttgtaacatgattttatacagtggcacccagctaactgttcccatgtgtgtgctgttgaattgtattcacgctaatactagagggagagttggttaaaaataatgtttttagtgttttaccaaggtcttgccttgacacagatatgagaatattaataatgctctggcattgagatggaagttttacaaaggctaattttctgtaactgacttttaccagttagaagttgtttatagccaaagttattctgtttcttttgtaagcatgtgagaatatctgagcgctagtttttattataaattgataattcgttacatgttttacacaaatcattattccactaagtccagaaaaagaataaattgggtttaaccagtctgttgaaataacattttattttcttttactggtcttaaaatcatgtgaatttggtatgtgaggtatctttcaggattgcatttgatatgtgaggcatctttcaggattgtatgtgtggaccgtatgtgagggatctttcaggattcagctatctttcaggattgtcatattgttctaaaataccctgtgaaaagaagcagttttatggattaataggaagatcatggaagaaaattgttacaattacaatgaaattaaaataataagtaaacctcctccattgcttaaaggaaaaagtcccagcttttcagttaaggattgttagtctctggtctcaaccaacttttccagcattaaggactactattcctctataccagggattggaggctcaaattcccagctggggtacaggtgtgcctatatgctgaaccctccgctattggagatgcctggagtggctggagccatttaatatggtcgttctagccacaagcagctttatccttttacacccatgtgaggtacaagatatgcgaggatgcaagggcaaggaaggtaatgtgaatgtgtgtggctggccaagttgggggcgggggcaaaatgaagagtgaatattctatctaaagagagctgctactactacttttattacactctggctttgtcacaatgattattgccatgcaggaatcgtgtaaccaggtcttctggtttttttttttcctcccagagcgtgagggaagtaatacctattattgtacacatacaatctcctaatctttatcttttgccagttatttcaaaaaattttgaatgacattgtaaaaaccaaagaaaaccattttcaattatgatttgtttcataaaaaacatgtctaagaacatggagtagatggtgattcttgttatttttgctctcaggacccctttacactcataaaaattattgagaacctcagagcttttgggtacataaaatttactattttagaaattaaaacggagaaaagcttaggctattagttcatattaaaatgtcagtctattatgtttgaataacatattttatgaaaaacacatttgctgaaacaaaatggttagaagattacgttgctttacattgttgcaagtcttgaatgtctgccatattagaggagaactagagtctccaatgtgcttctgaaggtttgcattctattgcaataagttgttttggttgaagtttgtgaagaaaatctggctttacccagataataatttagaaaagggaggagtattttaactgataatcagataataatggatattctttttaatgctatacccaaacttaacagatggtaatttcttaaagattagttgcaatgtggaattcgaaatcacatcagttattctatggtggtatcaacaaccttttcatgttatgttgcattaaaatccattagtgtttcttgctttttggatggatcttttacccatgcatgagtttgtaacactgtgcattggtaatttgaaaagatttctttttaaatgcttgaagaatgtctactataagaaaaagttgaatttgttaatatcaccactcatatacaagcctttaagtattgagaagatatcaagctcacagtggtagaaacaagtttttcaaagtttagatttttgcttgaaaattccatattaatcattgtcaacagatacatttgttttccttaaagcaacaggctcacttttttttttccagacaacatctgccaaatactgaagtctgaataattctagtttgtagtttgttagtttttcttttaaataaaaattgcattccatgggaaaaatcagtttagcttgtaactcattttacactagttgttagcaacagcatactctggatatatcgcagaagtactttatgtgtacttcttatgttagaattaaacataaatcaaggtttgaggtttaataaaattaggtttaatcttttcgccaagaacataattctaaaagaaactggcttggcttctgtttaaaacagtgagtgtgtatatttgtgactaatacaatgaattatgcaacttggtgctgctgccttgatttgtgctaagatgcagcagttttattcaatatcgttttgcatcattggtgcaaatgtggctacagtacaaaaggcaaataatatctgagtagtattatttttttatttaaggactttcctcccttttttcaaaggggccctggggaccccaaggatcaatggaccatatttgaagaactgctagtaaggcagaaagaccactggatttaagagttagaagacttaaattttgaagcctgtgcaccattctcgcgtcttatgatgtgcttcatttctcagaatttcagtgatttcatttataaaatatatttggggaaaaaacatcttgttttttgcttttttgttgcttgaattacaattgatgaattaggaaaagctgtaagtgtaagttgttgctatttttaaattagtttcggctatagcccatttgttttacttgtcagtcatgatacagtaaacattctagaaattttcaaataaggaatttaatacaggggattaggttctttaaaaaatcactggaaggactggaggaaagctctagctcagacttctgaaatgactcccacatcattgcaggactgaccagtcagggaagcgaccagtcagggaagcggctacttctgtcacaattaggaaagcggcctcttggactactgagttcaagaacatacttctatagctgcagcccaggaaacaggaagccaggattaggtactgcctctgagctatgcctggaaattggaatgcaaagtctagttgccgcttatattccatctcttgacattcttaaagctggaaattggagcctggaatactgtggaacaacttaaatcttttcaatcaagctagagaaaacagccaaaggcaacaggataatggttgccacccccccccccccccgcccccgctgcactctgccttccatgtctcgtgttagtgcattctaatggatgaggcctaagtttcatccaaaaccctaactgccagtgaataaggaagatagtttttctgtttttttttatgtttagtttctataattgaagaaagtaaacttaagagaacgagttaatggaatctgaccgctaattaatcacacacctaaaccctgtttttctgcttctctgtgattttcaaattttttccacttttcattatcctttctctacttagacctaagttctagccattttaataaccaagatagctttcatttttatgaggcattccatacctttttaatcctcactgcttcatcagtgtttatgaatgttcagttctgggttacactcatcttcagctgtggtctgggtggacttggattttgtaaccagacttgtaaaacctttggcctgctgttgcctgtaaagtgattcaccatttcaattactatgctatataaatctttcacattttacttgcctgtatttttggggggccctacttaatacacttttgtgaggttttattatactctctaaagacattaaaaaaaacaccaccacttccttccatgatcaggtattctttctcatattttaaatcttcttacaagctactatttggagaacgtgtggataaaaatagaagtagactctggaaaatatcaatatacattactttttttcattaaatatataatatgcttttctagtatttatgtaaaaccttatagccatatggtaaaataaagccaccttatcctccccatcctctatcctgtttgttttttttttcctcttctaaaattgtatgattacaaagaaaatatttttaacatgtctaaaatacaccaacctgggcaagacgcaaaaccttgtatctacaaaaaattaaaaagaaaattagccaagtggtgcatgcctgtagtcctagctactctggaggttggggcgggaggatcactggagctcaggagtttgagattgcagtgagctgtgatcatgccactgccctctagcctgggtgacacagtgagacactgtctctaaaaaataaaatttaaaataagcaaataactaaaatgaaggcaaaacgtgtccaaaatacaaataagcataatcccaaccatgcaaagataataacagatagtttctctttctgatcatattattttgtaacctgttaccacttccctacttagcaatataccatggtttctatcactgttgaaatgataatgggagtatttatcattggcatcatctgggttagggaaattgaccaatatatattgggaaattggattaaaagtcatttttattgaaggcggtattagttgtaaccttttttggaaaaagaattaatacttaatagcatcaaggctattttttattagaagagggcttgtttcattcacttgtatatttcatttttgtgaaatgagaatcttgttttaaattaaaaggactgcatatttattaagcaattcagattgtatagaagtatttaaatagaaagtgaaagattcttatacttcttcctcctataactcctttcctcagagttaaccactgttaatagtttggcacattctttcagaatttaaaaaatgtatgtgtaaatgtacatctctggttagtttctgaaacatcagtttttaagagttcactgttaattattgtaatttgataatgtctagatggtagtagtatggacagaatttaatacgtatgtaatcgggttaacttcagaaagcagaaatgtcaatgtttaattgtattgatttcaatttttgttgataaaccattctcagcagtctttctgcttattagcttttaataagagacctcatagtaaatacagagattcttctacagtgaaatatatttctgcttactgctttaggtatattttatcaaaaaaatcattgagttactgagtatgaccagttaaaaatatgtttgcatttatttttagataggcttttagaaatacaaaattagttggtactgactggtttaaagagtatattggatataaaatctccataataaaaatcctttcattttgttttacttttaattttgagaaagatagttttgcttttcagatgtgattgatctcactggagatgataaagatgatcttcagagagcaattgccttgagtttggccgaatcaaacagggcattcagggagactggaataactgatgaggaacaagccattagcaggtaaaaacataatttgtataaagcagatataagtacttttaaaaatagaaatcattaattgggttaaattaattttaagaggtaataagatatactttgttactctaaactagtaatatgcttgtgtatttttaaattttatgtaaccaaaatcttcatatttagttttgattgcaattgggtttagatttttaagattttgggatggtgttatgagggattacatttaggtgcatattttaatatttctttcattttttttcttcccctaatcttttttggatgcactgtccaatttgcaacaatttatagcaagggtcagcatcctttttctgtaaagggctaatagtaaatatttttggctttgttggctatagggtttctgttatagctattcagctctggtgtcataacgcaaaagcagctatagctgataaataatataatgagcttggctgtatcctaataaatcttgatttacaaaggcagccagttggttttgtcctctcggctgtggtttgctgacttctgatctatagcatgataatatgtttatatatattgttcaaataaatgggcagggctccaagatgtgtgctagaatgcagtttttcatttaataaccaaaactttgtagtttgaaacagtttgattcatctaaggactaaaaaatacatttggttttcataatacctctaaaaatggagatataataatttaataagccataaagttgtaactaactgtaatcctctaaacaactatttgaaggcagtggtaactctatgttactgaagaagaaatttacttgcaagaggttaaatgtgctttttccaaaggcacacagctcagatgcatcttaagacttaaatgttcttttcctttaacatagtcctttggtaacagaatgtaccaaatttctcaggtaatttttcttggcacaatatcaataggagatttctttccaaataatcagagattactatatggtaggaaatgtttcaaaatgctatgtttagcaaaggcatataattttttatcttagtgcgactttttaatgtctttaaatgttactttggaaactactttgtaagacattatattatgtaaagacttaattaaactctattgtccccctcattagttgtggctaatatttattgccaggaactttaaatgaaaaccaaaaaatacgtagttaggcttattttctgaagcatttgagaaattatatgaattgggctttttctttttaaaacgtgtattgcaatgcataattgtcttgaataattatgaaacaacaatacttaaactttgagaaatattttaaatacaaaacacatgagttggatttcatatgtaaggggcatggttttatgtgaaaagggttataaaaagaatgtatacttgatacaaatattatttttaaaattatatttttgtttatatgaatttatatgagtatatgaatataaaatatatgtgagcttatatacccaattagtatcagtcgttctattatgtgttttctaattaaaacaacaggtactaattatataataaaagtaaggtaatataaaaagggatgaaggctgttcctaatttgatattcagttcaatgtatatgttatattattgttttggatagttgtttttatccaaaatggcaaaagaaaatctcttcagataatgctgttttttcattctaggtcttttacattttaatataatttaaaaatagtaaatatttggtagatattattattgtagatgacatagagattcggcataatgtaacatgccataaagctatgctccctagaagtaaaagagtcatattaattatgtgtaaattcaataacccgcaatgagcaaatgggtgttcaatgcaaaatatgcatttaataaacttatatgtaaatcatattgtattaggaaaagaggatgtggagagttctagctaaacattatcagagatatatttgctcatatgggtttattaaggtatagaactctaaattcaaaagagaaaatgatgcattttaaaggaagacatttatatattatgcttaaaagtaaattaactccttcttcattactgaagttgatatagggaaaatctttgcaaataaaattccagaatcatttgcttattatattttagtagacataatttaatgtgaagttacacattaggatactacattgtgtgtaatttgatgagataaagcctgtctttttacgtcttagaatcctgtgtttaggcatttatacgtttcatgctaaaattttttaagtagaacgtttttaaagtatttctttatacactttttagtgtcagaattgggtgtatttattatctcttgattatcactgccaggacacaagtggagtatggacagttgaaatttgttaataaactacattgtgactggtttgtgtctatggcatatttcttgtgaaaatggcttgcctcatgaaataactttgaagtgcctcattagaagatagtgctaagttttctagctaaaattgttacaaagagcacgcaccttcaacaatttcaagaagtagtagactacagattctttttttcctcattacttctgtgtttcaactagttatttcttgttatcttcagcctggagttgccattggggaaagaaagaaggatcatgtccaggaatagtcagggtggaattctgaattattaaaataggtctgtataactcctacattttttatccttatcattactgaggaagcagctgtgaaggggaactgtctaaagatggtgtgtgaaacaggagtggatgagggaggcagagttagaaatcttttaaaattgatctttgaggaggatttcggtgctcaataattccagatacttgtggatgctaaggagcatggaagggccatcgaataaccatcaaaccatttaaggtgtgttatgtcagattatagatgatctggaaaagtaagaaatatgacacagattagtttcctgggctacaaggttgtggctgcaggtgactgatgaacagcagcagtgtaacttgaaaaagtatcagcaacagtgaggtaccactgatatccccaggaagagggatcaactggtcgatgtagtcaggctgtccgtgtggcaggagccacaccccatgcaatgtgggctctcctacggccagatacacaggtcaacttttggtaggaatcacatgtctgacaagtagtggtagcttctgtgttagaaacgtagagttccttaatttgtactctgtatacgattgtggatgtgattccattttgggtattgtgattgtggcagtggtggtgatctgggttgtgcaagtttgatcaaaagctttattctgttcatctcattgaagaacacattagagcactcatccatcacaatggctaaaattaaaaagactgatgggaagtgatgtcagcaagatcgccaactagagttgcttggctatcatttccctcacaaaaaaggaaccaaaacaacgaataagtttattttgtctggagtgactgaggaaatgccctggagagtaccaagagaacagcaaagtccctgtggagcatagagtcaagaatagctccacagggaggagaccaaagtatcctgcctctgccatactgtctcccctgcgaggattgaatcaaagccagggggttcctcttcttataggaagaaggtaagcggagaatcatcagtcctcatcaccaccacaggtgccagcagtcactgctacaagagagttccccagtcctcacaggtcccaagtccagcatgaacagttgctgaaagtgcatgtggctacattcccccacagcaggaacctctttgacaccctgcacccctgcaatccaagcagctaagggatgacacaactgtgaaaccaagcccacatctggagtgcttcctgacctggaggccagtagccaccctgtatcccagaggcattgccctcattccacaaagttcacacaagtgcctctagcactaataccttggctacttggagcctaggctcaaaggcacaactggggccctgatacctaaacccacaaggctccctattacccagggaagcaggtgggcctgcatggccgggcagccccatgcggccaccaggctagtgtacatctgtccctggctctagctggcctggaggtggccccaccccaagggagagagtagtatacagccagtgggcctgtgtgaacttgctcccagcttgaatagctggcccagaggttgtctgcctgtaccactggaggattgtgcacagctgccgggccacaatttcctgcctttagtccaatagctggtttggaggcactctttccgcagctcaaccctacatcaccagagtcatgcacagcctccagacctgtgtgcatccacccctggcctgatagccagcccagcagtaaccctgctgccattcaggagagacagtcgtacaacctttctggcctgctgcatcagcatgtgcctgaccagcaaccagcttggtgccaactccagaaaaaccatgccaccacagtcatgggcttctgcatactaagtcactgagataatcacggacatcgcaggtgaggattccagctgaataatctgtttggacaccacaatactgagtccaccctgaaccaaagccaccacacgccatttccaatcagcaccctaggacccatcaacaggaaaaaacctcttcctatgaaagctgctcgttaaaattggaaaaagcaattgtccattacatgcacaggtaccaacatagagacagaagaatcatgaaaaagcaaggaaacgtgtcacccccaaacctggcaccacaatgcatctttagtaatggaatccaaagaaaagaatatttatgaaatgcatgaaaaataattcaaaataatgacattaaagaaacttttgagttgtaagagaatacaacaatttaacgaaattaataaattcattagctgagtgagaaattgaacaaagatagatattatggaaaggaacaaaacaggaatcttggagcttgaggaattaagtgaatgaaattaaaaaaaatacaattgagagccacagtaacagactagaacatgcagaataatacatttctgaacttgaagacagatcgtttgaaataacccattcagaagaagaaaaaaaaaaaagaataacaaagtatgaagaaagcccataggacttatcagacaccattaagcaaacctatattcatattatgggagtgccagagaaagaataagtgaagagaggcatagaccacccatttggttaaatagattgcctgtgtccttctgcacttcttggaaggaagtcttggaagttatggacatctaggaatgaaaagatccccaataaaattcagcccctcaaaatcctctcaaaggtacacaattctaaaagctgtaagacaaaaacattacgtcacatatatgggaattcccattagactgtcagtacatttctcagcagagactgcacaagacaggagagagtgggatgacatattcacagtgctgggaaaaaataaaaataaaatataaaaataaaaactgtcagcagagaatatatccggcagtgctatccttaagaaatgaaaaagaagggccgggcgcagtggctgatgcctgtaatctcagcactttgggaggccaaagcaggcagatcacgaggtcaggagatcgagaccatcttggttaacatggtgaaaccccgtctgtactaaaaaaaaaaaaaaaaaatacaaaaaattagccaggcatggtggtgggtgccggtagtctcagctacttgggaggctgaggcaggagaatggcgtgaacccaggaggcggagcttgcagtgagccgagatcgcgccactgcactccagcctgggcgacagagcgagactccgtctcaaaaaaaataaagaaaagaaaaagaaatagagacgtttccagacaagcaaaggtgatggaattcatcaccactggactggtcctacaaaaacacttagaggaaataataggaaatgaaagaatgattaataccatgaaaatatgtgaaaatacaaaactcatcaatataggtaaatccataatcatattcagaataccccagtgctgtaatggtgctgtgtaattccttccgtcctctaatatgaaggtttaaagttaaaaatgtcagaaatatcaacagctacaattagtggctaaggaacacatgaaagataaagatgtggctgggcgtggtggctcacgcctgtaatgccagcactttcggaggctgaggctggcggatcatctgaggtcaggagtttgagaccagcctgatgaacgtggagaaaccccgtctccactaaaaatacaaaattagctgagcatggtggtgcatgcctgtaatccaagctactcgggtggctgagacaggagaattgcttgaacccgggaggtggaggttgtggtgagccgagatcacgccattggactccagcttgggcaacaagagcgaaactctgtttcaaaaaaaaaaagataaagatgtaaattacagcaatcaaaacactaatcatggtggggtaggggagtgaggggaaaaagtctagattatttttgtgtgaccaaagttaagttgttattagcttaaaatagtctgttgtaactgtaagactcttcatgttagctccatggtaaccacaagaaaaattatagtagatagacaaacaagaaaggaaacaaagcttagcattatagaaaaccaccaaaccacagaagtaaacaagagggaaagaatcaaacgaggaatcttcataatattgagaaaacaaactagcatgagtaaattattacttatcagtagtaaccttgaatgtaagtggattaaattccccaattaaaaaatatagagcagctggatggattgaaaaaaaaaaagacccaactgtatgttgcctacaagagacacacctcatcattaaatataaacatagactgaaagtgaaggaatggacaaagatatcccatgcaaattcaaaccaaaaatgagcagaagcagccatacttgtactagatacaatagactttaagtcaaaaactgtaaaaagagacaaagtcattatgtaataataaaataatcaattcaccaagaagcaaaactgtaaatatataagcaccgaacaccagaacatccaaatatataaagcaaatattattagatttaaagggggaaatagactccagtacaacaatagtagggacttcagcatcccacttttaacagtagacaaatgatttagaaacatgagacttaaactacaccatggacatttacagaacatgaacagccgcagaatacacattcttttcaactgtgcatggaatattctccagtaaagatcgtatgttagagatggtatcaagtattttaccagatcacaactatataaagctagaaatcaacaacaagaaaaacgttagaaaccaacaaatacatggaagttaatatgcaccttaataaccaatgggtcagtgaagaaattaaaagggtaattagaaagttccctgggacaaaggagcgtggaaacacatacaaaaacctgtgggacacagtgaaacctgttctagaagttcatggcaataaatgcctgcatcagaaatgaggaaagatttctaataaacagattaactgtgcaactcagagaaacctgaaaagcaagaacaaattaaacccaaaattggtaggatggaaataataaagcttagagcagaagtaaacaaatagagactaaaagagcaattcaaaagatcagtgaaatttttttgagaagataaacagaatcaacaaacctttagctagactaagaaaaaaggaaaaaaaaaaagactcgaataaataaaaccagacatgaaaaatgaaacattacaaatgtatcacagaattggaggatcacaagagactattatgaacaactgtataccaacaaattctagaatataggaaaaatggataaattcttgaacacacacaacctaccaagattaaattgagaagaaatggaaaaaataagcagaccacaacgagtgggagaattgaataactgctaaagcctgacataaagatccctagtttctgatggctacattgctgaagtgtgtcaaacatttaaggaacaactaatattaattctcaaactattccagaaaattaaagaggagggaatacttccaaactcattttatgaggccagcattaccctgattcaaaaactagacaaggacacaacaaaaagaaacaggccaatatccctgatcaacctagatgcagaaattctcaacaagattctagcacgtccgattcaacggcatattaaaaacatcatccactatgatcgagattcatcccagagatggagggatggttcaacatacacaaatcaataaatgcgatacatcacagtaacaaagagaacggaaaccatataatttcagtagatacagaaaaaagcacattacaaagtttaacatcccttcatgataaaaactctcaaaatagatatagaaagtatgtacctcaacacggtaaagaccatagttgagaaacccacagctagtagtatactgaatgcagaaaaaaatgaaagcttttccactaagatcaagaacctaacaaagatgcccacttccaccaatcctattcaacatagtactggaagtcttagagcagttaggcaggggaaagaaataaaagacatcaaaattggaaaggagaaagtaaaattgtctctgtttccagatgatatgatcttaaatatagaaagccctaaagagttcaccaaaaaactgctacaactcataagtgaattcagtaaaagtgtaggacacaaaattaacacacaaaaatcagcacttctatatgctaacggtgagttatttgaaaaaataagaaaacaatttcatttacaagagctacaaaaaatctagatacctaagaataaacttaaccaaagagataaaagatctctacactgaaagctataaaacattgaggaaagaaatataagacacaaacaaatggaagtagatcgtatgttcatggattagaagaattaatgttaaaatggccatactacctgaagtcatctccagacttactgcagtccatgtaaaaattccagtgacccttcagagaattagaaaagacaatcccaaaaattcatgtggaaccacaagagagcccaaatagccaaagcaagcctgaacaaaaggaacaaaaggtagaggcatcactacttgacttccaaatgtactgctagaatatagtaaccaaaacaatgatattggtgtaaaaaacagacacatagaccagtggaacaaaatagagagcccagaaatggacacacctacagccaactgatttttgacaaaaactgttaactggagtaaatctaagaaatgtacaagaacttccaggaagaaaatgattaaatatcattaagacacattaaagaatacataaatattttgaaacattcgctgtttcatgaattggaagaccattgttaaactggtcggttcttcttaaattgatttatgggtttagtttgatcccaattaaaaataccgttagttttgtttttgcttttttaggaaatcaaatgagatgtttcattacccgccgccccctttttttttctttgtagttgatctatacagcttaaagtgtatgcatgtttctcagtgagtgtaatacttcccaaaaaggggcttaggtgagctatgaagtgggatattttcagtattactgctataggcaatttaacaacacaaaaacaataaaataataacaccccctcaccccccccccaagtaaaaccaccgtgtaataaaatttaatggaaacatgatgatctaccatatgtaaatgctttaaacatttagcgtagtgtgtggaaggaaaagacgcagcaaaacattttgtcgtctttttatattgcttactaccaaggtcatgaccaattttgagaagataaagcaaggtgataggtcagactcgtttttggtatgtggcttgcgagtttacccttcaaacattttgttataggctatctctgaaatttgccttttttttttctcctctaccagctggtaatacctggattttagccactgcatgtcttatacttaagagcttgggtagtatcattggaaaggccaggggaggaacccttatgcaggattttgctttataaaaagtttggatttatggtgccagtactagattatagaaggggatcaggtggagcaatagagcagtattggagctagagattggcttttgcaatcagtcagtcaatcaataaccaagaagtagcagcatttaatatcttcatcatccatttactttaaaaacgtgtttatcactcatttataatgtttgctctagaggtaaagcaaattcttgtttctacttttcagacactgattggagacactggttgatatttttggcacagtgttaagtgtgtttattaagttctttaggaaccaagaggagatggtaggaggagacctactgaggcatgctgtaaaattctggtgataaaatatgtttaaattaagagggtcaggaaatcatggcattcccctttcacctacatgctttttttttgcaccacaattctaccatgtggtatggttaaggtgtattgtgataaacccatttctttaaaacccatacttttgttaacagtgaatgacaatatctaccatatgactgaattgagctacttgggaaatggctattatttttaaatcttaggtgactttgaggagcaatcatcaattacatgtatctcttgaactttaatcaaagttgttacactttgtgcctcatttgatctctgcaaagaaagttatataggagtgctgggaagatgttgtcttggttcgtatccctaactttcttgcccttccaacttcctttttggaatggtgtgacaaatggttcaggctttacttgctcctagaaagtacatttgaggccacacattcttgcaagtcctgtgtggggagagagaaggcaaaggaactaaaaagcttacattatctcagtatatcaatgtgatgtttacattaaatattttgtatgtaaacatgccaatcaagtggtgtatattttttggtagagcagaagacgggcgtaaaggaattgactatacttaaaacatttcaaaagaccttcctggggtttagtaatcttagcccagatctggaatgtgaaaaatgtacttagggtgtattgtgcagaaatcagatgtcctcaagttttctgtagctgatgtatgtatgaaccatttcctgcttattgtgatatgtgtgatctgctctgttgacattattaagaaggatttgtttcttgttataattagtagttaaatataacgacagatgttcatatgctatagattcaggattacgtctggttcttttagacttttgagcagtttatattttagaatatgctgtagaatcctctttttacatattgtctgtctgcactggtactagtcaattgctgggtacctcttctatctcttatataggatcactggtactatttgttttatggtatcgtttttatctgcctttcccagaacttattccatgttttagtctatttatttctgactaccaagatacaaataagtttgctgtatctcaacgtctaaatatacatatatattacaaaaggaacaaaattttcaaatgagaatactgccatttataaaagtcaataaaaagttaaatatcccctctatatagggcagtcttttgtattacagttactttttatatactgtgcattaacctttcttttttgagcataaaccagtcttgaacaaattcagtttgttcaggttattattattctgctgaactgcaaaatttaactgttagaaggtctttaggacctcctgggtctccaataggagagtcaagttgactgtctttctatctctcccttgtattcttgaaaacttgctttctggtaacagtagaatgttctagatattctttggttttcctctgccccagttcatctaactaaatgtctttcaaggagttctatgtcttttcgtgaaacaagcctagagtctggggttgcctgtgggagttggtttttgggcagagagtagtgctggccagtcgggtcactcttaagtgtgacagaagtagaaactgtttacttttcactatatgagtttacattttaacatatcatgttgttaccagtttttcaaaaatgtgtgttttattgattcccaaagactgacttctgtattcacatggatattttagatttccttgtatctaatgtcttgtggtaaatattgctgttaaggataaaataataatattttgacattaatctgataggataaaatctttaggataaaaatggtgtgaaatgaatgagattttcttgataaaccaaaaagttgaaaaaaactaatctttactcaggttctggtaattaacacaaagtggttaagatacctgaatgttatttatgctgatttagaataataagtaacaagtttctttttttttttttttttggctgaagccaagtagcaagtaacacatttcttgagcaggcaaaatgcttggttagatcctatgtgggaaccagggttttccagttatgattatacttatgttgttgcatgctcaggagcaagaaacatcattaaagtagcattacttttgccatgtttagatatacttaagatattcataggtgagtttattttggaaaggttaactatcttttgttattctaatatgtattctaatatttatttcattaaattttcccaaaggcaaacttttgggcaaggcagtgaacatacaggttttcttttcctttacttggctctcatagaggcatagatctcaagaattgaaaggaatcataaagtttaactcactgaactttttttttgtagaagaagaactaagtggtcggtgataaaagtgcaacttgttcagtttttaatgttttcttgattcagagtaattgttataaaaagtggtcatcatgttatattgtaaatatgtactttaattgttatttctcagaaaattcatctagatggtatattcctggtactaatatctaatttgttgaaatgtgatttattgtactttctattatataaaactgccattttatgtttgaaatttcatttttcttaggaaaaaagactatacttctctatgtattagcattgacactgctaaaacgtgtatttgagtaaagttagtattaaatattatttcttcaaatacattattgaaatcttatgtaatgaaaatgcttttagaatgtgtgatatgcctgggatatataccattatataatgctgcatttttttccaccattgattaagagttcttgaagccagcatagcagagaataaagcatgtttgaagaggacacctacagaagtttggagggattctcgaaacccttatgatagaaaaagacaggacaaagctcccgttgggctaaagaatgttggcaatacttgttggtttagtgctgttattcaggtaaggatttttctttattcagttcttatttgatgtgtgtgatagcaatggaaagtgagttggttgtgtttaagttgtgtactttaaagataagtacagataagtttttaatatactattttgtctaataaactagcttggggattgaagtatcctcccatccctctttgtttttcatttctagtatgtattttttaacagtagatcactacttatgcctttcacttatttggaatcaatttatcctttccttctgcttttaggaattgttggggtggaaagagttttgtatatatttccctgcaaatttatggaagcattgtaaccaagtttgaaactagaactggctttctgtgggtcagatcagatttatttgtatatactagacagtgttatttatagaattatagacacttagtatttttaataagcattttgtttgaggttggtatagatttgcaaatctgagtttgcatgtgaaatgatgtgatgaataaatattgataaatcaagaataacacattgtctttttttactaagaaatcccttaatgatacatttcttgatctgcttattctaaaataagagacatatgtatgtgtagatatccctcttttcaatttggaacagttttcttttacgtgtttaacaactgttatcaaaattctttatcattctcggttgacattgataatgttatccatcagattgcaaaactttaaaacaatttatgaataatatgtccttaatttttattactccttaggaaagttaactaatgttttgtgttcgtttttgtgtgacagttgaattatagcttattatttcatgttcgtgatgaatgctttttccttcattggacatgcatgctattttttgtattcaaaatatatcttcattttgtaactttccaaacctgtgtgtatgacagcttaaactttcatatgatattaaggcaactaacaggttatttggttcattttctacaagttaattgtttttgctaacttgtaattttaacttttttttatatacttcagtgctaaaattttcaccgttttctccctttttgcttctggtgcataatatcatataatttgattttctttgtttttctggatttacctcactttttaatatgctgtggtgcatcctaataagtaatatgctatgttattggctttcccaggacatgaagatgctaaggaatacctggattaacataaatctatagtagtatctttgcttctagccttgattatacgttgtttacttacatgccaaaaagcaatatctaaaatattgataccttagagattcttagatcatcttaataggctatctcactttacttgcgctatctattaagaaggtttgtgcatatgataatttagacataattttaaaatattaagtatagttttaaggctctgaactgagtgctcatgaacatgttttgctgcctgtgtttggtcaagtagatgctatctcagcactattatggcaaatacatgagggtcattgattagaagcttttcttagaaaggtataagaagaaagaaagtatttgtaaataatattgttagaatagttgctttttatttctctatcctgtatgtgtagggaagttctgtttgaaatgataaatgctgatatagggataatgaccttttgttttagtaggataaaacttctttcagcagctcagtttaatcttgatacagttacaatctgtttctaccctaagtttgctaatcttagcttttctagcttttctttttagcttagatttttttttttaagaaggagggaatgggctagaaaaaaattatcttttaaaaaaatgcctagcttatttaaaaactagtaattgtactagttttaaaattttatctaagtttagtggctgcttaactcctaacataggcaagtataagagggcttgagttatttattttttcttttggtgaaatctaaacatctaggagaagtaacctataagcttaaaaattcaggttataatggcctaataagataatggcttttgagggagtagaaaacactaagcatcagattgtggaaaatgatgagtgggcagaaaaatttggctagagatcacctgaagttttattttttatggtaattttaaaatctatcaaactattttaagtagcttttaacttttatctttggtagagtcttcttaaaaattttctaccattattgcttaactctaagctataaactgagatataatacttggccatcataaattgactttttacttgtgaatgaaaagttgggccaaaaatctaccatagtgttggaggttttgttgttttccacagtgagttggaacttactcaaattgtgatgtaaatgtactgtaaagttttgattacaaaattttctcggggatggaatttacttagtaggactaatttgaaacatctgggaattctttttcttgtaaatatattgaccagttatagaagtttgctagtaatatcaccctttaacttcaaagtatatagctggggtaggctacaacagttatagatagctttgcatacttattattttagatactgagaccaatattttggtagaaagggggaacagaatgtaagaaagggaatataaacaaagagaagattgtacagataatggcttaaataatcttttggctgctggcaacattagcctgtctttaggttagacatcaaccccacagctagtcaggattatttttgtcctattcacttggtacttttatgtagaaagtactgattgcagctgttccccactagggtgtcactgaatgagttagctatttggaggtgtatgttcttctctgtagctctgggacatgtcgttgaagtggtatgggtgctcatgatgatccttagccccttagcacctttccatttggatgccgagaagtaaggtgctcatacttctcagtttgcttgtcatagtcccttttactcctattgtagatctgttggcacctgtcacttagtcctaaagccctgctgtgtatgatggtaaagtatgtggttaccttactcataaatcatataactgcaggttgactaaaatacaggcaccctgagggcagagagcacatttagggtactctatattatatatataatacagggtctggcacattggaatagcccatcaagtaattattgcatgaatggatgaatgaaccaaaagggagcatgtatggagtatctaaagtagtacgtgaggatattttaaaaaatgatgcatattgtcagaacatttcaggatataatttaaaatgcttattcatactccttgctcttctctctttaattttcatcaaagaaaaaatcatgtggcactaaaatgcttaaacctgtctgcttcctagtcctgccccttgaaagagacctgtatctaatccatttcttctctatcttcatttttctaaatgacatgccttcccactgagatagatgaggaatttgctctttcagttcacctgcctagaattgccttttgtttcatctctcaacatggttataatacaaattaaaaatagtaggtagtcagtattttcattttttataactttgtaaatgttacagtgattcactaggtcctcccatctatagtactttgttatcctggagttgtcaattgctacctttttcccctattttctatatactttaatattttctaaatgcttcaacatgtttgttatggtcttaataatatattctgtatgcccacacatatttgcttcatttttttgtttgtttgtttttggagttctgtcccatagaccatttctctgtttcaaatttggggtgaattctgattctttgtggtttaagcatgatcactcgctttctaaaagtaagtctagagaaatgggattggtcgatgtgggtatcagtttacatgtttttacttaatcttgctgtttgtagctctcaatcatctctcctttgtactgtgacatacaatttgactgatttttctgaacctgagtcatttaagatctccaaagactaaatttcctatacacccacagaggggaggcaattgtctgaatgtgctgggtctggaaagcacatgggggtttaattgttctgtacatagacttgtggtttcaataatgccatctatttttcaatccctgcctcaccatgaaacttatgtgataccatgctaatttttttttaatcctccgaggagaatttatcacgcttctcagtcttctccactgtaggcagtttatgtttcatttcctctgcactcttgccatcacttctttctttttcacaaattatttgaactcttatcccccattatgtctttgttattagcaagaatctaaccaaacttcattttcgtaagtgcttttcaaaattcacatattagctttggactgaatgaaaggatggttattttcaggtgcattaatcaaaaacactcttcaggcagtaaaagttaccctttcttacctcttttgaaggaatacattggacagtcctcatatgactttggtgaaggatatagggtctttgggacttgaaaaacttaatttttatgatttgttgtgataatcaatggtgatgagtttcactgagtaatggtagatgaggttgttttagaccatctgccttgtgatgttttgctggattccaaaacagaaataaaaccaaccttttgagggcatcacagagtactaaagcagtgaggaattttgagtaaagaaggatagtcatagagtgagcttgttatttttgatggattttgtcctttaggcatctccagaactgactgctgcgtagttgaggaactaagaaaatttttgcacaaagtttgagccctagtaaaacatcttagactgtgagttggaattctaaatggttagaatgtagcattaactgagaactgaaagttaagacaggcttcctagtttctgaattatatagttttaagttatctcagaatttattggattaaggcgacctgagactgtgactctagtctccctgcctgccagagcaaatgtaaattctctcttagaagatagtattatctggaacctttcctcaatttttcatacacaatgtctagtactcaggtcagtcataccagaaaataagatgtgtgtgaaaactaacacaaaaaaatggacaatagaaaacagcacagggaaactggaatacttgtctgccataataataattaatatgttcaaggaattaaaagcaagattgcgagtctgaagaaaactaaaaactgtaaagaacaaaatgtaaatttcagaatggaaaaatataaatgaaactaagaagtcagtggataaatttagcagcattattagacacaactgaagagataattagccaactggtaaattaatctggagaatatttttcagactaaagctatgacataaagatgggagcatcaaagagatactttggatatggtgagtagtactaacagtgtatttgtagttccagagggagagtaaaaggaaatagggcaaaagcatgtttgaagagattactcacaatattccaaacttgagaaagatcaagccatagattcaggaagcaataggaatcaaatagtataaacataaagaatactgcaccaaagtacatcataataaaacaaataactatagacaaagagaaatcctaaaagttgcaaggtggaaaaagatacacgtataaaggagcaaaaacaagactaatagctgactttgatacctttaaacatcaagtcacacataagcagaaataatgtctttaaagtgctagaaataaataactggccatcttgaattttatacctagcagaagtctttaaaaatgaagaaaaactagctgaaataattcttcaccagcacacccacaccaaaggaagttctaagtatccaggaacaaggaaaattctctatctacaatgggagctcagagaatagaagtgggattgaaattcttctaacctgccaagattctctttcctctttaaattcctcaaaagaatagtccatggtttgtctcccctacttaacagtagtcccccttatctttggtttcactttctgctgtttcagttacctgctgttaattgtggctgaaaatattacagtactgagagagagaaggagagggagagagggagaacacattcatataacttttattacagtatgttttctttacaattgacctattttattattcgttattgttgctaatctcatactgtgcccaatttataaatttagccattataggcatgcaaggaaaaaaaacataatatatatggagttcagtaatatctgtggtttccggtattcagaggagattttggaatgtatcctttttggataagagggtgctactctgtaccccattttcccattatttaatgcctctgttcttcctctaccactccactgcaaacatgactttgcagttgccaaatccaaaggttatttctctgtccttaatttattggaagaatgtggcaacctttcatgatattgctaatcttgtcctccttgaaatgtgccagctattttttgatgtacagcagaatcttttgtggaactttgtatctttattgagagtcccctgacacagctattttttaaagctccgcagtttattagaatacacaagtatgtttgaaagcccttgttttctccactcgtttttcttctgtgatttcccttagtattcctttctctttttcaaaactctttttcttttttcctgtgatttttaaatggtgctttctccccaaggttctgatcttggccaactgttaatgtattcatatcccttctggtttattacttctactcttactgttttaaaaagcagtcacaagactgtaatccctacaagggcagagactaccttcttagtgtctggcatatagtagatgctccataaatatttgttaaatgaatgaatagatgatttattttatgtgcttatattgttgaataaatctttctagatcacaagataaaatttttttttacagtttctgttaccagctttatggttttacctttcatatttaggttgttaattgatctatgtaatctggctctatttctttatatgtagttttctcaatacccaactgttgatcaaaaccttgtttcctcattgatttgtggtgccacctttaccttctgtcaagttggctgactcaccttttctaagatttgaaacattatcacttcctgtatagtaattttcaaactttataaactgtgacccaagaaaggaatatactgtatattataaaacattttacacatacacaagtgtgtaaaatatctacaatgaaaattttgcaagaaaatactctgatgtatttactgagtatgatacattgtgatattttccattgtattttatctcattttaaagaaatgttcagtatgatgatagtaaatggttgcaaactacagtttaaaaaacatactccaggaagcctttccatgggcatcctgcatatgctccattagattcttgtgtaattattatcactgcatcttgaagtcacgacatttctattacatgtctgtctcctttctaaattgtgtacttccttgagcattgagataatatgtaatttctttgtgtctctattacctaggatctgatgagtaaatttatttgtactccatttttctagtattaatgatacatctagataattcatggtaaacatagcaggtctaaaaagttttggacttgacatttgcatactctttattttgaggaaactgcttaagtgcatataaaaagagctattaataatgagtagtatatttaaaaagttgtccaaatataatcttgtgcactatcaagtatcaagaatggtatgtcaaataaaagaaacttgactttttctcagaagtatgtcctccttgtgccagttgcaatgattctgagtataagtagtacacagttgtaaaaaataaacctccaagactagtcatttttacattctgctaatggaattttccctcaggttatgttaaattgttgttctttttcagtcattatttaatcttttggaatttagaagattagttctgaattacaagcctccatcaaatgctcaagatttaccccgaaaccaaaaggtaaaattcaaaagatttttttaagcagtatatatactctatatgttctcttatatgtgattgatttttgggcatttacttggctcatcaaatctgaaactgtcaatttgaatgtcaattcattaatcttagttaccatagcaagttcttatcctttgttaatatattataaatacgacttttttcctttacctgtcacagtaatatgccaatttttggtgtcgctttagtaatttttttgggggggactgtcaaatttcagtaaactttataggctatagtttacaatttaaggtctttcctcagttgtctcctaaaaaattttgtggaaatcgaaatttcttttcaattgatcgtcttgtgcagccctttaaaaaatgcgttttgcattcatgtctttgcagtacaaatctgtatctttcattttggaagtgactgtcatagatgggtaatataaagtgacaacacacacaccagggccagattgcgtgggttctagctagggacctagagctggttacttgatttctctctgttccatttactatctgtaaatcatatataataatagtaattatttcatagagttgctgtgagcattaaatgaggtaaaacatgtaaggggcttaaaagtgcttggtacatagtaagtactaggtgtcagctattgtcagttaaacaataaaaaaaattaaaaaaaaaaaaagacttattttaaaaagaaccagtttgcacacagaatttatacctaatggaaaaaattacttatggagatgatatagttgcgtgtagggctttagtggttgatcttgtcataaacaatctgtagtcctaaagtggacttattgccaaggcaagggagttagttttaggtttcagtaaactgctgaacttttttgacctatttttagtaggagtgatgaaatattaaattatgttttcgttttagcgtttaatttttaaaaccactttttctttttctgtaaacacgtgaaacatttataatgcatgctagtgggaagataacttgatttataaccagcttttcaggttataatctctgggctgtagagtgtcaggctgataaacaacccattttcaaaagggagtcaggatcgtctgacaaactcttatgtctccagaaaaattaaggaaaaccctttcaatcattatggtttttacatggaactttctgaactattgcctctgtcattgcaatttgttaatatcacagttcttctctcttctcatatctcaaagtatatgtataatttgtgtgaaatggttgagaattatcatttctagttaggtatgcatgtatgtatatgcatcttgaccatttatggtcctggattttaatgttttacagagctttaatttcttttgttcttcacagagttgaatgaggccatgttagtttgtattcttatttaaaaaacagttgctatatttatgcttatatatcagaacgagttgtgaatactagagaaatgtgtaattccagtcttcagcacctttctagagaagtttgtttcttgcaatgggttagcctctccaggtgtccctttagcttaaggaaataaaagaatttctcacttccattctgagacaattacttagaatactgtgcaattttatatgattattccacaaatgtgactctaatttagtatagtgacagcagtacacactataccttgacatctttgaagcaaatggatttatagatagttatcagccactgaatggtcctatattcacttgagatggtgacagcaggtttttaaaaaaggcgtgagtgtaacttgtcacttatttaataatgaatttaccgccaactcgtgacatgtctacagctacattcaatttgaacactttgtcttaagttgcagaatacatttgggattactttgatcacatcacagagatgccatttgtatgcacttttaaacaggatattttttgctagcaaaatttgccacaaatattacatacatattgagtgagatttgaaagaaatctagtatttgaaattagtatgtattttaagtagacttggcaattgcttgtagaaattgaaactaattttagacactcaggtttctttgaactgttggtaatttcagtgtctaggagaattgtgaggtccctggaaatataataatagatccttgatgtaatcatcccctctcccctcacacagatatacatttggtttaaaatgtttcagactgatggcaaagcatattaaatgttgagaaaacaaagatgcacatgtataatatttagtggaaatcatcatgtaaatagctaaagccttattaattggaaggttatattatttaaagtcttgatttaggacaaatatttcaaaataaagaaatttatcactttccactacttaaagtgaatgtcatcagaaggaaatgggtttagttgagtaccatactgtattcctggagcaaatacctgaaggaattttgaattttacaaataaaaggggcattctgagatttctgccattagtcatgaagaagtaacaggagctggatttataagtctcagtgcatcttagaggattcaaagcatacaaaataccttttctgatgaaaatggtagaaatcaaggtagaaatcaacaacagaaagatatacagaaaatccccagatagttggaaatgaagtaattcacctctaaatatcccaagggacaaaaaaacaaatcaaatgagtaatgtcagaatattgtaagctgaatgaaaattaaaacatgacatatcaaaatttgaggatgaagctaaaacagtgattagtggaagatatcttataagagacatcttaccagacatcttattagaaaagaagaatggttttcaattaatgatagcagcttgcatatcaagacattagagaataaagggcacgttaatctcaaagcagaagtaaggaaataataaaggtaatagcagaaatctgtgaaccaaatatcagaaaaacaatacagaaaattatggaaccaaaaactgcttcttgagaagattggtgaaattgatgaacttctaggtagactaagcaagaaagaagagggaagacatatattacaaatataaggagtgaaaaagggaaacatcactacatactctgtagacactaaagggagaatagtggaatattataaacagcagacaagtatcttgaaagtcacaagctatcaaagctcactagtgaagaaatagataacctgtggtagccctacattatattaaaggaactggaacctgtccaccaaaaaattcagcagctaaatagttttacttgtaaattatattaagcatttaaagaacaaatgataacaattccctataaatttgtacagatacttaaaaagtaaaacttcccaactcattttgtgagctaagcattaccctgaaatgaaaagtaggaaaatacatttcaagaaaagcaaaccacacaccaatatttctcatgaatttggaagcaaagaattgtagcaaatttttgaaaaattaaatcctgcaattatatataaaggataatacctcatagagaagtggggcttatccaggaatacaaaattggtttagctttcaaaaataaatcagtatacttcaccatatcaacagactaaagaaggaaaaccatattatcatctctgtggatgaagaaaaatgatttgaccaaagctaaaatctcatttatggtaaaaatcttctagaaactaggaagcaatttacttttcaaatatgcttctcagcagaattccactaatttccaaaaattattacttccaattttgttactgggaatgtctcaaaaaactgcattgacttaggtgcggtgataaagaaactgatctcaggaaattaagggtacttttgaaagtaattttgtggattaaagctcatagtctttatacttttaaaacctatgtctgagggcatatttggaaccagttttattccctcttacctatttctcaggactcttttttggaatctattctagaagcaattctttctatgtgggttatactattttgggcagcaactatgtaaagatacacccccatcccagacccctagaattttacagtgttgagaatgccaactgtgtaaatttggaagaaaattttcatgtttaatatctaaattttttccgttaaaattgttattataagaactaaatattataagaatggcttgcctggtttgttgtcatgaaacatttcactaagttatgtgaattatgttattttttaaaatttccttcttgttttaaaatacattgttagtgattggtaatgtgggttgttttaatttctttctggagattttgctttaatgagccagtaagaattgaatgctttgtgtagtaaaaagttggggaaaagatatagaaattcttgtctttgagaatcttatagtcttattgagaaacaaaagtaagatttcagaggaatattaggagggtgatatattagtctcctattaggatctggtctaattattaaattaataaaattaaataaatttaaatattgtgattgaattatattaaatataatgttcgataactttagatataaaataaatgagtataaaataattttataagtaatttttattaaatataaaaacaaatattaaatttctaataatcgggtgaggttctaatattagtctaataattaagattgtcacaccacagtgacagtcggtgattcattgctcagtgaaaggcatttatttcagtagatgtggaatttgaaggtatcgttgacttgaaggagtctggaaaggcttcatggaggagtggagatttttgctaaatgggtttattgagatcaagcacttagaacagtgcctggcatgtagtgaacactcattgaatgttggctgttattattgctctgagcagcagcagctgggccttgctgaatgggaagtattatgagaagcagtcttgaatgaggaagatattcttggctgagtaatgacatgatttgctgtgaatatgtggcattcatgctgaaattgtgagcctatcctaggtcttctgcctttttgtgctggacttctttgagtctcttagatggcaccaacactctactttcttcaattatgatagagtgctaattcatccctaaactatattggctagtttaatttttggttactgttaaaatgaatatttattagtaaaaattttcttaatcttcagttaaggtgtttttgtttttgtttttttccttcaataggaacatcggaatttgccttttatgcgtgagctgaggtatctatttgcacttcttgttggtaccaaaaggaagtatgttgatccatcaagagcagttgaaattcttaaggatgctttcaaatcaaatgactcacagcaggtagttctgttgcactgacttgttcattaaccatttgtatttaatctgaacaatattaagcacctttcccaagaatatgagactatttgagatgcatgattctgctttattaaaaataacctggaaccatttaaaacatttgggagacttttaagagaaaagtgatcttgaaggtgttaaaataaagttttaatttatattatgattgaaatgaaaacgatggatacaattaagattatttacaaatacataattaaacatgttcacaaatgtgtgataacagaggatcattatagtacacatgcttttgatattcctgtgtttgctggcagggagtacttttccttaattacccagaaatggtttttgaaagatgttatctttgttattgttgcttttgtcttttattctttatatagtgtattgtggtagatttttatccattaccttaaaagaatattggtaattttcttataaaaaatacaaaatatctataaacaaaccagtattttcacatataattggaaaaatcagagaaattaaagaaggaaaacagaggaaaaaatacagtggcaaagaatagtaagtgttcaaaaagatagcggcaatgtgtaatggcagaagtttcaaaaagccactaagcttgcagcgttgttttttaaagtacatacttggatgtgtctctgttttgtgatgtatggagagggcgtttggaagaggaaggtctgagattctctcaccatcttccttgtgctttttgtttctgctttacatttaccttgtatggcaaatgtgaatgaacaaaaagggcactcacatcagagtttcttttatatgttgttgcatttttaaaaaaaattctaacaatgctccagtgccttttaggcttagtatctactcagctttgtttcttactcgctctgtcatggtaacactaacacaaatcaaaagaaagagaaataattttacagttgattccaaaccatcattttcgggcattcagcattccttctggttctaaatgtgttttacttttttttttcttctttagtatgcatagtatcttttccagtgattctgagtatacaattaaattttttaaaagattacttctgttctctgacttatctttccttctggatggctttttccttgtcttttttctggtttctttttttttttctttcttttctagagattcatgttgattttggggtatcttttcacatttaaagatgaggcagcatagactttgtctggagccatgtatgtacataggtgggcttttcagtttgagttagagttgaaatggatacaactggcggttaaggccacaatataaatgcttttgcttcagattagcagtgtagactaacttttgaaattagtgattctttttctttagaggccttttaaagtagatgtgcatcaattaaggttgataagtttgattctcttctgttccctaaacacttgaatttgaagtctacaggagtaatttagtgaatctgtaaatgtaagcatcatgatttttttaaaagtgaatttatattttcattgtatcttcttcctaaatatttcaaatacatcatcttttgaagtacacaggagtcttttgagacaccctttggtatgtgatactgttagttttttctttttcttttccgtgtttgtttttttttgagacacagttttgttttgtcacctaggctagagtacagtggtatgacaatggctcactgcagcatcagcctcctgggctcaacccttccccagacctcagtctcccaagtagctgagaccacaggcacatgccaccgcgcctggcaaataattttattttatttttatagagacaggatctccctatgttgccaagcctggtctcgaactcctgggctcaagctatcctcctggtttggcctcccaaagtgctaggattatagacatgagccaccacacttggccccaattgatactgtcaattttaatcatacctttaattgttttattttataattgtcaattttagattgatttctaagaaagatagggattaacttctgaaaaatattgtgttagctaggaaaccttattttttgttggatgtaatgtttaagtgaattaaagttatacaaaagtatgaaaagttgttttaaggtgttacaatagttcctaaggacagtcgtaacaaattacaacaaatggagtggttaaaaacaaaaggttattctctaatagttctagagggcagaggtccagagtaaaggtgttggcagggccacacttcctccattggctctgagggagaatcctttgcttccaccgtactctggtggctgttggtgttccttgccttgaggcagcatagctccaatctctgtcttcctcttcatgtggctttccctcatgtgtctgtctgtcttctggttttctgtttcttacaagaacactcaccattggatttagccccagccctaatccaggctgatctcatctcaagatccttaccttaattatattgacaaagaccattattctaaatagtgtcacattttgaggatctaggtggacatatatttttgcaggctactattcaacccgccacagatgttatgaatgtttacagctggatttttgcgttgcgtttagtcctatttaactctacagctttggagcagtttacttaagcttcccagactttagtttcaacatttttttgaggttaatataaagttggcctacatgctctttaagaaactgctggctgaaaaaatatatgatagtaagtttgttttgtatttggggctattttggtaagtaaggacaaattgcttactactgattcatctgcctgtaagcagcctcagtagagttgatttattgtttttcccttatgttctatttattattttctgtgttccaactcacgttattgaaagaattatggtagttgataacacaactgccacaacctattcctgtttttccgtgttgggagagcaaagaccaaaggcatggtgaaaggtgataaatgggctggttctgaatgatagtaaaggtagatatggcttaaaaagttgtgtgtgtaagttgaattaagaaaagtgaattgtggaaagagactagtcttccttctaagagagaagccagtcataattctttataaaacgaagaactgtttgctaagatgatttcttcattttataaagattcattacagagctctttgggtggggagtaatgattattttttaaaaatctcatttgtaagtttggtttttgattgtgtgtgtgtgtgtgtgtgtgtgtgtattttaaagtgaaacccaataattgattatcatataatgcttgttttttcaaatatcttatatcctggttaaattataaaagtttcttgcatttcgtgtgaaacatttcacttgttatctttgtaaggagttggtaattatatatttcaacaactggctctaggtttgatgttacaacatctagtattttttttttagtaggctcaaatatcaacaggcttttttcttttcacagcaagatgtgagtgagtttacacacaaattattagattggttagaagatgccttccaaatgaaagctgaagaggagacgtaagttaccgtgaagtttagcaatggggttttaggaattcattagatagcatgtattaaatgtcaacagagaaataagaaatcaagacagacttatgggaatcccagtattttctgtattattgacaagctgtttagaatttgcaggcacaaataatagtgtaaccaaaaaaatctaaaaagtgatccctggaagagctagtcttacatgcccagttccttttcttagattcaataatcacttttcatgacgaggaatgaatttgcggtggagaaagatgtcaggaatgtgaattgtgacaaaatccttttacgtagaagcatgaagacagggatatgaagtagcagtgcatgtgagcaagtggctctgttttatctgttcactcagggccccgaggtcacctaggtttctgggatcttgctggcagtgaaaattatactgtgtctctaagtttctgcccagaggtgacacacatcacttctgcaaacattttgttgggcagagctatgtggcctaacttcaaagtgagtaggaatatctcacactaattaggatggcggctacgaaaaaaaacgaaacaccccccccaacccctactgacccaagaaaataacgagggttggcaaggatgtggagaaattgaaacccttgtgcagtgttggtgaggatatgaaatggtacagccactgtggaaaacagtatggggatttcttaaaagattaaaaatataatcaccatatgatccagcaattctgcttcttggtgtatatccaaaagaattgaaagcagggtttcaaagagatatttgtacacctgtgttcatagcaacgttattcacaatagccgaaaggtggaagcaaaccaaatgtccattgataggtgaatggataaacaaaatgtgctgtatatacatacagtggaatattatttatcctgaaaagcacagaagttctgacatatggtgtaacatgaccccttgaagatattatgccacgtgaaagaagccagtcacaaaaggacaggtactataaatcacttatgtgaggtatcaagagttatcaaactcttagcaacagaaagtagaatggtggttgccagaggctggggggagggggagatgaggagttgtttaatgcatatagagtttcagttttgcaagaggaaaagaattctgacattggttgcacaacagtgtgaatatacttaacattaccgaactgtacagttaaagggttatgtacattttatcacagttttaagaagtgagtaggacagtgtatcttaccatgcacctgaacgtgaagggccagaattttttttcagtagcattaaagactgctatactacctactggggttcttgtaagaattaagagaagtacttatcaacattattctaaggattaaatgatgacccatttatcaagagagatggtatcccctctctccctttttaaacaatacttcacaaatcaattaatataaacacaaattaatacagaaaaatctgtacacaattgtggatacaacgcatttctatacagtaaggcaaggataaactttgtctttttaggtcacacaaaccataaaaagacaatttaaaattttcaacttttgtttgctccaagcagaaaagaaaaaaatgaattttggtattaaatgacttggaaaatttgtagatgactaattctaccagcagtgtgaaacttcacaaaagaatgaagtagctgttcagctactttgggtgaaaaactggtacctcgttccctccctggtgagggttgttgtttttggatttttttggactcttccatgtaaatacaggaaataacctatcaaaattttgtagaaatgtattctgattaaaagtggcttttcttccttcccatgtccaaataaacgtgcactacacagagtatgagattgaaatgtgtaatgatgataggaagagcaggcactttgtgcacaaactgtgtcaatttctcttccaagttcatacacgtagtagctcattttaactcctatgagagtcctgtgggtgcagctatcatagttatccgcagttgacaggtaaagaaatggaagaataagtaccttgtgcaacgtggcactgtaaataacagagctaaatgcaagtgcgtgatagccacataagtgtttttgtcttgtcatatgttatagttctttaatattttctctatttataggtccgaaaattgtaatcacatttatattttttaacatactttagggatgaagagaagccaaagaaccccatggtagagttgttctatggcagattcctggctgtgggagtacttgaaggtagagttatacatttactttttattgcaagtgaagagagattattattcattcattcgtctcgatagttactatttttttagtggactttatttttaatttgatatattctgtctagtaatttttgttggattgctactgttattcacataaagcacagaattgaatgaaggaaaaggaatgtacagagtgcattatcacatactaattaatactttattttatcctcatgttttttccagtgagagggcttccatgatacaattatgttggaatacagggattaatgggatggttgatagatcctttgaagataatattggagttaaatactgggcttgatatgatgctcactttctttttcatgttgaaagctgaatttagcaacttagcatagtcagggtattatagagttctcactttttcagtgattttaaatgtagatattagttttcaggaaaagattgtactctatcttttgaaaaatcagtgaagagtgatactactccatttaagctaaatacctgtttcttaaaatttggcctaagtagtttctgtttgggttccctaacaagggaggagactctttaaatgtaacttcatgtaataatattaggtcccaaagcataaacttttgaaaaattgtttttctcacatcacccaatgcatcaacttttgaaagttatctttttccagatcagctaaagtgtaaaatttgaaaaaatgctttttcttcacgatcttaagtagtggattccctgaagttctgtttgaacgtaggtggtttgggattcagaaaaagacaatactaactcagatgttggccctttaaaaagtcttagtgacatgttcgtacgtttttgtttgtttcaagtggtaacaacttatatataagttgttttatatatatatgcacatatatatgagttaatatatataagtttatatatatatgtagaatattttacatagtacatttacgttgggtcattcatcttaatcattctgattttatttgaagtagaacactatctgatgcagcgagtaggtctcatcaggtcatgactaggcactgtttataataccctgcatgagcatttctacctgtattatattgattcctaaaattgattgttattaaaatatttaatttgttggctgggtgcggtggctcatgcctgtaatcccagcacttcgggagcccgaggctggtggatcatgaggtcaggagatcaagaccatcctggctaacacggtgaaaccctgtctctactaaaaatacaaaaaaaaattagccaggcgtggtggcaggcgcctgtagtcccagctactcaggaggctgaggcaggagaatgacgtgaacccaggaggcggagcttgcagtgagctgagatcgggccactgcactccagcctgggagacagagcgagactccgtctcaaaaaaaaaaaaaaaattaatttgtcaatccagtgttgaagtctttgtacttggtattagtaagttgctttagtgattgtgttatataaaggtggccttaatacgttttcacttgaactatgtgtttgcttcagtaaaagtaatttatttcagagtactttcttatcactttttacatagatcttcctaatactttctttcaaaccaatggttcttcattagggatgatttttagtttgtttgccaaagtacccccactgcaaaagtccctcaactttttgagaacttctagttcattgtcccctctcagcccttctctgtacttcactccttcctttttcatctaaaacctaaaactctctttccccccttcccttctggcaccccctccctgttctctaaccttcattaagctgttcatcttttctgtgtctgtactgagtacctgaagattgctggcaaaaagtcacagaaatgggctaactgtagtggatcatgaatttgagtgatactgagcttccgtgctcccaatcctataacccaacttgttctgtgtaatcaccattctttctctcatttactgcaataaatattttcgttttttccactcatttcagatctaacttatctcttcattctctgagaaaatctttacctcagatttcatagatttactgtcacattaatgaaacttaatcacaggttttgcccagtccccgaatctaattttacatttgtagttttgtatcatattctaaaaacacaacattcccaaatatatgagcctcaggctccataacctagatctatcactacctctactatatttttacctgctcctacatataataaaggaattacccagttttatatcaaaagactgttctttatacgtgctcagaattccctcccttcatgcttttactcagaccttacttcattcgttttttcttggcttttgagcttctcccactctttctttctcatcaatatttacacattgtctggtatctcaaaccttaaaaattaaaaacgttatcccctcccatactctttttcagttaataccctctcttgattcttattcaaaattaagcccctttaaagagaggagttagtttcaactgattactccccatttattaaacctagccccagtttagtttctggcttcagaacttgtctaaaagggatcttgctaaggttattgattttctacatgtggttaaatccattagatccctttcagtttctgatatagtttggtcatgtcccaaaccgaatctcaacttgattgtatctcgcagaattccgtgtgttgtgggagggacccagggggaggtaattgaattatgggggctggtctttctcgtgctattcttatgataatgaataagtctcctgagacttatcatttattaaaggcacttcttccatggcggcgacaagagaaaatgaggtagaagtaaaagtggaaacccaggataaacccttgagatttatctggggtttccacttttacttctacctcatttcctcttgctgctgccatgtaagaagtgccttttgcctcctgccatgattctgaggcctccccagccatgtggaactgtaagtccaattaaacctctttttcttcccagccttgcctatgtctttattagcagcttgagaatggactaatacagtaaattgggtccggtagagtaggacgttggtgaaaagatacctgaaaatgtggaagcaactttggagataggtaacaggcagaggttggaacagtttgaagggctcagaagaagataggaaaatgtgggaaagtttggaacctcctagagatttgttgaatggctttgacaaaaatgctgatagtgatatgaacaataaggtccaggctgaggtggtctcagatggagatgaggaacttgttgggaactgaagcaaaggtgactcttgttatgttttagcaaagagactggtggcattttgcctctgccctagagatttgtggaactttgaacttgagagagatgatttaagatatcggtggaagaaatttctaagcagcaaagcattcaagagatgacttgggagctattaaaagcattccattttgaaagggaaacagagcataaaagttcagaaaatttgcagcctgatgatccagtagagcagaaaaccccattttttgaggagaaattcaagtcgtggctgcagaaatttgtgttaagtaacaaggagccaaatgttaatccccaagacaatagggaaaatgtctccaggatatgttataggtcttcctggcagcccctcccatcatagacccagagaagcctaggaggaaaaaatagtttcgtgggctgcccgtggtactcatgctgtgtgcagcctaggaacttggtgccctgtgtctcagctgctccagcttttgctagaaggggccaaggtgtagctcggcccattgtttcagagggtgcaagccccaaaccttggcaccttccacgtggtgttgagcctgcgggtgcacagaagtcaagaagtgaggtttgggcacctccacctagatttcagaagatgtatagaaatgcctggatgtccaggcagaagtttgctacagagttggggtcctcatggacaacctctgctagggcagtacggaagagaaatgtggggttggagcccacacagagagtccctactggggcaccacctagtggaactgtgagaagaaggccactgtcctccagaccccagaatgttagatccactgatagcttgcattgtgtacctggaaaagctgcagacactcaacaccaacccgtgaaagcagccaggagggaggctgtaccttgcaaagccacaggggcggagctgcccaggaccatgggaacctacctcttgcatcagtgtgacctggatgtgagagctggcatccaaggagagcatttcagagccttaaaatttgactgccctgttggatttcagactgtaacccctttgttttggcctgtttctcccatgtggaatggctgtatttacccagtacctgtactccaattgtaactcttctcaggaaaaaaatcagtcagtgttacagtttttaggttcaggtgagaatccttacataatcttaattttagtagccaaaaggccatgttgaggatcattaattttctcccttcttatagggagtaactagcttgcttttgatattacaggcttgtaggcggaagggacttaaccttgtcttagatgtggtttggactgtggacttttgggttaatgctaaaatgagctaagactttgggggattgttgggaagacatgattggttttgaaatgtgaggacatgagatttggaggggctagggctggaatgatgtggttcagctgtgtcctgatgtaaatctcaacttgaattatatctcccagagttcccacatgttgtgggagggacccaggcggaggtaactgaatcatggtggggcagtctttcctgtgctattctcatgatattgaatacatctcatgagatctaatgagtttatcatgggtttccacttttgcttcttcctcatcttctcttgcctctgccatgtaagaagtgccttttgcctcccgccacgattctgagggcttcccagccatgtggaactgtagttccaattaatcctctttttcttcccagtttgggatgtgtctttatcagcagcgtgataatggactaatacactttccatattgaattcttaccagttgttaatgctgatgactcttaacctcttcttcctcctttttcctattctttccttaaaaacacatttctctggcttttgtaacaccatattcttgtggcttttttcctgcctcagtgggtacttctaagaaaagttgtatttatagtctctttttgcatataaaggtagcagaaccttaggactttgtttaggcccatttcttcttcctgtcccatcccctaggcatctcattcagtgccttaatttcctgctgtcaataagccagcaattctatctttattccagaatgttaatcttagttacagattcatattcaactgtcttctcaaattgaaatctcatggatcataatgaaccagtgatttccactgctacctcaaaactaaagaaaaaaaaaatcctgtgttcttacttaagtggtgccattttcagtccataatctgccaggcatgatggttcatgcctgtaatcccagcactttgggaggctgaggcaggtggatcacttgaggtcaggagttcgagaccagcctggccaacatggtgaaaccccacctctactgaaaatacaaaaattagtcgggtgtggtggtgggcgcctgtaatcccagctactagagacgctgaggcaagagaattgctggaactcaggaggcggagtttgcagtgagccgagatcacaccactgagctccagactgggtgacagagcgagactctgtctcaataaaaaataaaatgtcatcatcatcatcatctagttgttcaaaaaaaaaaaaatagtaatcattatcatcatctagttgttcatgccagaattctgttattcttgatattttccttcttacctatctcttatcctgctcagtcaagtcctgttggtgcccttccttgcatatatgtataaatgtatatgtatgtaattttatctcttttctgtatttttacttttaacaaccttcatccatgctacctttatttctggatagattctgcaatagtcttttaacagatgaccacccacttcacacagggactttaaaggtgtttcagagacataaacctgagcctgttattcttagatttaaccattcagtgactgtattagtccatttacatgctgctgataaagacatacccgagaccgggcaatttgcaaaagaaagaggtttaatggactcacagttttacatggctggggaggcctaacaatcatgggctggggaggcctaacatggcagaaggtgaagggcatgtctcacttggtggcagacaagagaagagaacaagagccaagccaaaggggaaaccccttataaaaccatcacatctcatgaggcatattcactaccacgagaacggtatgggggaaaccgcccccatgattgaattatctcctgctgaatccctcccacaatacaggagaattatgggagctacaatttaagatgagatttgagtggggacacagccaaaccgtatcagtgactttgcattatacccagaatgtggtggggaaaaaaattcttaataggaccacaagaccttgtagattttaactcactgcctgacttttcattgtaatctctcccttggttccccaagctacactaacctcctgttagttcctaaacatatcaacttctttactgccttaaagtcttcatcatgctgttccatggccaagaatactctatagtcccccagcactctggcatggctaactcccactcattattcaagtctgagcttaaatgtcctttgccatggaggtcttccctgctctccccaccacctccaagactaagctcccatttttatacctctcacataattctgtctcatcacaactttctttttataacaattgtaatataattatttgtaattatttgtttataaatatatgtgaagttaatgggtataatgttttttaaatgaggctgagaattttctcagctcagggaccatatctctcttgttcactgctgtatatattcccagtgttcagtacagtatcttgcccttagaaaatgcttcttgcgagaaaaaatatacatacatatgtgtgtatataattacatatatgtggatgtgtaatatctatggctgggtataaatgtacatttgcacatgtgtataaaccaacaggaaaattaacactaacacttctcaggaatgaaatcagtcagtgttacaattttcaggttcaggtgagaatccttacgtactcttaattttagtagccagaaggccatattgagtattattaattttctcccttcttataggtaaaaaatttgaaaacactgaaatgtttggtcagtacccacttcaggtcaatgggttcaaagatctgcatgagtgcctagaagctgcaatgattgaaggagaaattgagtctttacattcagagaattcaggaaaatcaggccaagaggtgagtttaacattttcattgtcccctttcttccctaggtctttcttacaatgctatagcacaatgtaaggttctaattatagagctacctaataattgagagagaatactcagagagtatgtttggatttaattggtaatttagacattcaggagacctgtccagtcaatatggcctataatctatgtcaaattctcacttaaataatttatctcagaattttaaaatcttaggacattgttcagtctttttagacctttcaatcaaggtaccagccattagcagcatgctagttcctcgatataaagaagaaaaatcctgatattacagtggattttaaaacagatatatgctacttatatcaactgttattggaatttgtccacgatgcccagattccttttcttgtaaaattgctatgtgattgcataaggtcagatggaagaacttcccttctcaaggaagaaatcatttttataaaatattgttaacttatatgtctacctcaactagtttctttctttccagccatctctgtttctttatccatctctgtagctgcatctgtgtagccattcatccatgcattcatctgtcagggagttttggcactgtaatagtaagcaaaggacatacgtgcttccccaatcagttactgttaagaaattgctgatagttgtctagctgttaaactccatgaatgtggctagaggtctttatctgtgtcattcactattatatccctagtggtaatatggtaactgcatacataatacttattgagtgaatgaatgaaatgtcttggtgcttatcaaacaagtttctgaggtctttatactgaataggtgcttaataaatattaagtgatacgatgtctctgtgtttatctaaaaggagactttgttcttgtgtttttgagaacaaattgcttttgtctaaattttaatttttttttcttaaagatgcagttaaccctttcctgtttcaagtgcatactcatttttttcctcttcccccccacatacataaacaaacaaaaatatgcttttcctgttaagaggaagagatgtatttgaaatagtctttctctctacatcgtagatcatctatttcagtgattctcaatagagaatagccagacttcaaagttatccaggcagggtctacgatagggatgtggtatatggacacaagagctgcacaagtaattctgataaaaacctctaaataagaatgtttaaattcagcttattttattgattgggaaacagatctcttaagagtgggactttaccagtatcccacaatggaataagaaagcagactcttaaaatccgatctgtttgctgttaaatgaaaggatgattggggtagtaaggcagggatggtacttgtttttatattatcagagtagctgaaatacactatggtttattggtaatctttctcacatattcccagcttttaaaaatttttattgtacacagaattgaaattttattgtttatttaaaatatcttagatttgtcctccatctttttattggttttatactctgaatgcccctatgttgcaatataaatgttctgcctaggttttttcatctagcctagggaatataatgatttatgatggttctctattttagcagtttctaatctccactactgtggcaaatttgattgcctgtgattcctgctaccatttttctagatttgctggaggctatagtttcaataataattcagcttgatttaagagactgtcactgactaaagtatagtatcagtttttaaaaaataacatatttaaattatagtcttattatatcctttagaaaaagtattcttgaatctctaaaagccagtaagtaacattacagactatttctaaattggcataatccctgataacaatagctttttcctcaatctattaaaaattgttgattttattttggcccagagaacatcttatttgctgaaatagctgtggccaactaatatataggaagacctccagtcttccaagctaaaacatccaattggctataagagtttaaattttgtggatgatatactaagagacaactgaataagttaaacatgattatatccaaaataactgcttaaatattttttaaatgatacattttaacttttaaatggtatgcaatttgtagatgagtcagactctccaggaaacatggagatattttttgattgtctgttggaggaaaaaaatttcagatagtaaatacttcacttgtagtgtgagtattcactactaccagtgtgtgctgtgtgttcttttagactattgctatgcacatataagtatttgcatctgtccacactgccccgaaagttgcatttttcactcagcagtatatcatgagcatgcttctaagttagtgtagagctttacgtcagtgtttttaaaatctacatagtgtcacatagtctgtatttataaaattaaattgatttaattatcctgtaaggcagtaactcgaaaaagaactattctgaagaatgtctttgtataaatacccttgcgcacttaggaatgaagtatagttagaagtagaatctttgggtcacagggcatactcatttagatgtgttggcactgccaaatttcccttcacaaagttgtaccaagttataataaagtgctagaaggagtttttacaaagctttaaaaacaaaattagagaaacaatatcgacatgtaccatattagacatctgtagaggttatatggggaacttaacttttgaaatcaaagggcaaatgagtcaaggcaattaaatgactggagctaattttttaactggaataaaaagtttttgcttcttgtgcatagtttacatcctggcttggtttgatattccgtggggaatttgaagtgataggtgtgttttttctgttgtttttttctctccacatttgtgtaatcctctcataaaagcaaggtatcttatacactttaatagaaaaccagctattaaaactcataaaaatgacatactctttaggaactacttttgttaacaggtgagatttctagaattgtgatgaatttagaagcacttgtgctgccaatactgattatgtaagttctttattcactaactgcagaaatctattcctcctgtagtttcattatctagtaaaataataatatgtttagagatatggagaatgacctctgtctcacaagcatggcatactagttagattgtagacaagtagatatagttttttgttgaatggaaatatttttttgaaagaaaaatttctcatgtttcgtattatttaaaattcaaattatgtactgctatactacaatccaaatattgcagagctagacataccattaatattttaaaacatgaatttacagaatgtctggttatctcatcttgtccccatcagctttagaatgagaaagtgaaatccttccactcttgtagtaggaaaaacctgccatcgctgatagaggaaaatgcattcataacagagacatattacataacatttttgaacatccttttgtaaggtatggaagctatttatatttcctggacttttcatggtctacagaaaagtgtaccccagtttgggtcatttcatttcttgtggccattgtagatttccatgaattaaaatatgtaactatttaattttaatggtgacatttaaagtattgcaataaaatatgaaagtgatagttcttgaaatctactttcttgtttgagtatcataaaatggagcagagaatattatcctaaagaatcaaaagtgttctttctgatgtgtctggggtaatgttttaattcttaataataattttatatgtggattagaactaactcaaaaattcttgccagttccatgtgagatcaaaatgagtaagcaaactttgctaatcaaattttaaaacttgagatgtttcttatatttttcataattttatttaatccgtttcaggtattatccatataaaacaaattccttaaactttagctttcagtaaaagataaccatccagctcaggaaatctcagttcaagtaattatagcattttgaaagagaaatagtattgaataccatttgcttttatttgctgtagagaaaagtagcaactttccagatcctcctcagattcagtttgccagatgtgtgccattcatgctttttttggatgttcaaatttaaatttggtatattcttaacttattgacagatgtgtggtggcattttgtgacacttgaaattatcacacacaatagattatgcagcagtttcgcatattgcagtttataataagcacttcagaactattttatacttctgttctttgttgatttacatacaatctttctttctctttaaatacatatgcttatgtataatttgaggttgtatatgaaaataattttcttttaaaaatgttgaatttcatgcttaattgaacagttaccaaagcatgtatggggattaggggctgggggtaggggaaggaaattacggctatactcattatcagaatttggctcatagcaatgagacattcaattctttaaacactagttattttaaaagattttaagtaaattactctaagtattaactttttgttagtgatatgtctttttcataaattagtatgaaatccagcagaggagctaaagctaaaacaggaaaacaccattttttcatttttagtatgagagttgtgacgatttatgatataaatttttttttgagtactccctctcataagttattttatcacaggattttgatgctttggttaagtataagtgccattcaacatcacgttgaagaagacagagaagacttgagctactaagtcatggttttaaccagtgtctttttctttgggctagaaattctaatgtaaagaattattttcgaaggatagttgtgagatttctttttttcctgatcatatattatacccactcttggaattttcaagaggtgtggaaaacttttagaaagaggttgagttttaactaaactgtgtacccagttacttgtcaggtccgcattgtggtgatacatataacaatgtcagtgcccacatcctgtgcctaagattgcagtgaagaaaacaaaggtggtattaaagtttttgttattgttttatttcctttcagcattggtttactgaattaccacctgtgttaacatttgaattgtcaagatttgaatttaatcaggcattgggaagaccagaaaaaattcacaacaaattagaatttccccaagttttatatttggacaggtatggtttgatatactgcatgacttagtttgaaacagtttagtaagggagaaaatattgtttagaggaaaattctgcataattttcttagaattaatttctacttttgcataatatacctaataccatttgtcaaggtagatgaaatttactttgtattagaaaagtatagtttttgggaataatgttataaggaaatttaaaaaagatgaattttgtaatcttaaaattcagaattttaaaaaataccattttgtattatctaccttacatcttatacaattttgaatgaattgatgctttgtggtgatgtctgtacttaatattgtatctatctatctttctgtctttctttctgtctctctgtcttcctgtctttctgtcttcctgttttcctgtctttctttcttttgtttttttctgtctgtctttctgtctatctttctgtctttccttcttttttgttttgagacagagtcttgctctgtcgcccaggctggagtgcagtggtgcgatcttggctcactgcaaacaccatctcctgggttcaaatgattctcctgtctcagcttcccgagtagctgggattacagacacccaccatcgtggctggctaatttttgtattttagtagagacgagatttcaccatgttggccaggctggtcttgaactcctgacctcaggtgatcctcccgccttggcgtcccagagtggtaggccgggtacgctggcatctggccatattgcatctactttcatgatattcggaaatgctaatgattacctttttctgatagatacatgcacagaaacagagaaataacaagaattaagagggaagagatcaagagactgaaagattacctcacggtattacaacaaaggctagaaaggtattttaacttttatgaaattaggagataattatcagaaaccatgtatttggtgactagatttttaatttcaaatttgctttgagtgatttataattttaggagtagttaatattgtgtgaatagttttgagttttgcttgaaactaaaaatctatagtagactttaaaaaattattctagtgtttaaaattaaatatctcattgtcaacaggtaatgttcctactgctgaaaatagatacaaagttaaatgaatatagttttgaccttcctttttgcatgaaactaaagattactcttgagattttcattaaaatgaatggtatctgagtttttctccttaaaacaggatacaaactcagctgcctaccaagtcttctcagcagcttcgtaaaggaggaaattgtgtcaggtgtaagatggtatgtgccgggagcctagagagcaatctgtgtgtacagggaatgaatgccattccataccagtggatggtaccatgtatgagtatggcctcactgttgtctattgatttggatcatttctaaaagacgtcagaatctggactgagaaatgttctacaggccagacagaaatctaaaggctgaaatgtcacaagtcatttcagtttgcaaaccccaatctgctctgcattcccctattttaggaattttcaaattagtagtctaaaacttcttacatcaaatagtatattgtattttaatgatttttattcttaaaaagtatgaataatcatattgaaacatgattagtggtaaaagataggaggatagtacacatcactgtcttgatcatgagaccagatgccagatctaaaaataaaaacagtctcaggagatgtcagttttcatcttcctattgagttacaatttagaacagcatttacagattataacagtatatactcacattcagtcccaatcggccttggtttcctgtctttggggaacttttaatgtttttcttaagtgtatattcagttttaccatcttcgttttaaagcaaatgaattttattgctgaggaagttttattgaagtatcgtatcacgttttataataataataaaggcccaaatatgctgtatatagaaataaaagcatttgtacattttatgattaacagatatttaagctatggttccggtcccaaacgattccccttggtagatgttcttcagtatgcattggaatttgcctcaagtaaacctgtttgcacttctcctgttgacgatattgacgctagttccccacctagtggttccataccatcacagacattaccaaggtaaaaagtaatcctgatgcaagagacagttgttacctttattacacaataatgtaactgctgcctttaaagacagtttctataaaatgtatgctttgatttacttcagtgaactcctaagagtagattcacttagaagactgtatgtcctctgggagtttttttattatttcagtagattttatggttatggattaaaattttaatcacattttttttcagttcagaattatactttagcatgttttggtatgtacatatataagattcagcattttatgatccataaaaatagtactatcaaattagaatttgtttctgtaatgtaagctgataagccagggaaaataatatcaccatgcgtaagattttcttgttttttagaaataaatatgattaagctgttttaactctaaagctacaacttcatcttataataatttagttcttatgtattaaaaatctcatttggatgttagatcaatccacatatttctttaagattttttcttttgaattacaagccaatttaatactgtgggtttggcacgatctttgtcaagagtttcagcttgaaaggttaataagaaatactctatgctttgatacagcacaacagaacaacagggagccctatcttcagaactgccaagcacatcaccttcatcagttgctgccatttcatcgagatcagtaatacacaaaccatttactcagtcccggatacctccagatttgcccatgcatccggcaccaaggcacataacggaggaagaactttctgtgctggaaagttgtttacatcgctggaggacagaaatagaaaatgacaccagaggtaagaagtgtctcatagcatggttactgtcacctcagatggatatgtgtaatgttaatattgagaagggaaatcacgtctggattttatatttaaatattatagtcatttttcttttccagaaagggttttaagataaactagtttggctccccatttttataatctcaatatcaggttcacagggaccaaaagattttccctggattgcttagctgattaatgacatagcagatggcctgattttctagtttgctgctctaaatttatatcaaactggtattcacagttactccattggagaaatgtcatacaatatcaatgtttgtacatatcaattaggtactaaatctaagtttgcacagggagttccggtgattaaaaaattttctttgggcttaagaattagaaatgtgaattttaatttttaatagctctaacagatttatgagtatctatgatcccattactagtctgtaacagagtttttactggcatgcagcaaaataagaaaaataaggacagtgctctgggtggggtgtgtgcacttgtgtgcgtgtgcgtgtgtgtgtgtgtgtgtgtgtgtgtgtgtgtgtgtgtgtcaagttgccatctgtcctttcttggaaggaactctcttttattcttttctattctattttttcttttttttcagaataagttattctgaacttttctctttcctactttgctgctgttaaagtgtacttaaaaaaatggattatggtagattttattacatttttttccttaaatgtgaaaatataattccctattatcattccccaattttatgctgatttattgatttttgaaaaaaatgaactatgtgacatggttggaattatattgaacaatattgattgttggatattatatgaccaacttaactctttatagacaatatttgaaaaagaatggccctaatttagtaagaagtacataaggtatgatggtgactaacagcattagtagctgtcaagattttctttagtatttttcaaataagagggaatttttaaaaatatttgaactcattaacaaacattaatcaagcaaatagtgttgatgaagcactatattaggcgttgggtaattttctactcctcatggcaggttgtttttaaaagattacattcagaggagtggaagctaggaagcttttgacacctaagtagtggcattgagggagggaagaagtgaatgtacttaaaatactctttggagacaactgacagatgtgggtcattggctagaggtaagagagagggacgaatcgaatgattctctcagttcataatggtatgaataaccaaatagaatgtattttggaaaaaaggtaaagcagtgggcaaagaggttcccactcaggggaggaaagagaaatatgatgagttctcttttggccattttaagtttgaagagcttttttgagacggagtctcgctctgtcaccaggctggagtgcagtggcatgaactcgggctcactccagcctctgcctcccaggttcaagcgattctcctgcctcagcctcccaagtagctgggattacagttgtgtgccaccacacccaactaatttttgtatttttagtagagatggggtttcaccatgttggccagggtggtctcaatctcttgaccttgttatccgcccacctcagcctcccaaagtgctgggattacaggcgtgagccaccatgcctggctgttaagatttttatatgtaatactatggatcaggaaagaaggttttcctcaggatattttttttctttctttcatccatattgatgttagcagttagcattattttgtaaactattgtgtaatattccaacacacgggtatgatgtaattcatttaattcccatattgatatttcctaaatagtgctggtcttcgatatacatatttatacacttctgtaagtaggatatgttcttttttatgttcaggggtacatgtgcaggtttgctataaaggtaaattacatgtcttgggggtttggtgtaagattatttcatcatgcaggtaataagcacagtacctgataggtggtttttccatcctcaccctgctcccaccctccaccctaatgtaggccccaatatctgttgtttccttatgtccaccatttctggttcagagtgtgtatattttaaattttgacgactgttttaaaattgtcactccaaaacattaaaccagtttgcattcccactgtgtgagagagcctgtctcccagtatcctccctagccctggacactttttagtagtttttcacaattgaaaaactggtattttagtgttttgatttgcattcccttagcttcgagtgaagttggatatttatattgttctgtaaatttcttgtttgtgacatttgcccattttttaagtattgagctatttgtatttttcttattacttaatagaaagtttaatgtattgtggatattaacactttacctataatatcacatatgctgcagatattattttcccagtttttcatttgattttatgttggttttgttttctttttataatgtagattttttaaagtgttgggcagggaggatcttatcttttcctataaggttactagttttctgacaggcttaagacaggtctttccccactctaaagttagccagtttcttttatagtttttcaaggtttcttcctgattggttcagcagcttcacaatatgatgtggttacaatctaaccgtttccttattgacagatatttaggttatctcttttttaaaaattattgtggacaatatgactgtgaacatccctatctgaacaattttgtaggattattttctactagaagtagaaataattgtcatgggagtgccataattttattttcactggtgattatagtcgatttttattcagttatgtgtgtgtacaagatatgtggtgaacatgttttactttgttcttaagtttacttgtgttatagcaatatgtaaggaagcttagctttcattttcattgaaactctcctttatagatttgaacaaaattcacttttattggctctgcacattttctagataaatcatatttgtgttgtttttaaagtatgcatttgtactgtgtcttttattaagaataactataattcattttctacagatttcaaatggtaatgttttttaagaaaagttttaggaaaattttcctattcctctaacatgtttgtaggaaaaacattagtccttatcttataagtagaaacacatttgctgttaatcattaaatgacaccttatatccttagatttgcaggaaagcatatccagaatccatcgaacaattgaattaatgtactctgacaaatctatgatacaagtaagtgaaattttgagctagtaatcattgtcaaaattatttacatatattttaatttacctttacattatcttaatctaatttttctttacatgttttgttttaaaattttggcaaatcttattgtaaaataataagggcttgcaatatgtacaatgtgacagttcatctgaatggggaaacttttataacaaatttataacaaaattcatgacaagttttccccattcagttgtattttcacaccgtatgtgttgtgtacccttactattttacagtaaaatctaccaaagtttttcaaaaggctatagcatctttaaaaagtcttatgggagaaaatctatggttgttaaaggatattaagatttgggaagaaacttaaggactccattacattttaacttctggtgtatatcatataatctattttgttaaccgtcaatttagaattctgaagatgtagacacatttgctatatgtaaaactgcccactataagctttttattcaaataaacaattaggccaatgagtatgtacacaataaatacatttttagtttttcaaaaatcatctttttaatctatcaactttgcatatctttagcttattcagattccgtctttttaaagttttatagtttagtttttttcaaacttttaagcccagccagttctctctcatttaaaaaaaaaaatgctcttatggttttctccaaacaggttgtttgtggatttcatggaatgtggtatatagtaaactacataattgcagtttaactcttctttttttcacatttaggttccttatcgattacatgccgttttagttcacgaaggccaagctaatgctgggcactactgggcatatatttttgatcatcgtgaaagcagatggatgaagtacaatgatattgctgtgacaaaatcatcatgggaagagctagtgagggactcttttggtggttatagaaatgccagtgcatactgtttaatgtacataaatgataaggcacagttcctaatacaaggtaagaatatatagggtggtgtgtatttttaaatagtcataaaagtggctctggtatgtggtgtgattagttaagtgtaattcactcagacgatgaaggatgtggttaggaaatgctactgggttttgacaagactgaattgaaaagtaatgtcgtcagggctaagaattcgtatatattttgtattccaagtcaactattaaaggtaaatatgacctttttcgtccttgctaaaaatgctttagtgactgttccacagattgactcacatttaatatttaattccttagcctaacatatatggcctctgttcttggcctctgattatctccccaccttcattgatcaccagtgttccttttgaatttatatccttactgaacttcttgctgtatctgctcatatcaaaccatttcacacatttatgtttgcatgttcgtatatgttttattttttgctagtaattcttttgcctaattcttgtttatctgtcaagattcaattcaggtgtcatttcccctgcaaactatttcttgatctgccaaaaagtatctctccttatgctgtcctggcatctgtctactgggcatttactgttgtgtattggaactgtgtgatgacttgtcttgcacatttctctcttatctgctcagagccagagatcatgtcatactatgtctgaatctttttaatgctgatattctgatatatgctttgcatatagaaaataataaaggtttattgaaactgataaaaataatctttttatatttagtcattcagaatcagctaggcagtccacttctgactaaaaaaatgaagttatttttctgtgtgtgtagtagaagttcagtaattcttctgaatactctattgtttttaagatcttgctatattaattttcataattgcatatttaagtctacttaatttcttcatatgacaaacaattttcattttattttgagctaataaggttaacatgattatgagttgtttacattttgtgaaaagttttactttttaagtgatcaaacatctggtattttccaatagtggcagaagtagtattacatcactgttagagtagcaaagaaaaaaaaaaatggccgggcgcggtggcttatgcctgtaatcccagcactttgggaggccaaggtgggcagatcatgaggtcaggagatcgagaccatcctggctaacacagtgaaaccccattctactaaaaatacaaaaaaattagccgggcttggtggtgggcacctgtagtctcagctacccgggaggctgaggcgggagaatcgtctgaacccggaaggcggaggttgcagtgagccgagattgtgtcactgcactccagcctgagtgacagcatgacactctgtctcaaaaaaacaaacaacaacagcaacaaaaaacttggctttggctttgtattttctgtcacttctactcttaagataaaaaaaaatctgagaccattacctatgatggattatcaaatattttcatcattgtttttctgagcatttgtttgagttttaaaaagttttgtagataataattatttgctaagcaatagtaattcttaagtaatatgattggctgagtggtaataattcatagtttaaattctatttgaaatgcagtctattttgagctttgcattttccctttaattcttaattttatactagtttttgaaatatgatttgcagaggagtttaataaagaaactgggcagccccttgttggtatagaaacattaccaccggatttgagagattttgttgaggaagacaaccaacgatttgaaaaagaactagaagaatgggatgcacaacttgcccagaaagctttgcaggaaaagcttttagcgtctcagaaattgagagagtcagagacttctgtgacaacaggtttgtccatttttattaagttgtgtttgattatcaatattatttttataataagatatgctcattattaaaaagttttagctatcttaaagtgtgaggaaatcagtagaaatcatttcaaattccatcactcagattatcacagttaacaatttagtttacctttttgccagacaccactgtatatatttatatgtttttcaagataaatgagataattctgttgactttccctctacctactctgcctgtgttgggtgggcttgaattttcttggcaagtagcagagaaagctgtgaaatcagcaagaaacccaaaccaattcactaaagctatcaagagtatcaattcaataaagctatcaagagtatcaattcaataaagctatcaagagtagtaattttaaatttggccaaaataatactaccggtatattcatatatactttgtgcaatagtaaaatactaccattaataactatttgatgtttttcggaattcttaagattaagagaaaattgaccaaaactatttagtatatcacaggtaaaaagtaagtgtatagacctgtaaaccaaagatataaatgcataaacatataaatatttaaaaacattattctgaaatgaactattagctgatgaaatcaataagtcaaagtaaacactgtataggaattaagaaaatagtttctagtaaaattgaaaatatattgtctttttattttcttaaaagattactcttcactgagttgcaaatatgttttagggcaacatgttttctggtatagaaaatgctatttctcagagaagctataaattaagcgcatatattttcctcaaactcatttgtctctttttataactgctagtggatattattgaataactttttttttttgcaagatctgcatgttttgtgttttaaggaagtagttccagcttttgtttgtttaatttcatctttcgcagacagaggtttccttgcagcattacctggttgggcttcagcattatcatttgaactttagaaggaattattacttcaatagaagattgttttacagtgctacaatgtagtattgtgactgtcgcaggcatgcacaaatctgtccagatacttaacttattttcatgtagatcaaataattgtcgttgattttgatcctgagaggcagataattcagcattttttaaaaagataatggtatcacagcaacatttggatactacagtgctatggagaataccaccattatagtggctggtgaactctaccattatgtagggctgcacttttcccccacgtgtacaaggctaccgcgtagagcaggtgaagctatgtgggtccacaacaatgtagtttttagtagatgtcaagaggtatctaagctcaaatcacagtgtagtaactatattatagttcctttcatttttaaaacatttctgtccctttgtgatttcatgctttgcattctgtacatattctttccaaatcactcctcagaacctgccccaagatggagctactgtgttattgttcccttaacatttacttattccattcacatgtgactattcttgttattagtgggaggaaggggctgcatagtgtactataagcagttgtggtacctaagctcccagacacaggtgaatcctccattcattggttaagctccagttttattcttggctcacctatattttgtgataccaaaatattaagttctatatatcctcctcctcttcatcctgtctgtttctcatctctccaaattttcagagttaacatattttatttctgcttagtcaaacgaatacatatttccaactaatattcctatctattaaggactagccttgccccatcctcattttacatttgtcatcttttttctttctctgtgaaaagaccatgtgtgcataactgcatccattttcatgatcaatacatctgaccatacactttacatggtgttttgtaatttttaaaaaatgcagtactaggtattggacatatattttcatgtctgtttttaccatgcaaaataatcttagaatgttgatatatttctgggaggaaccagaataaaagatgaagagatggaaatggtcaattcctattcctagataacttttatagttacctttcagcgtgggttatttagaaagcagtggtaatactacttctgtaggaaacattgtatcctccatagacttgacggaaatatgcacttggtttgaattagtagaagtagaacatgccaagtccataaatttacagagtgagattgttgtttaaaagattggtttctattactgttatctttgagattatattaagaaatttgttctctgttgcaggatagtttcacatatcataattgaataagactaatgtttcattagaaccatttattccctattattaatagggaaattttattttaatgtccatgccatcctcttctgattcttctcatggttttcaaagtaagtaatttaatttggtataatacttccaggatctcaaagcaaatctgtattttaatctctcaggtgttcactagtattaccagtgactagtggaaataataaaaggaaatcttgttcataaaatccaacagaatgatttttttcctccctgcaaaatcttctcgttaaagctgaaacataagacctcataaaattcaatttctactgagtgatattccaattaagagtactaattcatattatattaatcaaattagtatttgttcctcttctgctaaaatgtgatcgagaaattcatgcgtatcagttcaccagcaccattcgttccctactgagataataaatgatgggaaagtattttttggttcatttcatgctgcttccctagatctgcttactgcaaaggcaaacttacctgaatacttttgttgagattttcagccagccattctttgctgtcagtgtggggatcagaatgagtaggggagcaaacttacctgaatactgttgttgagattttcagccagccattctttgctgtcagtgtggggatcagaatgagtaggggagcaaacttacctgaatactgttgttgagattttcagccagccattctttgctgtcagtgtggggatcagaatgagtaggggagcaaacttacctgaatactgttgttgagattttcagccagccattctttgctgtcagtgtgtggatcagagtgagtaggggagcaaacttacctgaatactgttgttgagattttcagccagccatcctttgctgtcagtgtgtggatcagaatgagtaggggagcaaacttacctgaatactgttgttgagattttcagccagccatcctttgctgtcagtgtagggaacagagtgagtaggggagcaaacttacctgaatactgttgttgagattttcagccagccatcctttgctgtcagtgtgtggatcagagtgagtaggggagcaaacttacctgaatactgttgttgagattttcagccagccatcctttgctgtcagtgtgtggatcagagtgagtaggggagcaaacttacctgcatactgttgttgagattttcagccagccatcctttgctgtcagtgtgtggatcagagtgagtaggggagcaaacttacctgaatactgttgttgagattttcagccagccatcctttgctgtcagtgtgtggatcagagtgagtaggggagcaaacttacctgaatactgttgttgagattttcagccagccatcctttgctgtcagtgtgtggatcagagtgagtaggggagcaaacttacctgaatactgttgttgagattttcagccagccatcctttgctgtcagtgtggggatcagagtgagtagggtttttttttctgagtgtgaacagcacaccctacctaaggccacttaagagacactggagtcagaatctctggagaaaggatctgatacagtgctatcttaaagagatcttcagataattctgaggttaagcagcatggctctaggctgtatttataaaacagaaattatgctggagagaagagcgttgtccgagttactattttacttatattactcttgtcttatccaagaagtatctgaagtccttacaatatagcacacccagatttctttaaaaaataaggaaacactagtgaagattggaatgaagtgtattgcgtaaggttttataaatttctctagaggaagcaggcagagttggctctggaacttctctacactgtctacaagttaaaaataagctgatgttccaggagagtacggttggatcctgagagtaagacctggtagaataaacagtatcgtcagtgttctcagattccttgaaagcaggaactaggtgatattcttttttttttttctgagacagtttcactttgttgcccaggctgaagtgcagtggcatgatcttagctcactgcctgccgggttcaagcaattcttgtgcctcagcctcctgagtagctgagactacaggcatataccaccacactgggctgatttttttgtattttagtagagacaaggcttcaccatgttgatcagtcttgaactcaaattcctgagctcaggcagtcctcccacctcagcctcccaaagtgctaggattacaggcatgaagccaccatgccaggcctggtggtgttcttatttatatctccagcatctagtataataaacgacatatgatagatgttccttgaaagttttctgttaataagttcattccctatggagatttccaataatgaatttcttaggggtgatcctcagtgtaggagaacataaaattttaaagtagaaacaaaatagtcacacaataaggaggcaggccaaatacatggggtgaggatgtagctctttgtcccggataaatttatggtttgactctggtttctaaacctctctcccccacacccctcagactttcttcggaatggggcccaggaatctgaagtttcaaaaattccaccagcgattctatgcaaccacctaagcgtggctctttgtaggctcttacagggtattgtggacttttaaatacatttctagaaatggatgcactgtgtatctctcaagcagtccgctttaaatcttcttcagtgtgaacgtaataagtattgacttactagtaagtcaaaaaaataaagacttctgaaagatatcagagatgttggtcttatttttatagttaagagcaacccttactctttaatagaaagccaattggtggtaaagttgaccttcttaaaagattgaagaccataaccaggaaatatgcataagtaaagcacccccaaacctcctcaatagcctgtttcaacatgaagatggacaaaaggagcagactcagagttccctcagaatgttgagttgtcttctataacagctagagaagcatggccggaaaatcactctgtggaggccagtcatttgaaaatcctagagaaatacccatagaacagatgagtgattggagagagactttaggaataaggatattatttacctccatagagaactggtcattcatggtgaaatgagtgcatttaaattttttgtttgtttgtttccagtctcccagggtttcaaaccattgtgggtttacctaccgtgactacaacaccactcatctaagttccctgggaggtatatacacagggaaaaccctagagaaaattgttctgtatggcatttagggaatttatagctgtgggccactagtgatggggtttttaatagggttagaggatgaacaacaattgtattatatggtaaaagccgaacttgttctgctgttgttcctaacacagaaatagaaattactaaagtgtatggtagggtattagttgcgtgagccttccatacagaacaacacaatataaccagtacatgttacattgaatagagagtaattctttttgtttaaaaatatgagtaggtaggtacagtctggaaataatgtatcagaaatattaatagtgcttatctctgagtaatgcaaagagttttaaattttccacatttttcttgtttgttctagtaaacatttttattctttggtttgataaattgaagacaaaacctctttttttgtcttctttgacagtttttttatacggactttattttataatctgattcccttgtaattcttctaagaccacttccctgtgagtagcctgtgtttcatctacaccagattactcatcgtttctattgcatataggaaattttcctgtcattatggcatgttcatgaagtatccttcatcttaaaaatgttcttttatctttagtgttcatgaattttttcatattctttaagatcttcctcatatcccagagtctttgtgagtttctctgagagcacttctctagtagctattgtcttttccctcttaattccaaccttttcttactaccaaatgtattatgttcttctctattgtacttatattttggcttgccttccagtgtagagtctcatatatagcagggattttatgaatctttgatcagaccttacaatgtgctattccttctgcctggaatcttttctattcttttctccaagataatcctctacaaatccttcaagactcatctaagttagcacctcttctagaaagtgtttcttaacaggcagcattatctcaagtatgtgtattgggtccacagtgcttttataaaaccttgtgcgtaacttttattgaatttagcacattgtattataatagaatgtatatttatcagattttactcagagttccttaaaattagtgaagtatgtaatcttttttgttttttatatttttaatacctaatatagtactgaaaatggcacaggttcaataaacatgttgggaatgcaatttgaattttttgtttccaatctcccagggtgtcaaatattgtaggttcaactcccgtgacaacgaaaccactcacttaagttccctaggaggtatatacatagggcaaaccccagagaaaattgttctgtatgacatttagccagaagcattcagtgttactcataacgtttttgtactcaaactcctttatggaaggaaaccttggccctggtgacctaaggtggatttgacatgtgttgatcagataacattactcttggtcctaagaaccaattttacaaagattctaggtttcagtgggtcattagaccaatgtcagaccagatggatttattgctttaagttcacatccaattattaaccgttgacattatctgctatggtgaagagaggaagagtgccaaacacaaggaaaagttttatcaacaaggagtttctctcccagccctaaagcagctggcatgagccacctatcatgaagtcttccagaagcagaagtattgctaagctgatggtagccaaagattttctttatctattactcatgggcattgaaaggctattgcagtccaaaatcaggaaatgatttaatgaggacattaaacttcttttaacttctctccttcctttttgtacacattgtaagcatcctcacctctggttttccttatcacatagttttacctccatgatcttagttaactctgtcaaaaacttggtgtgttcatgtgcagtctccacacctttgtgtccaaaatatgtcttgattctagccaattttgtgtccccctgttgctctctctcttaatcagaaagcacatttatttctttttcatgttgctctactgccttctattaccttcaccgatctctagttttactttcctctctaattcgttcttcacaatatccccagaataattttttaaaaactgctatgttgccattatattatgtactatattatatacctgcatcatctcttgccatttctccactctcatactgtagtccagtcatattattcttttttttgaatgtagtccatgcttactgcatggactctccattcttccacctggaaaaacagctcattcattattcagcttaataggtcactttaggtcacatccaaattgctcacatcacttcactgccattgttcccatataaagtgttataatattgtcaaaatttatatatatgattatttggttagtggtgttctccacagatgactgtgagcttcatggagacagagactggctgctttgtcagagactcactgagataaaccctttaggtcatgtaaggattttgggcttgtctcatctagggaacacccagtggatgttcattgtacattgttggatatataagtctggaactcaaaagatggataggagatatcgtgaatttttattggtaccagtttgcctttcctctgacaacactcagctactggggcaagtacagaaaagatggaaggttaggttcattcagggttaagattttgtcaggaagtgtgaaggaagatgctgtggccagagaaaaatagctcctgtgcactctatggaaagtcagcccaagattgctgttcaaaccaaattcttttggtaaaatgctggcaattttccaaaatgagcttttgttatttctcatggcagaaaaatttactgtgaattccttaccataaactataatgagagctttctttcataattattggagtactcttagttctgggtttttgttttttaataaattctgggaagaagtgctatacgtggaaagatatattttactttgaatggaagactaaaattggttcttacataacttcagacatagaaatgaataaaagatttatcttagtatagactctgtggtttatattagatatataattgattcttttctcatgaagcacaagcagcaggagacccagaatatctagagcagccatcaagaagtgatttctcaaagcacttgaaagaagaaactattcaaataattaccaaggcatcacatgagcatgaagataaaagtcctgaaacagttttgcagtcggtaagaacttttcttttggctctctgaacatagccatggtcacgacatttcctccagtatagtggagagggacctgtcagggagtcaggagagacggggcccagtgatggctctgccatgggcatgatcagtgaccatgggcaagtcatctcatgcccaggctgtgatttcctcagctgtgattttaaagacacttttctcttaagtttctgtctttctgctagagaattctaatgaatcataatcatagattaaattgaccatttgatctggaacttaaaaagagaagtgtaaaatttagcagtatttctcctgtctctcacccattcctccatctgtaatctgattacatgggaatagttgagaatttaagacctaattgtcataatttcatgaaatgtgtttaacaataaaactactagatactgtagattagagtattatttaaaactactagatactgtagattagagtattattagaaggataagtaggatgttgcaaaactgtttgtgaatattttaagaacgtcctgtgcaaaaacgtcattaggctactctattgtagttttcaactacatctttttatagcggtaaattgagcatgtttggtgttatactgtgttatcagtgaatatggcattctgagagaagctatttcaagaatttgttactactaaaccttttagttcctgtagtcatttatcttttattagtgagcataagcagctctaatgcagattttgtggtagttccttttaatatttgaagattccccttgacaactaaaaagagtacgacatatcataattttacaacacgtaattttctgcttagtaagtgaattcagtgccagcaataacctgctaattgcaatgaggccttaaatatataataagacttcctttagccaaaatgttcaagagatatggtactctgttaattttgttttgatgaactaaataacaatacaaattattttttgtttgaacaattttgaaaatgtattaatatatcatcttattaaaatgtattaatttaaatagatatttgatgattccaaattttgcaaatgccttagaagctttaaatgaatttgatgtgaacatcactaactctaaagcttttcctggaaaatgctttgtttagtggatctgggatgtctgcttcttgggtgatggtaagaggaaaacctagggaaggagaaagaacagaggagtaggtacaaggggaaatagttttgtctgacaaaaactgcatttgcaaggcctctgctaattagaacttttatttgttaaaggcctaaattatgattaatgagtgtcactttttaagctggtattagaaaaccaaaagcattacttagcttaatgtagaatcctgattttaagtttggaaaatcatatggaatttaaatttgcagaagtcagctaaattttgattgctcagcttcataatatggatatcgtcttataaggtagcaacctactacctcatctttacttcagaaaggaggatgacagggagactatatgatatagacaaatacactatttgtctattcatttaattgttttctggagtggcatccacagttagccccattgcatatgtaaatcctgaagcaagtctgagaattcattaaccgtggcttgatcttacagtcagttgcttagcgtcatggtaactacttcatagcggtttttttcatttaaacttagcgtacactagaagctaaattgcacaggtgaaaagtatcttcagactttgggattaaacatttctggattttggaatattagttttatttattatgaatgcaaccttgaataaattgccaaatttctccagatagacctcagtcttcttttccataaaatgaaggtaattgtaggattagtcaagagcattatttgtaagtgcctggcatggcatgtagtaggcactgagtaactgttggtttccttctgttacatcagtcctagccgcttttcaaatatgcaatatattaaaatcaactttaatataagaaaaatttcctggaaagcgtagaatcatggaaattagagaaagtcttcaagtgtttaggcaccctgctttttagaaaaatgtctttaattttaaatggaatacttaggatattttcaatatagaagagtagaccctgagaaaaagtcatgcatagtcccactcactactcatagttaattattgtaaatatgttggtatttatttcacttttattttaatatgtagatttgggatttatttttatagttgagttgcatacaaaattttgtgttgccttcttttaatcacttaccttttataaccatttccccatgttgtaaactcagtgaaaacatttagtggctgagtattattccattgaataattaacttcttgtttatgtatctgctactcaatcgtatatttgtgtctacttttacattataaataggctgctagaaatgaaaacttttttcatatttcaggttatttccttagaatagatttcccatgctagaaatgaaaacttttttcatatttcaggttatttccttagaatagatttcccatggttgaattactagcttaaaaggtaaaggcacattaatgtggccgtggacttagatagcttttttgtcacccttcttatgagaccactttttaagaagtcatataattaatggatttcaggcaagtcataaaaatcttcgtattttaattatttttgcagcatattaactgagaaacttatttttaactcttttcaagtttagcctttgttaatgtattcatataagacctgaaaacaatagaaaaagataaataaacatgtattttactctagtgagcccttaaattctttacatggaaaatttttatggtactttgggatatctaaatttggcaaatgatactacagaattattatatgtggcaaagtttcttccccctttcagcttttacccatgtatttaatcagcattatgctgttgaaattcttcaatagtaactgaaaaggtttataaaacatttatgttccctaagtgcaatttttttcccccaaagggaatctgttttgtaaggattaatattctaagtgataaccatttgcttcaaatttatattttcttttcctaagatagaattgttttggattggtttgctagtgagaaatcatcaccacaaactccgaacagatttctgaatttacctgtttatatttcactcttgtgtacagagacctagcacagttcgtctcttatatgctagaaagattaaaaatccttaattaaatgtcatggaccaagcacatctctgtagaatgtgtgtgatagtagtattaggttaaaattattcaaatataaacaatttaaagtagcacaacaaagtagtacaatgactcatagctgtcattttatagaacagccgttacatacctggtgttggcttagctgcatattatctctcatgatcatgatacctgttcatgctgatcatttcctgttgaaaagttgtggattttgataaattaaggataagttgtggattttgatatatgtgtgtgtgtgtgtgtatatatatatatatatatatatatatatatatatattttttttttttttttttttttgagacagagtcttactctgtaacccaggctggagtgcagtggtgcagtctcagctctctgcaacctccgcctcccaggttcaagcaattctcatgcctcagcttcccaagtagctgggattacaggcatgtgccaccatgcctggctaatctttgtatatttagtagggacggatttcgccatgttggctaggctgatctccagctactgacctcaagtgatacgcccatcttgacctcccaaactgctgggattataggtctaagctaccacgccatgccaaaaatagtgtttattttaaaaggggcagtaccagttgcagctattggttttgttttgttttattgttcagttaaactctttttctatatatgcttccaggaagccaggaaatgttcacattgctaaaatttacccatatttctaatggaaatgaaacctctttaattgctgttataaaaatgttttttgtaatatcaaaacaaaagtttatctttgtgtatgaaaacttatgcaattcagttacttaagttgttttcaagcaccttcagtacttttggcttttttaataggtaaatagtggatatgctagttataaatatgttgaataagataaataagtatgtaaacatctgtatggtattttgaatgaatcatattagtgtcatgaagttttgaatgaaattttctgaattttacactgacttctgtattagtgtagattactgaaatacatagaatttgttaacaataaaaagaaaaaaaggaataaatctgattgagttgttaaaaatgggtatcagcttccaacagctttttcttattttcagcaggtgtttgttgaacacttaagatataaatatactggagcctcataggctgtatataataagttaaacaaaatagaatatggatattaactggatacacaattgattaccaaaaacaatagaaggataaaattataaggaaaaaaaccctacaaattctgatgagtttagaggaggtcatatcttattttggttgagatatcaagaaaggtttttgggagctattggactttttaaaaaattgtcagctatacagacaataatagaaaatacaactccactattttttatcttaagtacttaaagttctaaatactttcagggaaaaatgtaatgatattggtaatacccagtttgaggatgtaaagggaaaactgcagattttgtattactacttgatgaatgcatttgcttctgatgttcagttttaagtggtttcatttgataccaagtcaatgcaggtatttttaaaagatttaagagtatgtgcttaaacagtttaatagtgcatgtgcgttggaacttttaaaaataagtcatatggatacagggctgctgcttagggatgtgcaggttatacagttgtgcaaggatgccattgttctccactgttctcttttctaatgtttatattaatgatttccttctgcagaaacctgaaaatactacaagccaaccactttctaatcagcgagttgtagaggtggcgatccctcatgtagggaaatttatgattgaatcaaaggagggggggtatgatgacgaggtaccttttacagccctctgcaccattgctacttaacttttgctatttaatacaaatactttgggcatgcctgcaccctcatacttaatgtctattgccacataacatacagctttgccccctcatagtccaaaattactttaccaattattaacagaactttgaatttcaaatgaaaatttaagtagaaaacttatggaatttgtcaaaagaattttctgtttgtggagttaattcttttatgcagaaatagtaccagtttacttccaggttggcagattacaataagatttgtttaattagtacaaaaattttttgcatttaaaaataattttttatattccattcttgttttactggaattacttataatccttttcccactatctcctgccagaaaatcccacagcatgattgcaggatggataattgatatttttgcttctacagcctctccatgtgactgtgagtggagtaagtcatcaccgttactgagtgcctaccgttaataggacctccatgtttattcttatctcttcactgttaattctcatttacttagttttccaacagtatggaggcatttttgtttttcatgatttagttctttggaatccagatgaaaatgatctattgtcttattctatcagatgattttctccccttttccacttttctcttgagacacttaatattactctttttgaggaacggccagtaaagctgtttttgaacaggaacacagaggaggccgtaactattgggtagtgggggaggggggtgatttggaaaaatgcttgttggattctagtttttgtgggtttgtataagaattgcatttatgttaagttttttttcacgtaactttttttctgacttactccaatgttactatcatgctagagttaatcaccaaagtcagaagtgtcataaagacatatcactgtaccagtgtaagaaatcacacgccataaagagaataagcagatttgtgagataaactggtcagagagttttctcaagcaggtgttagatatattgcaattctcagtatataatccaaagtaaatacaatgagtaataggttcagtgaatcagaggtgacggaggcaatctcttgatttctgtaagatagcttcatagggctttgagtaatttcactttgcagatattttaaaatgtaaacagctaaaaataataagctattatgaaaacaaaaaaaatgcttaagtatttgtacttaatggctctacattgttctagttaactattttataaacatgctggctcttgaaaattatgggaactggcatgtttttaataaacctatcaatttattgattaagcagttaagtacttgttttaggatgtgccctctctcatttaaaaaagttgaattgtgattaatcatttaacactatcttttttgcaagtgcttatgtgacagagttgtgtgttttgtcgttttttaaaatttattgcagtgacagtttaacagtgcatgtgcattggaacttttaaaaatgagttgttatggatacagggctgctgttcagggatgtgcaggttgtacagttctgcaaggatgactagacaaggggcagaagtgggaagcaaattgagttcatgatgagctctctgaggcttgaggaagaggtaccttttttaattggtaaaaagggatgttgctttttctaaatagttcactcagaggatagcacatttttctaatttgtttgtctagaagcagggtgcctttttcaaattctccaattcagagaggatgcctttttgcagtttgcacaaaggctccgtatgagccagctgtgccctgtatggatgatcttaaaaggtgcttacatgcatattggattaaatttggtattaaaagtgcaacatttgatttataaatatggaaaacaaaagagtttcagcttgcatgtgaataaattattttagtttaaaaacctttttttaatgttaactatcttctgtggcagatcatgatgacaccgaacatgcaaggtattatcatggcgataggtaaatccaggagtgtatatgacaggtgtggccctgaagcagggttctttaaggtacaatgaacattttcattttcgtgtcttttctttttcaaaattaaacttcttaaaatattttatttctttgaattcagtttggttttctgtataatttctcttttcctatcttagttatggccaccggatatcctagggttttattttatgtattaattaacctaatactgattgtttttctcttaatccaggtaattcaagaaaaaaatctttttatttgagtcactctaatagtgtgcttttgatttgtcagcagaaatttgaattgtattttttatttgaagggaatgaggacattaatgaacaataataagaactgagtaaattgccctggtaatagtttattttatcttcattgttcatattattggtcaatatcataatattctttaattttattatcattaggtactaaattgctttttcgtttataaaatgatttatttattatattatttttgttatgtttccccataattaatttttgataacctagtcagttcaagacatgtgagaacatcaagctgaacacgattccatgatttacccacatctttttccctctaatatcagagctttacaatgttttgattacaattttttccttttacagatttgaaagatgaaaataccatgtatgttttgtcattttatttacattaactgaaaatcttcaagtttttttttttttcactcttttcaaacccttcttagtggttttaaaaagcagcttttttgaggtccagtttgctacagtgaactatgcatttctttctttttgacattaaaaatctaacatttttcattttctgtattttgccattatccaacttggtctttcaaaaactggttcttttttcactgtttctttcagtatacagtacaaaacaaaagccttgtacatagtagtagacctatcaataagcatttttgagtttgctaagattagggtgactaactctcctgatatgcccgggactgagggatttcctggactacaggatttaaagtgctaaactgggaaagttctaagcaaactggtcccaggacaagttgatcaccctattatgatcccataagaaaggttgaaaatctacttctaaaaaaagaagaaaaatgtattttttatagttttctgttttaatacatttctttatagtttctaggtttctaactggcttcctaatttttaccattagaaattccttcttatgcccagatagtctacattttcttttcttaaaaaaaaaacactgaatatatgtcctctaaagtatttatttcttgtggaaaagttatttatgatttacagtgccattgtcatttctgaccagattgggtcttcttatgttgaattgcaaatctcatttttattaagttaatatctgcatataaataatcacctaattgtatatattacaacagttagtaagcccccagtggataatgactttcagttatttaatctgtttggcattaattcatatctttaaatagaatatttgggttttttattcacagtttacacattacctgttgaatttgcttctgtggaatatgaatgatgagctctctttcttttcctgcgtcgcatacatacactgagagacacagctcctatcccccatacacacacacacacacacacacacgtaaaatcttgtaattttgattatatcagaattctgcatttgtaatattattatgtatgctatatgtgattgagttatattataaatattactactttctgtttttcccttaacttttgttttccttaaacttagttgttttgttttttggtttgcttagtttatgtgtattactgatttagttcaaagctgtccactgcttgtttaaatctcctctcattctgcctttaccagttttatcttcttgggacatctattctggagctttatgacctgccccaatctgtattggtttttcttttctcctgatccataactagtaacttgagatctcctttcaccatcattctggggattccctttgcatcctttcctttgtgtattttccatatttcatatatttttctttattggtttgctctatgattttgatagtacagcaagaaagcatgggcaagaatcaagtttgtggaagagggacagagcattttcttaaataagttatgttatattgcaactctcagcacataatctaaataaatactgtggttaataaacttcagtgaatctgaggtaaaagttttcaagttgctttggagattgagtcgaatttgacgttttactcatagcataaggaaactgtgctctttgtcagatgttaaaaataattactacagaatttctatttcactaaccattctccttactatcatcatactccctttcttgcttttttttttctgctggaaaaacacttacaagaatagtgggaatgtacattaggaaggaagtagtttatatgttgatattagcagccagactgcctgggccgactgctttctagctttgattttgggcaaattattcaatctttgtatctcagtttcccgaggtgttaaataactatttattttattgagtcattgtgagctttaaataaattgtatcaatgttacgcttttaaagtagtatctggttgatagtaaatgctcagaatttagctgttattgttgttagtattatcacgaagcttatcttatgtgtccagttctggtccacatatagtcggagatgaaaaatgagaaaaatgaatgtgccatatctgtgtcaaggacctttatttgctaatagaatttttttaactcatttgttagaaattgtcagtaccattttggagtaacaaaattagcagttttgtttggcttaacctaataattactatcataaaaccctctttctacctttttatgtctttagtgtgtgtatatgtttataaaatttctgaagtttgtgtacatttgcacctatctgtgattgagtaatacatgagtgtaacccctttatgtaaacatacatcaagttgtttctaattaatgcatgtttttggtaaaggtagaagcatttggacacaactctagctgataatatgtcaccttaaaaattttttcgtataaaaaatgaaagtaatgtatacaaaatgcagttgtattcagtaatatagaggtgtctaaaataaaactaacaatgacagtctctgccactgccatggccctattgtaaccattcttagcactgtgtatcttgtttttttctttttgtttataacaatgcacatatacagagacttaaaatttttttaatgtagattttactgttcataatattttgtaacttatatcactcagaaatctattgtgggcttaaagtttagacagtatcacattatctttactagctgtctgtatacacacatacacatgtgtacacatgtgtacacacaggtacacacatgtacacgcacacgtgtacacatacatgtacacacacatgcacacatgtacacccacacagtattccatgctatagatatattctcatttcttgtatcttaccctctttatggacatgtgtcctatattttctcccagtctaccatttctatttgaattagtttagagtactttttcttaaacaggttttaaaatagtatgttcgttttcctactttatggattttttttgccatattaaaagatctactcttacccaaagttatataaattttcccactacttacttaaaatacttttcttagtaaatttttattttttaaattcaaatgcttactgtttaactcattagcattttatttgggctttctgcgttctgtattaaatgaatttggtgtttttctattttgtgctgtcttcatcaagtttgcaattagggttatgttagctttggtaaatgaatttgagagctttcctgttttttttaatacttaaccgtgttagcgttggaatgatctgttctgttagttagaactcactcgtaagatcatacgagcctagcgccttcttgcggggtagatcttttaacacatttttttggttcattccatagttattggcatgtttaaatattcttcctttttttgattgattctaatcatcatcatcattcagtattaattcataaaatatgtacacaccatagaatctaacatatggttgctgcttctgtcttcctgtttcccctcaattagatatagtatttttaaatttttgttcttttttgtgcttagtgtattataaattgagggaaaagttgtttgttttgttttgttttgttttgtttgaggcaaagtctcactctgtcgcccaggctggagtgcagtggtgcgatcttggctcactgcaacctctgcctcccaggttcgagcagttctcctgcctcagcctcctgagtagctgagactacaggggcccgccaccacacccaggtaatttttgtatttttagtagagacggggtttcaccatattggccaggctggcctcaaactcctgaccttgtgatctgccctcttcggcctcccaaagtgctgggattacagatgtgagccaccacgcccggccgtgtttttgtttttttttaatatctcttctgtcctgccacgtcctgaaaaaatcttggtcgggtctattttacattagctttttggctatgaaagaaagctttttaactctgtgcctgtttaggtacttctgaatatggatttccttatgtattatgattagaccaactttttaatactctgaatgtttgctagtgataagaatagtgatgccactgtcagccttgttataagaaacttaggtctgagtaagtggacttgctaaagtttaacctccgaattaggaagttaccaacccagtcataggaactctttcaaccacaggccatcatcccacgtgaacgtctacccaataagaatgcagtatgaaaaagttaataggcaaagttgatctggaaaaaaaaatgcaatgggctacactacactaacttgagtccttcttcaaattgactttaatggttaaaactagtttctactatagaaaatccccaaataatagtggcttacggagagaagattctgttgtgtaaaaatgaaattcagaggaaagcaatacaaagttactatgataagcaaaaataaaagccagaagataaaaacaaaatattttcaaagtactcgttgcttgtatatatgtgtagaggtgggagggtcatattataattacaattatgggattagtgtaagttttttcatttattttaaaagacattaaaatttctttttttgtaaaaattttgtcggtatcaaagtacccttagggttttattgaagtaatacttttgtattataaaaattttttcttaatagttgtttcattgcttcataataatggtgtccctacttgccgtaactttatcacccttttttgcttttgaaatgtctcttaatcaccttgtttattcaatagatataaaaatgtttattagaatataaaacatgttgaaaagtacaactcggtgaatttttttttgagtgatactttccttatttacatggcctttaaggaatgtgaagaggaagaattatttatcaacatggtattaatgaaatcttgttccctaaaggtatacgcaggcctaaatcgttaatgcaaaaaatatacttctccatgcatcttgttaaattcaagacagcggtccaacatttccatgcttagccaaagaagactcttttcctcttggttgtgtacatttgtagcctgagttttaagtgccacatctttcaagtcagttacacatcctgcctttaggctctcagacttgtacttccaactctgggttatcacagtgtgtgtttacccatgtgaccaccaactaggccaagaggtagaacaggagtactccagaagtaccttttttccgccttcccatcactacagtctgtccgtacccaaaagtagccattatctggacttctaacaacatacgttagttttcttgttggcctttatacacttggcatcttttactctaggtccttttttgtctgactgcttttactcaacagtgtgtttggagcttcatccatgttatacagttgtcatttcttccctctcatggtattttgttgtatgactataatttttttctatccttctgttgatggacatgctaaaaaggtattgcctgtttatatgcagggcattgtcctaaatccagggatgtagctgggataatgatggactgagttcctaccttaatgaacctcattttctgctagggaaagaaacattaattagagttattagtatgataaagaaccagtgtaatgtggaaaaagaacataaaataagaaaacagagctagtacctagagggcttcttagaaaaagtgacttgtaaactagtaatacataatccaaaatgtagaatgtaaatgtttttctctcacttcctaattctcactccacagtgagcatctattcattgtttcttgtatatcctagagagatagatgagactggcttacattcaggcattcatcctgtatttataatttaaataaaagtaggagtatactctttctttttttttctttttttttttgagacggagtctcgctctgtcgcccaggctggagtgcagtggcgcagtctcggctcactgcaagctccgcctcccgggttcacgccattctcctgcctcagcctcccaagtagctgggactacaggtgcccgctaccacgcccggctaattttttgtatttttagtagagacagggtttcaccgtgttagccaggatggtctcgatctcctgacctcgtgatccgcctgcctcggcctcccaaagtgctgggagtacaggcgtgagccaccgcacccggccagaagtatactctatttgcttctttttcttgagtttatttttcatgtatatgtaattattcatatcaggatttgtagatttatctcagtatttttcctttgtttcctagggtttatcaaaatttatttaaatattctcctagaatagggtattcatgttacaacaaatttgaagaaagttaatacatttccacccaccatagaggctgatgggagcagtatgtcagcacactgataacttactcatactctaatttaggaaactgtctcctactagctgttaccagcaaggtctccatagtcctaggtttaaatcctaacattatcatttaataattgtgacctcaggcaatttattaaattatcagaaccagtttattcacttatatgagaagttatcttgagaattaaatgagataattcacgtggaactcttcaggcagtgtctgtcacataaagaacacctaagttgttacctattcttattaaatttatcagcattgttgttgctgaatatttgagttattttcaatatcgtgaacatttttgtgcatatattattgaacacttgcgtgaacatagcagagttgacaagtcaaagtgcttgcaaattttaaatactagtattatcaaattgcctacatgtagttatattgatttattctactattgatatttgcctaaaaaaagacattaaaaatgtaatctcatatttcaaaatgtatttctttgatctttgtgagggtcagtttttttcataaatattttggcaattggtatttatgttgactgtcattcatctttatacgtttattacactgagtttcttttagttaagtgaacattgatcttctaagacaattgattcatctgtaatttgcaaattatattttgtggtttataatttgtcttttaaatttattttttgtgtcttactatacataattttttagatcttataaaatacagcaactctttttatagatttggtcctgtgatcacttataaaattatgcaaaattttaattctgctgctttcatggttttataatactttttgttttgattacaggatagaagattttagttttctctgaatagtaaaatatccagatagtctaaacataaaatactgactaatgcctccttttcacgctgacttgacacatatactaaatcatacctatactaaatcccttatcagggatttatacttaatgatatactaaatccctacttataagtagctctaactgggtctctgtattccactgatctagttttctgtttttggacaatacactgaataccagtgatcttattgtagatcgtttgtaatacactttcacattttgttagaagaacacttagtaatttttgttcttttataaacaggaagtttggcaagcctcatttttcttctgatgatttttaaaatcaattgccacttcctttccaaatccttttagaattgtatttatgtattaatttaacatgaagcagataattttttttttagtattttgagtcttgcccaaaaggaacatgatacgccttttcacttttattgtcttctgttgtgttctttagtgaggttttataattttatttcataatagtcttatgtccttttgtttaatttattcctacataattttttttgcctttatgaatagggtcatttacttccattttttttttaaccaggttattgaaagggtaggtaacgggataattaattttacatgtttatgttgtatttagttaactttattgaactctttgttttctaatggtttttcattttattttcttgattatttcagtaaactgtctcccaaaaattattttctatatctttatttcttatttcatttctggttttattgcggtgatcagaaatttttattacatattctcaatattgaaataatggtagtaggtgcctttgtctagtttctgattttaatgtctccagtgttttagtattatgtataatgtgtagttttggttccgctttatgaattttaaaatactctcaaattagtagataagggtttccagctaaactgattggtattgaaatttagaaattttataatatacctattaagatgctgaatagatttctccttcttaatacttgtaaacccttaattcttaataattgtaaaggtgttaactttgatctatgtttaaaaaaattattgtaaacactttttgttatctcatatattttttgtacaccacactgtttgtttaccaaaagtgggtgtgggtgttggcatctgggtacatagacaaaattgatctatagtttctttctttatatttgtcaattttggatatacaaattatatatatataatatatctatattatatagccttttataaccattaaggaggctttctcttgttttgttttgtgtttttttttttgagacggggtctcgctctgtcgcccaggctggagtgcagtggtgccatcttggctcactgcaggctccgcctcccgggttcacgccattctcctgcctcagcctcctgagtagctgggactacaggctcccgccaccacgcctggctaagttttttttgtatttttagtagaaatggggtttcaccgtgttagccagggtggtctcaatcttctgacctcgtgatctgcccatctcggcctcccaaagtgctgggattacaggcgtgagccactgcgcccggccgctttctcttgtttttctggctctgtggcagtttagatatcacagaaattatctgatccttgaagatttgacataacagcccagctcgaaaacatcgtgggcttgatatctttcgtgttaccagatttctagggcaaacttttaagttttacagagtctgttcagtttttctgcctctgaaagcagttctggtagtttatatttttctagattattatctgttgggatactgtagtctattaacaaagttatatgtgttattcttcaagaaattttaaaacattttttctgtattatcacctttcttatttctaccgatgagttttcttcccctttttggtcttccatccaactttttggaaagaaaaagcctttgactatcaaattgttacattatattttatttctcctactttatattttatttttctaaattcttgaaatcttttctatatttaaattggatatatatatgtatatatatatatatatctatattttttttttttttttggatggcgtctcgctctgtcgcctaggctagaatgcaatggcacagtatcggctcactgcaacctttgcctcccgggttcaagtgattctcctgcctcagctcccaagcagctgggattacaggctcccgccaccatacccagctaattttgtttgtttgtttgagacggagtctcacactgtttcccaggctggagtgcaatggcatgatctcagctcaccacaacctctgcctcctgggttcaagcaattgtcctgcctcagcctcccgagtagctgggattacaggcgcccatcaccatgcctggctaatttttcctattttttagtagagacagggtttcactgtgttggccaggctggtcttgaactcctgacttcaggtgatctgcccaccttggcctcccaaagtgctgggattacaggtgtgagccactgtgcctggcctggaaatttttttgactaacagcccaataggttttgatatctgatattcccatattagtatagttttttatttctttggctcaagaataatttagagccatattttaaattttctaagtatttaggttggaagatatctctatttataattcctatttgtattacagtgtggtcaaagaatatggccaatattatttcagtcctctggaatttgaagtaagttttcttcatttcttggcactgtcagtttttaaaaaatagcccataagcattttaaaatacacataaactctcttaaccaactttattttagagataagagcaatcagacttagaagattatgtgccttattctatgtcacaattaattataaatgatgtatctagctttttgaattttaatctcatcagtttcccattagatttaactgcctccagaatataaatgtttatatttttggtatccacatactcacatatatatatatttggtatcttcatatatatatatatatatatatagagagagagagagagagagtttacataaaaaattaagtccataagaagttataaatttagaatatggttttacagtattacttagaaaagtagaaaaaagtctaggtagaaattatttgcatctttagaactgaacaaggtctcaaaagcatgacttaaactaattttgctgatgggtcatctgtaggtagatggggaatgaacaagaaaggatatcacacatatggagaacttaagaaacaaaggcatgtgtgcatttgtgaggagacaagcctaacctagataggagggagatccttgttgcaggatgataggaaataagattgaataaatggcattaagcctgattaaaggtctagtgaaaaagttaaaaaagttaaaaaaattaaatagcagttctgtcatctaatgactagtatcacatttcattttgcacatgcgtggtgatttcattgcagtgtctgtgataattaacttaaaataattagcatagaccgccaaaaaatatgggcaaatataattctagaacaggattctgaggaggtagtatgagacaaatataatgttaatttactcataatggcagattgtgtagaactctgctaaatatactagcatggaacatctgttgagaatttgaataaatatgattccagtatattttaaaagccaaaaatttcttaaggaagtgtgtaaaaaatagttaaggaatgcatttatgctagtgaaaatgtttttttgtatgtttgaaaaacagcttctagaaatttagaaggtaatttcttaagaaggaagtgtataaaaaatagttaagaattgcatttatggtggtaaaaatgttttcttgtgtgattgaaaaacagctcctagaaatttagaagtgtctttctacctctgctggtttaaacacctatatactgaaaaatactgtgactttggcaatttgcttgtgaaaattaggagagtcttaaattcagcaaaatcaagaggtgaacatataatcttagagtataagaggttatatatttcagttctataatagaaatctgctatttattaaaacagcttctattttgaaagtaggtaggggaatgatgaccatttagtggaatcactccgtgcatgtaaacctgcaatattaatttaagagactcagtacaaatttgttttattttggtcatgctattttgtactaaagtatgatatacgaaatatttgaatattctaaaagtctattacaggttgagtatcccaaatccagaattcaaaatctgaaatattgcaaaatccaaaacattttgagtgccaacatgatactcaaaggaaatgttcattggagtatcatggattttggatttttggattcggaatgctcaaccagcataatgcaaacattccaaaatctgaaaaaaatctaaaattggaaacacttctggtcccaggtatttcagattagggatactcaacctgtagcctgtgacaatcattatcgaaggttcatatcaacaagaacagtaattgaattgttaatgttttagatttattctcaaattcttcctactttgattattatgtttggtctccccccttccccgtttttttttttttttccgaatttggataataggaagatttttaaagagctctaagagaagcttatgtgtgctacctaggcacacagtaagcgttgataatcttaaatattaaaatacagttgatatttatggctgttatttattcacataagactttggaatgacatgtatatcctcaaaaaaaaaaaagtcagttttttcaagggaaaagtattttaaaataatttgttctcttattctatttataatcttatgctgcatagaaagaacatattagccttcctttttaatgagtatgatattacataactagaatatttcatttaatgtttatcagttattttttctcccatctgtacaatacaaccatatagatcataacatctagacgtcaaagaattacttaagaaaggcatgcattttttaaattaaaaaaactttttaattgaatggattttttgtaatcttgcctgaagcccaaaatgtttatgcttattagagctagaatttacatataagtataatataaatgaatataaaaagctttatcttaatcatatggtcctcttgtacatagcaatatgtacaatatgtgtaaatctatacatatttctatatggtcagatattttctagattttgcttgtatattaaaacatgcattagtatttgttatttcccattattatttgtatattatgaggtatttttgtttataaagaaaaactaagtttaaaccttaaggtaataatagtgataatatattatcattattattcttacattaataaaatgtacgtactgttggagcaataaatacttctttttgtgataattataaccccggggcttgatgttgcattccttatttgtgggctattcagctaaaagttaattgcaataatacgactatgcatttaagaacaattttctttcagatttgagtattgttgggagctatatatcaactctagaattttagtgttcaaactgatgcttagaaaggtaaaacagaacgggaaaacttaccatctccatcttatgatgtctgtgaatagactttgactaggctctgataaattttacagaattactcacattgtaagtttagacatattttaccgctttcatgtgtggaagcaaaaagaacgtttatatagtgaagggataaagaagggcctttgtggccaggcacgtggctcacgcctgtaatcccagcactttgggaggccaaggcgggcggattatgaggtcaggagtttgagaccagcctggccaacatagtgaaaccccatctctactaaaaatacaaaaaatttagctgggcgtggtggtgggcgcctgtaatcccagctacttgggaggctgaggcaggagattcacttgaacctgagaggtggaggttgcagtgagccgagatcacgccactgcaatccatcctgggggagagtgggagacttcttttttttttttttttttttttaaaagaagggcctttgtggtcagttattcagaaaattccttgagtctatggaacatgggactgtgttcttagttgtactgccttgtttgtgatactttaaaagccaaaaaaaaaaaaaagatttaaatgcaagaagaattaaactcataatattgaaggattttttggtgttcaaataattaaccaaaattatcattttcattgcattttccaggcaattaagttggaatatgcaaggttggttaagttggcccaagaagacaccccaccagaaaccgattatcgtttacatcatgtagtggtctactttatccagaaccaggcaccaaagaaaattattgagaaaacattactagaacaatttggagatagaaatttgagttttgatgaaaggtaatttgaaagtataaaattcatatgctcaaatcgttctttttttttttcctgcagattcccaggataattttttgagtatttattttatatatgcatgggcacatattttaataaatacgtaacaaaatttgaactcaatgtgactagttgctggagtctgtggccttttgaagtttgaactgaaaataacttagatcattttaataaattttaattgtgaatcaagtaatcactgcacttattacactcaatattttagaaacaaaaatgggcttctcaacctctgtactatatagacagtttaaattagataaatctttgttgttggggctgtcctatgattgtaggatatttaataatatccctcatctcttcgttagatgacagtagcagctcccaagttgtggcataccaaaatatctccaggtattgccaaataactcctaggggagcaaagtcacccttattagagaatcactggagaaaagttttcagtcttgcagataaaataattaaacattctttgacataaagaggaggcttagaagggttaaattagattcacgcagacatattttctctggaaagagaaaatattctatagaaatttctgtagaatttctgtagaatatagaaaatattctatagaatatttccagagaatgttttctctagattatattagtagttttataaagaattattcagaaagtcctattaaactactaatgttaaaaatcacaatttaattagaatgagtgacactagaaaataatttcagggcccatgtgaaattttagagtattgaaagttattttcatatataaaaacatttatgctgttgcagttcattgtaattttaattctgaaatgatcatccttttatgagtgtctcaaaaatactgagttaaaagtgtatagcaaagaatatgaggggaggcaaagcatctggattgatcctaccttattagatatgtgccgtgaaatgtaggattctgtgcataatacaaataaatagttgtgaacaatatctgataggtggttgaatgctcagtgaatgttggccactactgtttatattagtagcagtgtggacatcatttattttgatacatgcgactgcagagagttcagaaacagggttgttgtgaccctcgttatctgtgctatcagtgtactgagttccattggatctatgctgtttaatttggagaagatattaatggagtaatcacattgacttttcagtcttttgcagttctctgactataactagttaatctgttttgataacctgacttgtgcttgaaagacagagttatgcacatgtgaataaatacatttcgtgaggatttctttatcactgattctgatcataaaatccagtgggatgtttccatttttacctgagatgataggcacgttttagactctttagtatttaagaataaataataccatgtggggggaaaagaagatgcagtgtctcttgagcttgcttaatagatgcacattattttttaaaagtttcatttttttcctatgcaaactgtgttaattagaatgtaatttaaaagccatatatcaatacaacacagtaaatttgaattagaattattgctcctgtcttctttgtaattccccaacattggtcccaaaaatgtttttcacttaaggttatttaggagttgtttctatacaaaagtactgctgtttttgctcagtgtttatggattttgcttttgatttacaaatatatatatatatatatacacacacatacacacacgctcatatgtatgtgtttttttttaaggtgtcacaacataatgaaagttgctcaagccaaactggaaatgataaaacctgaagaagtaaacttggaggaatatgaggtaatgtgctttcttagaggttaaactacagatttagggattctgtaattcactgatattcctttcgtttcagcccaactgaagttgaatttgttatgaatgatgagtaaaaaaattaagtttccaagtcaatgctcaagtaattaataattttatatgtgattttaggattaacatgatatgatagcatgtagaccaaaaagtttaaaatcaaaaaaggaagatttttggttttttatttcaatactaattctcaagtactttttaaatgaacttttctagcttaaaaacagaataacaaatgcattgttaattttgaaatcaacttagaaattgctgttacataataccaacaagtaatatttatcaagaccctactatatgccaggcatttgtctaagccctttacatatattaactgatttaattcagacagtaacactgtaagataggtagtgttcttattcccatttgacacacgagaaaataaggcatagagcagtgaagtaacctgcctaaggttttcacagccacaagtttacagcttggctaatagaacctacattcttaactgttgcactacactgtgcaactgtaccctgtgggctgtattttttccttcactttgattcatcagatatattttggggaagttaattcattttagtccctatatgccatatatgtttgtcatgagacagtgttgtgtgtgagagagcacttacataggtacttgtacatgtgcttgtgggatttttttgtgcacaaaattattttttgtcaactttggctttaaaatattctttattttaattgatgaattcatacacctagtatttcttcacatttttaaatttaatcttatgcattgtcttttttttaatttataagtctagtaaattttaagttgttttcttgggtgcctttgcttaatatttagttccatttacaaacttaattatggtactttagattccctaaataattagtgtaattcactacacaaacagggaagaggaaagagagagaaaacactcattattgatgaaaaccttagctagtttggcgtataaggtaactaccttaattcactaaagagtgtctctaaaaacaaaaataggaaataataaaactgcagcaaatatatagaattgtgagcactgaaagcttaaaatttttgttgtcaaaagcaaggcaatgaaaataagcgaaaagtaaaatactggaaaagaagaaacaaagacatcattatttgtagttttttttaccttgaaattcaaataaaatctacaactgatgtattagaactagtaagacagctttgcagcatgcaaacttgtgtcagacatcaattttattcccttttgccagtaaaaaaagtatgagaaagtataaaagtgagaccatttacaatagtatctgaaactatggagtatatagaaataaatttaacaaaaggtgcgtgtgacttctgtggggaaaattataaaacttattgggagacattaacaaagacctaaataaatgggcatacatatggtatttggaaaacttgatattattaatatatagatatcacttttcccccaaatgctttataaattcagtgcaggctgtatgaaaattccagcaagatgttttatggagcttgataagccaactgaaaaatgttacggaaatgcaaagatcccagtccacctcccatctctgacaagcaagttagtgaacagtataaagactttttaataaatggttctgggaaataaataaaatttgatttcttctttattccatatgcaaaaattcatttcaattgtgaaagactcctgtgtaaagctgtttagaagtcaacataggtagaagcccaaagacattcatttatccataagaggcactcactgaccagatatttttgaccaggatatgtaatctagagccagagaaattcaaaatttgttttctcttgaccctgaggagcaagtcaagtcatcttttagctaataatgactccaaatctgtgccctccacattgattgagagctcttcccttgtccccaagattcgtgttcatggaacttgatttttaattgtgacttgattctgcaatgcttccttcagtttgcttcaacagattggactcattatgttttttttcataaaatcttctcatattctaactgcagggctgttaaatcatacaagtatttaaatgacttgtttttagattctgcatattcctcctatctttgtcttgctctaagttcagggttcagtaaaccatagcctgcagaccagcttaccacctgtttttgtaaataaacttttattggaacatggccatttgtatacatattgtctgtggatactttcacactgcagttacagagttgagtaactgaagaagatgaggcttgcaaagtctaaaatattatctggccttttacagaaaaagtttgcctactcacaacttctaaggtgattctaatgacaacaaggaatgacagtttgaataccttccccagaaaagctaacttcatacttgcaggacaaattttacctttatttgttatgaagatctactaatagcatgaaaattatgtcttgaaaattaaaattaagactggatgtggtggctcatgcttataatcccagcacttttggaaatcaaggcacagggagttgtttgaggccaggaatttgagaccggcctggccaacatagcaagaccctgtctatacaaaacagattaagtaattaactggaactgggagcatgcacctgtaattcaagctacttgggagacagaggtaggaggattgctggagcccagaaggtcaagtctgcagttagccgtgatcgtgccactgcactgcagactgggcaactgagtgagaccctgtctccaaaaaaaaaaaaaaaagtttatattcaaggagaatatcgttggctaataactatgtttcttatttttgtttataatgtttatataaaagccttaacacttttgttatcagtattcactttccaatttatcctacattgaatttcagttatttttcttgagtcaattattataaagtaagctaagaaaatcttgactttggtatcaccttagaattatttagtcctattacatgccctatagttgttttgggggtggggaggggcattgaaatgtgaactgcagttattcttttaccatatctcatgtaaataaactattcgcctacacacttaaagtcaaatttaccacatatttgcgaagttaaaaggttaaataaatctaactttttttagtttcttaaaattatgtattaagtatgtgtccaagctttgattcatactcagcgtaatatttcattttcttccatcagttgatgtagatataataatagttcaataatatgattttatactgatgaatttttgagatgacctgattgattatcctgcctttatatttctgttatctgctagtaaaatctttattgtttaaaacatttcatatccatgcctaataatttttagatttaatgttgtattaataaatagtcttgtgtgccagaaagtaaagtcttgttttagttctgatgtatcttcattttgaactctttatttctattaattcagatagtagcgaaacagtgcattactttttgtacagtttcatagtactttttaaatcttactctgaacatttttaatattttctttcacctacaggagtggcatcaggattataggaaattcagggaaacaactatgtatctcataattgggctagaaaattttcaaagagaaaggtaaggcaaagtggacaaatatgaaaagagcataatttttgcacttaattctattcaggtgtgacctcatccatggaaaagattttattcatactctgtatttttaataaatgttttattttagatcagttttaaatttacagaaaaattacacagttgatatagagacttcccatataccccacataaaatatattttccatttaaaactccgtaaggttggcattagtgtctgtgtttattagctctcaaacactacccttgaagctgagtctgatcttgatatcaagtcagagatagtgtttgcagtctgtctttgtgaactttcaggttctgtaaaaagtgtagctgtagaaaatttttgtgtactgtgactttaaacaaattttggattaattttcatttaaattaaggatggtcttaaaggaatatctacttatttaattatactattattttaattgttattaagaagaaaggatacattttgctttacttacattttaggttatttactagtttgcatgtatttctccacatatttcttaatgcgtgttgttgaacattaacttccctagtgattgttttttgagaaaatgctttattttcaatgcagtgtatattgcagccaagtaaaagggatattgaatttttcctttcttttttgttttatgaaatttaagaagctcccacttaggtaatgatgcttctttttcaaaaaaagaaacaaagatcagtgtttaattctggagctatgctgtccaacatagcggccacctgacaaaacttaaataactaaaacttttaaaaccaaagttcagttcatcggttacaccggccacgtttcagtagttcagtagcctcatgtggttagtggcctctatttttagccagcacagaacatttccataatcacagaaatttctattggacagtactattctagaggacagtactttcatttttatattaatagttatcaaaatttttagttatcacacaaaaggaaaaattaatgttttacttaacaatttgtcttaagtacttaagtacaaattatttaaagtcctagtcattgtgctatttataagataatttcactttagtcattgatgtagaaaacttactttgatcaatacctccaatttatgagttatgtcaatcaagattttatttctttaataggaatattcaaatgtactattagaatttatatttgtgctgatttgagaaaaataatgtgatcgtataattcaatagagtgagatataaaaaggcatttcagtgttacagataaagaaatcagacttcacagagatgtagtaactttgtcaaggtcacacagctaactaggagaagaaaaattaaaatagagacctcgtattcttgtataatttaatgaaatcatgtaagtacaaaatgtattcatttatctcaataagaattaaaaagatgaaactgtcactttgtacctatccggatagcttctgtattagttgttcccagttaacatacattaaaggaatttgagatataacttggaaatatgtttaaatattacaatttgcttgtcagttttcaaatacatacttattcagaaagttaatattctagtatagtaaatacttaccaaattagaaggattaactagaaaatcaataatggtgacagatattacttgtggaatatcttttaaagaaatattggtgtgtgtgcgactgtgatcccagctactcaggaggctgaggcaggagaatcacttgaacccgggaggcggaggttgtggtgagccaagatcgcgccactgcactccagcctgggcgacagagcgagacactgtctcaaaaaaaaaaagaaagaaatactgttttttttttttttttttttttttttactttaaatctttaaatatagcagttattgtagctagctgtttgtaaaatattgccaaaagattctgtcaaaattgtttttaatgaaaatgtaaacatttaaaggcttgaatgaaatactgatggacccttgtgagtcctgagaacagtgaagtgaaatcatggttgcaagaaccataattttatagagtgtaccaggctacatgatcttattttatcttagataagaatatggtaattggactgctaaatcttattctaaatttatttgaatatacattcgtaagcactttaaagtttgataacatatggaacattttgcgtacctcagtagagaattggaacaaggtcatggtttcagagcaattctcaaagaggtgactcaggtctagaaagccagatgtcagtgtcattcaggagagatcttcttaacaggaaactcagtagctataaaggaaaagatagatgtgctagttacttattaattaacgaactactacaacttaatgttgtaaaacaacttttaatattatcacttccttcgtttttcataaataacatctttaactgagaatatgtttattaacctaatatcatttcaaaataaaatgttatacttaatctcaaaaacaaattcctagaaagccgttttcaaaaaatgtataaaatagacctatttatcatgacaccttcaggtgtgtaatttgatttgccatgaatgtatacattaatttttaaataattttacatttaacatttgggatgtggaatggatttattttgtatctaagtacatgaattaagtaataaacagtaattattggcaggagcgtctagagtttaaaattgtgtttctttacaatatttcattttttaaaatatatttttccatattaatctgtgaaaaaatatattaatgaaaaactgacgcaaaggaaatattttaaaataatattttttatttcagttatacaaatacttggctagatatagtttttattttgacatgttagaaggatagttttgaggtaaaagtaattctttattaaatatttttttcttccatttttgttttgttttgtatttttgagttggggtcttgctctgttgcgcaggctggaatgcagtggtatgatcatggctcactacaacctcttaccttctcagctcaagaagtccttcctcctcagcctcctgagtagctggtactacaggcatgtaccacgatgcccagctaatttttttttttttaatgtttttgtagagatgggggtgtcaactatgttggccaggcaggtcttgaacttctggcctcagctgatcctgtcaccaccacctcccaaagtattgggattacaggcatgagcgactgtgcctggccccttttcttccctttttaaaacctaatttgaatttcataatatctagacttacattaatataacacatatgcctaattctatcacttcttttttttttgagacggagttttgctcttgttgcccaggctggagtgcagtggcgtgatctcagctcacctcaccctccacctcccgggattctgctacctcagcctgccgagtagctgggactacaggcatgtgtcaccatgcccggctaatcttgtatttttagtagaggcggggtttctccatgttggtcaggctggtctcgaactccctacgtcaggtggtccgtctgcctcagcctcccaaagtgctgggattacaggtgtgagccgccgcacccggcctctatcagcttttttatgtttgcaggctttttgtttttgctttattccactaggtttcccagatttagaagaaatctttcattgtccacttcctctatttcctttagatattcttatttctattttttttttacatttttctcagtaactaaaactgtctgcacatagaaaagaacctgtctaagttgtcattgaacaaaccaaatgatgtttgtgatcatttacttcatataaatgtgacattgcgttaaacaattagattgttggctttcacattagctccaattttgagtttaaatggaagacatcaggaaaataaataccaaggaaaacagaactatctgactttatcagttattgcctcttttcccagattttttcttaatttatagctcttctttttttacttttaagataactatctctgggtttcagatgttgctgttgctaaaaaggcgctctcaagcatacactgcgtcagatgatattttttattataatgtagattatcaaaacttaagcatatacttaaaatgtttcataattatagctgactttgtttctacaaaggtgaaatactaatgttatatgtttctttttaattttcaagttatatagattccttgctgttcctcatctgtgcttatcagaataacaaagaactcttgtctaaaggcttatacagaggacatgatgaagaattgatatcacattatagaagagaatgtttgctagtaagttgaatgcatatagtatgatcttatcattttgtctgacattgggcaagttttccagactcatatataagtgattgactccataaactctgaggggataagaacatgatgatgtctataaactggttctagtcccttcagatggaaaagtacactcagtactttattcttttctctttatgaatcccaagtactataggtgataaatgagaaatgttcttaaaatagcatcagtttgtttacatttctgtatttagatttcgtcatcacactaccactcctttttttggtgggagaggaagggatgcatagataagccttaaaaaatgttttatgtaagtctataagaatatgcaggctggcgcagcagctcatgcctgtaatcctagcactttggaaggctgaggctggtggatcacaaagtcaggagatcgagaccatcctggccaacgtggtgaaaccccatctcgactaaaatacacaaacacaaaaattagctggatatggtggtgtgcgcctgtagtctcaactactcaggaggctgaggcaggggaatcgcatgaacctgggaagtggaggttgccttgagccaagatcgcgccactgcattccatcctggcaaccaggtgacagagcaagactctgtctcaaaaaaacaagaatatacatagaatgtattagagtaatttgtttaacttaaaaaattgaattttcaggtacaagaatagtatagctgactttaaacatacatagaaccaaaacctgatggttcctctgaaaccttcaaaaaatggtataatgtttctcatcattttttgtagtaacccagccacatttggttatttgttttacataggaattgaaatgaaacctcgtcaagattactttagtgttcctttcagattttttcacgttgtatatttacaaagtgtcaggttctgagggatacaaacatgagtaagatgtacttcctgtcctcagaaaactcagtctggtaggagacataattgtttgttctggaataagtgccattatgagaaatatgcacaatgatatgcctgaaatatttgggaagaaccttaagagacaaggtaaacctcgtctggatcttgatggataaatagaagttttattcatgatagagaagggagaatattccagtacacaacagaaaatcaagataaattcactgtggctatccaggttatgaggaagtggggtaaggtggaagtgatgaagctgacaatacttgtcgatgtcagatgatgaagaaacttagatgacattcaaatgagtttgcaccagtgtaagtttgattaggtttggcataatgaggtttgttttcagaaaataattctggtaataataatagcattctagaggatgaacaggaaagaagtagattgaagtcaagaaccttagaggggaaagtcaagggacggagagtgaggacctcaactcatgtagtacggtaggtatgatggtgaaggaaatgaaatcggcatgtcatagctgttgggtgagtgggaagaaggaaatggaagagtcaaagctgccaaacttactagtttttcgtttaatattagggagtctaataggaggaacaaggttggctttgaacatgttttatttaagagatttccaggacattctttgattcagtgaacttaacattaaacttgtcattaaattttatatatcatttaatgcatacttccaaaaattgtagtaaatacttgaagatttatctcattttattctcttaacccctatggttggaagataaaataccctattattaatataaagaaagtgaagctaacagatttagctaatctgttcacgattggtgtattagtccgttctcacactgctataaagatactacacaagactgggtaatttataaaggaaagaggtttaactgactcacagttccacatggttggggaggcctcaggaaacttaaaatgatggcggaaggtgaaggggaagcaaggaccttcatcacatggtggcaggagagagaagtgcaagcagaggaaatgccagatgcttatgaaaccatcagatctcatgagactcactccctgtcacaagaacagcactggggaaactgtccctatgatctgatcacctcccaccaggtctcttcctcaacacctgggggttacaattcaagataagatttgggtggagacacaaagcctaaccatatcaattgggtaattgattcatggccaagttggacttaatagcacaaccatctttccaaaatcaaaataaattgcataagaattatgtggtgtaaatctaaatatataactttttttatttgaaattcagcttaaaagtcatgtttatcatgctgtaaacataagattttaaataagaacccttaaatattataggtcttatacctgtatttatctcttatgtttcttattgcatggatttctctgttctactagatcagtgatcagcacactatggcttgtgctccacctaccacttgtttttatagataagttttattgaaacatagccatgcacattcatttatatattgggtattattgtctttgtactacaatggcagagttgaatagttgcaacagaaacttcatggccttcaaagcctataatagtcctcgtctggcccttcacagaaaaagtttgccaatccttgtaccaaattgtaagctccatgagagttttctgtattaatcacttgagtgcccctgcatctgcagaaatttctggcacgtggtgttgactctgtaggaagtttttgaagggaaaagtgaattgattacctttatatttctgtatcaaggaatacaatagtatatattcagttgccattaatggagatgagtttttcaaaaattaatatggattctgaatttctttatttttaaaactattttgagtgcttatacaattttataatttggggaagttaatctctagagaagaaaaaatggcccctgtgttgatgatcggcataagccaaacatgactgaaaaacacaataatgttttctccaccgctgttgcttttgtttctgttgttgccatatgcatagctttttctaaagagagattttcagttctagataggttgagattgttttctctaaataccgtttgttctaatactgtttgtgaacatatttatgttgtcttccttattaatacttacagatccttaatttaaaaaggaaacaaaaacctattcttttttttttcctgcattgcattaagaaattaaatgagcaagccgcagaactcttcgaatctggagaggatcgagaagtaaacaatggtttgattatcatgaatgagtttattgtcccatttttgccattattactggtggatgaaatggaagaaaaggatatactagctgtagaagatatgagaaatcgatggtgttcctaccttggtcaagaaatggaacgtaagtttaaacaatggtagtaggcacctgagatgtccggattaaatgcagttagaattagatgttatttattcttgccattttttatattaaatacaatattaagtattaatattttcacattcacatgattactctttttccatattgatgaactaagctgtgtgcattgcagttgccatttatgtttttgtctccccaaaatggcaattatcttacctattagagtaagttaatattagtaaatcatgttgacaatgatcgtgtaataatttctatctttagttagatttaattgtttgtatttgcagcacacctccaagaaaagctgacagattttttgccaaaactgcttgattgttctatggagattaaaagtttccatgagccaccgaagttaccttcatattccacgcatgaactctgtgagcgatttgcccgaatcatgttgtccctcagtcgaactcctgctgatggaagataaactgcacactttccctgaacacactgtataaactctttttagttcttaacccttgccttcctgtcacagggtttgcttgttgctgctatagtttttaacttttttttattttaataactgcaaaagacaaaatgactatacagactttagtcagactgcagacaataaagctgaaaatcgcatggcgctcagacattttaaccggaactgatgtataatcacaaatctaattgattttattatggcaaaactatgcttttgccaccttcctgttgcagtattactttgcttttatcttttctttctcaacagctttccattcagtctggatccttccatgactacagccatttaagtgttcagcactgtgtacgatacataatatttggtagcttgtaaatgaaataaagaataaagttttatttatggctacctatgtgtttgtaagcaggtatattgtatattagtgtattagtaatactagataaatgaattttgtctggggattaagattggatagttaatagattaatacaatcttttaattctgctctaatgctagcaaattggaaaatgtttaagtctttgacacttaaatttatctatatttttaacaaagttcttgaacttagtatggcaccggaacctgttttgaattcagtcaggtttttactcaagtaagtggttgattttttttaagtcaaactacactgaaacttttatccttttcttagattaatcttactttttaaatgtatttacaatatacagcaaggtgattatttcaagagaatcccaaagtacttgaataagggctattgtaaaatttaaaagaaatatttatatatacacatatatacacatacacacatgtatatatatattcttcataatggaggacaatgttttgcaatatataaatcattctatttttgtaaattgtatatcactttaattgaaaatgttctctactaattaatactgtgaaacaaaattgatgttgtttaactagaagttatgagtatcttaactgcctttattccttttcaaaaaggaaaaagctgtagaacattttgtagatgaaactactgtttaagattaatgaattaatattgtgaatgaaaatcaaaatccatactttaaaggtaatcatgttactaacaacctatttttgaattcataaaaatttctttataaatgatgttttgtgaacatagtaaaatagaccattatactatgtgtatgtttgatacagcgtcgccaaaactagtgttctttattagtgcctctcacaaaagatcctggatggaggagtaagatgaaatattatgctattatatgatgctgtttgtaaaggtattaatgtactagtaaggtgttaatgacaaggaattagtactattcctgttgtaaagttagattttgcatattgtatctatcaaaatatgtttgggtttagattttaagttgtctactgagcagatttctgcattggttttccagtcctgttaaaagtttagaaacttcatatgtgtcatcacagcttttgtaaagaaagtatccttaatattttatgacattctaccacagtggtaaagttgtttgtgtttgtgtataattgactgctgagatacaaagtgcccaaacactatatggaaattattccttcaaagtcacatccagagaatcatgtcactcttgtgctgaaggtaagtattataattgtatttactatgtacttaaaaaccagattatttattcctagtaatgaatttgaaataacttatttaaagaaaagtgacctttttcaagacctacagaaacaacttattttaatattggtttttaatctaattgtaaggtttagatcattgaaatttctttttttttttttttttaaatttccaacttttaagttcaggggtccatgtgcaggacatgcaggtttcttacagaggtacatgtgtgtcatggtggtttgctgcacaaatcatcccatcacccaggtattaaccccagcatccactagctattctaactgatcctcttcctcctcccagcccccaccctctgccagacaccagtgtgtgttgttccttccaccattgagtccaatatgttcttatcgtttagctcccgcttatgagaacatgcagtagttggttttctgttcctatgttagtttgttcaggataatgatctccagcttcatctgtgtccctgcaaaggacatgatcccattcctttttatgactgcatagtattccatggcgtatatgtacgttttctttatccagtctatcactgactggcatttaggttagattccatgcctttgctattgtgaatagtgctgcagtgaacatacacgtgcatgtttttataagagaacaatttgcattcctttgagcatatatccagttacgggtttgctggctcaaatggtatttctctctttaggtctttgaggaaccatcacagtctttcacaatggttgaactaatttacacttccaccaacagtgtaaaagtgttcctttttctccataacctcgctaccatctgttgtttttatgacttttaataatagccattctgactggtgtgaggtggtgtctcattgtggttttgatttgcatttctctaatgatcagtgatactgagctttttttcatatacttgttggcctcatgtatgtcttcttttgagaagtgtctgttcatgtcgtttgcccactttttaatgggttttcttttttcttgtcaatatcataagttctttatagatgctgcatatgagacctttgtcatatgcacagattgtaaaaattgtctcccattctgtaggttgtcttttttactctgttgttagttttgccatgcagaagttctttagtttaatcagatcccgtgtgtcagtttttgcttttgttgcaattgcttttgacacttcgtcatgcaatctttgcccattcctatgtcctgaatggtattgcctaggttttcttctagcgtttttatagttttgagttttaaatttaagtctttaatccatcttgagttgatttttgtatatggtgtaaggaaggtgtccagtttcagttttctgcatatggctagtcagttctcctagcaccatttattaaataagaaatatttttcccattatttgtttttgtcaggtttgtagaagatcagatggctataggtaggtgtgtggtcttatttccgagttctctattctgttccattggtctctatgtgtctgttcttgtaacagcaccatgctgttttggttactgttgccttgtactgtagtttgaatttgggtagtgtgatgcctccagctttgttcattttgcttaggattgccttggctactcaggtttggttttttgtttcgttttgttttgtttggttccatatgaattttaaaagttttttctaattctgtgaataatgttattggtagtttaatgggaatagcactgaatctataaattgctttgggcagtatggatatttctacaatattgattcttcctatccatgagcatgaattttattttccatttgtttgtgtcctctctgatttccttgagcagtggtttatagttcttgaagagctccttcacgtcccttattagctgtattcctaggtattgtattctttttgtggcagttgcgaatgggagttcacttgtgatttgactcttggcttgcctgtttttggtgtatgggaatgctagcacttagtgcacattgattttgtatcctgagattttgttgaagttgcttatcagcttaagaagcttttgggctgagatgggattttctagatacaggatcatgtcatctgcagacaaagatagtttgatttccgtcttcctatttgaatacctttatttatttctcttgcctgattgctcttgtcagagcttccaatactatggggaataagagtggtgagagagacagccttgtcttttacaggttttcaagggaagtgctttcagcttttgcccattcaatgtgatgctggctgagggtttgtcataggtggcttttattattttgcagtatgttcatttaatacctagtttattgagaatttttaacatgaagtgatattgaattttatcagaggccttttccacatctattgaggtaatcatgtggttttcgtctgtagttctgtttatgcaatgaatctcatttattgatttttgtatgttgaaccaaccttgtatcccaggaatgaagcctacttgatcgtggtggataagctttttgatgtgctactgtattcagtttgccagtattttgtttaggatttttgcatcagtgttcatcagggatattggcctgaagtttttgttgttgttgttgacgttgtatgtctgctaggttttggtatcaggctgatgctgccctcatagaatgagttagggaggagtccctccttttcaatcttttgaaatcgtttcaggagcagtgatagcaactgacccttctttgtacctctggtggaattcatctgggaatctgcctggtcttggactttccttggttggtaggctgttactactgccttagtttcagaactcattattggtctgttcagggattcaatttcttcctgtttcagccttgagagggtgtatatgtccaggaatgtatgatttttttctagattttctaatttatgtgaatagaggtgttcataatattatctgacttgtctttctatggggttagtggtaagagcccacttatttctgattgtgtttatttgaatcttctctcttttcttcattagtctagtggtctcctagtggctcacgcctgtaatcccagcactttgggaggccaaggcgggtagatcacgaggtcaggagattgagatcatcctggctaacacagtgaagccctgtctctactaaaaatacaaaaaaaaaaaaaaaaaaattagccgggcatggtggcgggtgcctgtaatcccagctactcgggaggctgaggcgggagaacggcatgaactcgggaggcagagcttgcagtgagctgggatcgtgccactgcactccagtctgggtgacagagcgagactctgtctcaaaaaaaaaaaaaaattagctcctggattgtgtgattttgatttttttttgaagggcttttttttgggggggtctctatctttagttcagctctgatattggttatttcttgttttctgctaagctttggggtttgtttgcccttggttttctagttactttagttgggatattaggttgttgagatctttccagctttttgatattgtcatttagtgctataaatttccctcttaacactgctttagctgtgtcccagagatgctggtatgttgtatttgaaatttctttatataatttaccatgttaaatataacttatagctaataacttcggaatttgaacctcatagaactgtagtccatagcagatttcatttgatttaaatgactcttattttggttactatgttattccttcctaccccaaaaaagttacgttttgaaataattcagggtagaattcatatagatagaacttcagacatctcaggagaccagtacgcatgaatgaacatgtagggacccctctaatacgtttcacatccattatgatacaacaatgaccatacactttagtagttctcagtgtgtgttctccagatcagtagacagcttcagcagcttgggaacatgttagaattgaaaatttttgagtcccacctcagagctgccagttcagaaactcttcacgtaacctgtgttacaacaagtccttcagataattttgatgtttactagtttcagagccactgcactaaatgaaactattggtagcatttgtgcactgtaaattgatgctgtttaattttcattcacttgtgctctgttggaagcttttttgtgtttccttcacttgggatttcaaggaagtatctaatttttttttttttttttttgctcaattacatgtaattgagaataagataggtatctgattctccaaaagttcagcatctttattttatgatttaaacttgtcgagttatgcctctgggtcctgtcattctcccagcgaataaaaatgtggatgcttggggaagtggaggtggatggtaaatgggaatactcttgtttgaatttttaaaaatttacattgtaaataacattaaataccatttgttgtgcccatgataacttcatccaaaatatatatattagtctgctaagatatgccataacaaaataacacaggcttggtgccttaaacaacagaaatttttcttctggttctggaagctggaagtctaagatcaagctgttggtggatttgatttcccctaaggcctctctccttggcctgcagaccaccaccttctctctgtgtcctcacctagccttttctctgtgtcctcacctagccttttctgtgtgctgcatccctggcctctcttccagttcttataaggaccccagtcacattggatttgagccccatccttatgaactcacttaaccttaattatctctttaagggccctgtctccaaacacagtcatgttagggggttagggcttcaatttatgaatctgggggacaatttagtaaaaaaaatagtatgtgacagcccagtttatatacctgctttccagaaacaagaatatggttgttaatgtcttctctttagcctcaagatacagtgcaaatatctgtagttccgttcttacgtaagctttattttactttttctaaaaactatattgaaagtatagcaatccgagttagaaattgcttataatgcattcatctaatcagctcagtgttcttactgaacaaacttttatttccatgtttactcatgtttatttcatcagtttcacctgacattataccatgaatatatttctgttttgctagtgtttttattcttactgatcacatgtccctttttcgtcttccataccactcccagcctagagttaatgaccactaaccaccgtagccacatacttttccatgtttggataaccttatgcagcatatacacctaaagggtggtggtttttttagggggtggtggtggaaggggggagacggtcattgtttttacaaaaattaaatttcatctattttacacatcctttcccctgtcttccccttgtactttccaaccttcagtttcttctttttctaattagctttgtaggagtgacttaaaatataataaagtgaaataacatagcagtgataataatagaataaaaataaacgaaacgtgattggagaaactgcacacatgcacaccaagatttcagatattcttattccttccatgtacagttctcagtgggtatttcagaccttcactcccatcctcagcctctcctattcagtgccagcttctgtaacgctggatgatcttttctttgcctaacgaagaaaactggagatgttaggtatgatcctcctttcaacttttgtgcctcctatctaaattagttgttaaccagcttgtaatgaagggataaacattgataacccaatattatttagaaaatagaaatagaatcagaatatactatgaaatgagcttacaaatttcaacaagtgtccactattttgggagtgtgtttgctcttctccagcagtaatccagaaagctcactttttcccccgagactatctcatacaacatgtttgccctgtagcaaacagctccttattttttcagtaatgtagagctagaccagtattcttctgttgtttttattttgtggagtttttgtgtgtatttttagttttttgaaacagggtctcgctctgtttcccaggctggagtgcagtggtgcagtctcctctcattgcaacctccaactctctggctcaaacaatcctcccacttcagcctctgaagtagctgggactatatgtgcaagccactgtgcttggctaattttttaattttttgtagagatgaggtctcactatgttgtccaggctagtctcaaacttctggactcaagtgatcctgccacctccgcctcccatacccctgcgattacaggtgcaagctactgcacctgacctagacccatattcctaacctagttcgtcaaaagcatatgaggaacttttttttctttaaagtgtccagatgttatctctcatgtgtattacagggcttcaaatgtgagaattggagtttagatagttgtttttccaattttaatttaagatttgcctgtggccctactatgtgattgagcctagctaaagtagtgtggaggaatttgctttttacagtactgtatgtcacatgaaagggcaggggtcttcagattgctgatgttccctcagccatagaccatgcccacttttgacgtgctctagccaaagctgcatgaaaatatttttcagtccctactggatttttctcttatgaatggttaacagtgcaggttctggaaccaaactacctggattcagattctggctctgccgtttattcgctgtgtgttgaccttgaatgagtgatttaacttttccgtgcctcagattcttcatctataaaatgggcattatgacataacacaccttagaggattttttaaaagattaaatgggtttccagatataaaacgtttagaaactgtctgccacattaagtattcaataattgtgagccctttttatagtttgtcagtattgtttactcctgttctggttttgaggatctttagcttccatcctctacctgcattcctagtgtttttttttttctccctacttcttaaagttgtgctcaaggtttggtacttggccccttcctcatgcttttcactttttctggttgtgtctgttagtttgtcttcttattctgcctccatgaatcacaggtcattgttttctaatcatacccatgtgagttctaaaccaatacatatttgcagttgtcttttcatcacatatacctggatgtttcgcagacactttcgacttggcacatctgaattcatcactttttcccaaatctgattgtctcatactcccttgatgaaatgatgtaataatcccaaaatgaattattctcaattctacttttacctcccattgattaccaagtgtcagcatgtcagattttttaatactccttagtactatggctgatgaggtccgtcatctcttagtttgactgttagatttgtccctgagtagcactgtctttgattttgcccctgaaattcatcttcacactgttgacagaataatcttttaaagtggtttgttttacatgtctgtcttccactgctggactgagctcttaacaggagattgtatctcttgtttttgtaatcctagcacctgttaaaataactagcaacttagaggtgcagtcttgcaggttttctgaccctccagtcaccctagacctgcactgatacagttttcgttagccatttaaatttaaataaaattgaacattctgttaattagtaatactagctatatttcaaatgctcatagccacatgttactgttgactactatattggacaacattttagaacatttcgattatcataggaagtttcattggacagagctgccccagcagacctttgctgatgtggatgtctttctgtattaacatccttttaacattcagacacctcccaaatgctaaccttaatagattggccttcagcatttatgtctctctatcttgatcctgcaattgatgactttactatgtctgctctgcagagagcaccactaccagcatgtgtccaatcaggaaagccgacactacatatttcaacagaggagatgtgagtacagaggcattagagagtaacccggggatcacaactgtaggatgcagctactagtcctaagggtaagaaaacaaatgggaaaaaattggggctgccagagccttaaagctccaaaaagggtcatcatggcattagtgctcagacccctgaggaggcttaccacctacctgctcatggtaattctgaggggtaaagtaacgacagttctagaagtttcgaagtagttgaaggctggaatttgctgccgttattacaaagctgataggactagccatcagagatgaactagatcttttttcatcttcctgccaacttccctgtagtacttcctactggcagaacctaataagcagcagtcagaggggtcagagaagtgtagtttgcagagtcccggcctcagcacacagagcagaggacagaagggtggaattggagctgagaaacaatagatgaagaaccagcacactggtttccttcaaagactcatttttatctaaaggtattagtccctaaaacgccagatactcaggaatttgtagagaaattctgggccctcaagaataagtgtactagttcgaattgaaatcttgttactcttttctgttaaacgagactgtaatgctgctatatagtgcttaacttttaaaattgacagtggatgaatctgcatattatagtcaggtgttcatgtccatccattcatttattgagtgcctaccacatgccacacaatctatcaggtggtatgtatataaaataaaacttagataataagacaaaagtaataattcacccaaattcatctataaatccagacttagggactgttgacatttttgtgttcgtgcctgtggacatctttctgtgcatatgcatgtacacacatcacaatatcataaaaagtttataaatgcagatgtttccaagaaagtgtgtattcatctacctctctcctgctgtatagtatttgattataaggagaatgctccattactatttacctgtggacatagagcataggctgctacatatgtctctatatactttatgcactttgtctttccactaaaatttctcaaggtataatttctgtctgggtcactgaatatgtagatttaaaattttgagctacatttttcaaactgcccttcaccaaagatgttacagtttacactgccaccaatagtacatgagactgttctttcatacattcaataacagaatattattgacctttaatttgtttgatagccaaaagtgtgttcttcgcatttcaaaatttttagtgagagcatattccaatatgttaattgactatttgtatttcttgtatagttaactacctgtttacatcctttacactttttcttttgggtgtttatgtctgtaacttggcagtagctcatattaggaatcattattatacacgttgcaaatatttttacaattagtttatttattattgcattataaccatgcttacgtagtggtgctctactatttctgccttaggtataatgtttagaattttctctggtcagggttataaaaatactcatgtttctcctgatatttttatgatttcatttttagatcagtctttaatgcagttgacagttacattaaagtagtgaaatagtcaacattttctgtcagtattatctggttgtcataataccatttataaaataattc

SEQ ID NO: 33 - DNA, 4950 bp, Homo sapiens
acagtcggcgtttcgccgcctgcccgcggtgcccgcgcacgccggccgccatcgccttcgcgcctggctggcgggggcgctgtcctcccaggccgtccgcgccgctccctggagctcggcggagcgcggcagccagggccggcggaggcgcgaggagccgggcgccaccgccgccgccgccgccgccgccgcgggggccatgaccgtggagcagaacgtgctgcagcagagcgcggcgcagaagcaccagcagacgtttttgaatcaactgagagaaattacggggattaatgacacccagatactacagcaagccttgaaggatagtaatggaaacttggaattagcagtggctttccttactgcgaagaatgctaagacccctcagcaggaggagacaacttactaccaaacagcacttcctggcaatgatagatacatcagtgtgggaagccaagcagatacaaatgtgattgatctcactggagatgataaagatgatcttcagagagcaattgccttgagtttggccgaatcaaacagggcattcagggagactggaataactgatgaggaacaagccattagcagagttcttgaagccagcatagcagagaataaagcatgtttgaagaggacacctacagaagtttggagggattctcgaaacccttatgatagaaaaagacaggacaaagctcccgttgggctaaagaatgttggcaatacttgttggtttagtgctgttattcagtcattatttaatcttttggaatttagaagattagttctgaattacaagcctccatcaaatgctcaagatttaccccgaaaccaaaaggaacatcggaatttgccttttatgcgtgagctgaggtatctatttgcacttcttgttggtaccaaaaggaagtatgttgatccatcaagagcagttgaaattcttaaggatgctttcaaatcaaatgactcacagcagcaagatgtgagtgagtttacacacaaattattagattggttagaagatgccttccaaatgaaagctgaagaggagacggatgaagagaagccaaagaaccccatggtagagttgttctatggcagattcctggctgtgggagtacttgaaggtaaaaaatttgaaaacactgaaatgtttggtcagtacccacttcaggtcaatgggttcaaagatctgcatgagtgcctagaagctgcaatgattgaaggagaaattgagtctttacattcagagaattcaggaaaatcaggccaagagcattggtttactgaattaccacctgtgttaacatttgaattgtcaagatttgaatttaatcaggcattgggaagaccagaaaaaattcacaacaaattagaatttccccaagttttatatttggacagatacatgcacagaaacagagaaataacaagaattaagagggaagagatcaagagactgaaagattacctcacggtattacaacaaaggctagaaagatatttaagctatggttccggtcccaaacgattccccttggtagatgttcttcagtatgcattggaatttgcctcaagtaaacctgtttgcacttctcctgttgacgatattgacgctagttccccacctagtggttccataccatcacagacattaccaagcacaacagaacaacagggagccctatcttcagaactgccaagcacatcaccttcatcagttgctgccatttcatcgagatcagtaatacacaaaccatttactcagtcccggatacctccagatttgcccatgcatccggcaccaaggcacataacggaggaagaactttctgtgctggaaagttgtttacatcgctggaggacagaaatagaaaatgacaccagagatttgcaggaaagcatatccagaatccatcgaacaattgaattaatgtactctgacaaatctatgatacaagttccttatcgattacatgccgttttagttcacgaaggccaagctaatgctgggcactactgggcatatatttttgatcatcgtgaaagcagatggatgaagtacaatgatattgctgtgacaaaatcatcatgggaagagctagtgagggactcttttggtggttatagaaatgccagtgcatactgtttaatgtacataaatgataaggcacagttcctaatacaagaggagtttaataaagaaactgggcagccccttgttggtatagaaacattaccaccggatttgagagattttgttgaggaagacaaccaacgatttgaaaaagaactagaagaatgggatgcacaacttgcccagaaagctttgcaggaaaagcttttagcgtctcagaaattgagagagtcagagacttctgtgacaacagcacaagcagcaggagacccagaatatctagagcagccatcaagaagtgatttctcaaagcacttgaaagaagaaactattcaaataattaccaaggcatcacatgagcatgaagataaaagtcctgaaacagttttgcagtcggcaattaagttggaatatgcaaggttggttaagttggcccaagaagacaccccaccagaaaccgattatcgtttacatcatgtagtggtctactttatccagaaccaggcaccaaagaaaattattgagaaaacattactagaacaatttggagatagaaatttgagttttgatgaaaggtgtcacaacataatgaaagttgctcaagccaaactggaaatgataaaacctgaagaagtaaacttggaggaatatgaggagtggcatcaggattataggaaattcagggaaacaactatgtatctcataattgggctagaaaattttcaaagagaaagttatatagattccttgctgttcctcatctgtgcttatcagaataacaaagaactcttgtctaaaggcttatacagaggacatgatgaagaattgatatcacattatagaagagaatgtttgctaaaattaaatgagcaagccgcagaactcttcgaatctggagaggatcgagaagtaaacaatggtttgattatcatgaatgagtttattgtcccatttttgccattattactggtggatgaaatggaagaaaaggatatactagctgtagaagatatgagaaatcgatggtgttcctaccttggtcaagaaatggaaccacacctccaagaaaagctgacagattttttgccaaaactgcttgattgttctatggagattaaaagtttccatgagccaccgaagttaccttcatattccacgcatgaactctgtgagcgatttgcccgaatcatgttgtccctcagtcgaactcctgctgatggaagataaactgcacactttccctgaacacactgtataaactctttttagttcttaacccttgccttcctgtcacagggtttgcttgttgctgctatagtttttaacttttttttattttaataactgcaaaagacaaaatgactatacagactttagtcagactgcagacaataaagctgaaaatcgcatggcgctcagacattttaaccggaactgatgtataatcacaaatctaattgattttattatggcaaaactatgcttttgccaccttcctgttgcagtattactttgcttttatcttttctttctcaacagctttccattcagtctggatccttccatgactacagccatttaagtgttcagcactgtgtacgatacataatatttggtagcttgtaaatgaaataaagaataaagttttatttatggctacctatgtgtttgtaagcaggtatattgtatattagtgtattagtaatactagataaatgaattttgtctggggattaagattggatagttaatagattaatacaatcttttaattctgctctaatgctagcaaattggaaaatgtttaagtctttgacacttaaatttatctatatttttaacaaagttcttgaacttagtatggcaccggaacctgttttgaattcagtcaggtttttactcaagtaagtggttgattttttttaagtcaaactacactgaaacttttatccttttcttagattaatcttactttttaaatgtatttacaatatacagcaaggtgattatttcaagagaatcccaaagtacttgaataagggctattgtaaaatttaaaagaaatatttatatatacacatatatacacatacacacatgtatatatatattcttcataatggaggacaatgttttgcaatatataaatcattctatttttgtaaattgtatatcactttaattgaaaatgttctctactaattaatactgtgaaacaaaattgatgttgtttaactagaagttatgagtatcttaactgcctttattccttttcaaaaaggaaaaagctgtagaacattttgtagatgaaactactgtttaagattaatgaattaatattgtgaatgaaaatcaaaatccatactttaaaggtaatcatgttactaacaacctatttttgaattcataaaaatttctttataaatgatgttttgtgaacatagtaaaatagaccattatactatgtgtatgtttgatacagcgtcgccaaaactagtgttctttattagtgcctctcacaaaagatcctggatggaggagtaagatgaaatattatgctattatatgatgctgtttgtaaaggtattaatgtactagtaaggtgttaatgacaaggaattagtactattcctgttgtaaagttagattttgcatattgtatctatcaaaatatgtttgggtttagattttaagttgtctactgagcagatttctgcattggttttccagtcctgttaaaagtttagaaacttcatatgtgtcatcacagcttttgtaaagaaagtatccttaatattttatgacattct

SEQ ID NO: 34 - protein, 1053 aa, Homo sapiens
MTVEQNVLQQSAAQKHQQTFLNQLREITGINDTQILQQALKDSNGNLELAVAFLTAKNAKTPQQEETTYYQTALPGNDRYISVGSQADTNVIDLTGDDKDDLQRAIALSLAESNRAFRETGITDEEQAISRVLEASIAENKACLKRTPTEVWRDSRNPYDRKRQDKAPVGLKNVGNTCWFSAVIQSLFNLLEFRRLVLNYKPPSNAQDLPRNQKEHRNLPFMRELRYLFALLVGTKRKYVDPSRAVEILKDAFKSNDSQQQDVSEFTHKLLDWLEDAFQMKAEEETDEEKPKNPMVELFYGRFLAVGVLEGKKFENTEMFGQYPLQVNGFKDLHECLEAAMIEGEIESLHSENSGKSGQEHWFTELPPVLTFELSRFEFNQALGRPEKIHNKLEFPQVLYLDRYMHRNREITRIKREEIKRLKDYLTVLQQRLERYLSYGSGPKRFPLVDVLQYALEFASSKPVCTSPVDDIDASSPPSGSIPSQTLPSTTEQQGALSSELPSTSPSSVAAISSRSVIHKPFTQSRIPPDLPMHPAPRHITEEELSVLESCLHRWRTEIENDTRDLQESISRIHRTIELMYSDKSMIQVPYRLHAVLVHEGQANAGHYWAYIFDHRESRWMKYNDIAVTKSSWEELVRDSFGGYRNASAYCLMYINDKAQFLIQEEFNKETGQPLVGIETLPPDLRDFVEEDNQRFEKELEEWDAQLAQKALQEKLLASQKLRESETSVTTAQAAGDPEYLEQPSRSDFSKHLKEETIQIITKASHEHEDKSPETVLQSAIKLEYARLVKLAQEDTPPETDYRLHHVVVYFIQNQAPKKIIEKTLLEQFGDRNLSFDERCHNIMKVAQAKLEMIKPEEVNLEEYEEWHQDYRKFRETTMYLIIGLENFQRESYIDSLLFLICAYQNNKELLSKGRGHDEELISHYRRECLLKLNEQAAELFESGEDREVNNGLIIMNEFIVPFLPLLLVDEMEEKDILAVEDMRNRWCSYLGQEMEPHLQEKLTDFLPKLLDCSMEIKSFHEPPKLPSYSTHELCERFARIMLSLSRTPADGR

SEQ ID NO: 35 - DNA, 4848 bp, Homo sapiens
atgaccgtggagcagaacgtgctgcagcagagcgcggcgcagaagcaccagcagacgtttttgaatcaactgagagaaattacggggattaatgacacccagatactacagcaagccttgaaggatagtaatggaaacttggaattagcagtggctttccttactgcgaagaatgctaagacccctcagcaggaggagacaacttactaccaaacagcacttcctggcaatgatagatacatcagtgtgggaagccaagcagatacaaatgtgattgatctcactggagatgataaagatgatcttcagagagcaattgccttgagtttggccgaatcaaacagggcattcagggagactggaataactgatgaggaacaagccattagcagagttcttgaagccagcatagcagagaataaagcatgtttgaagaggacacctacagaagtttggagggattctcgaaacccttatgatagaaaaagacaggacaaagctcccgttgggctaaagaatgttggcaatacttgttggtttagtgctgttattcagtcattatttaatcttttggaatttagaagattagttctgaattacaagcctccatcaaatgctcaagatttaccccgaaaccaaaaggaacatcggaatttgccttttatgcgtgagctgaggtatctatttgcacttcttgttggtaccaaaaggaagtatgttgatccatcaagagcagttgaaattcttaaggatgctttcaaatcaaatgactcacagcagcaagatgtgagtgagtttacacacaaattattagattggttagaagatgccttccaaatgaaagctgaagaggagacggatgaagagaagccaaagaaccccatggtagagttgttctatggcagattcctggctgtgggagtacttgaaggtaaaaaatttgaaaacactgaaatgtttggtcagtacccacttcaggtcaatgggttcaaagatctgcatgagtgcctagaagctgcaatgattgaaggagaaattgagtctttacattcagagaattcaggaaaatcaggccaagagcattggtttactgaattaccacctgtgttaacatttgaattgtcaagatttgaatttaatcaggcattgggaagaccagaaaaaattcacaacaaattagaatttccccaagttttatatttggacagatacatgcacagaaacagagaaataacaagaattaagagggaagagatcaagagactgaaagattacctcacggtattacaacaaaggctagaaagatatttaagctatggttccggtcccaaacgattccccttggtagatgttcttcagtatgcattggaatttgcctcaagtaaacctgtttgcacttctcctgttgacgatattgacgctagttccccacctagtggttccataccatcacagacattaccaagcacaacagaacaacagggagccctatcttcagaactgccaagcacatcaccttcatcagttgctgccatttcatcgagatcagtaatacacaaaccatttactcagtcccggatacctccagatttgcccatgcatccggcaccaaggcacataacggaggaagaactttctgtgctggaaagttgtttacatcgctggaggacagaaatagaaaatgacaccagagatttgcaggaaagcatatccagaatccatcgaacaattgaattaatgtactctgacaaatctatgatacaagttccttatcgattacatgccgttttagttcacgaaggccaagctaatgctgggcactactgggcatatatttttgatcatcgtgaaagcagatggatgaagtacaatgatattgctgtgacaaaatcatcatgggaagagctagtgagggactcttttggtggttatagaaatgccagtgcatactgtttaatgtacataaatgataaggcacagttcctaatacaagaggagtttaataaagaaactgggcagccccttgttggtatagaaacattaccaccggatttgagagattttgttgaggaagacaaccaacgatttgaaaaagaactagaagaatgggatgcacaacttgcccagaaagctttgcaggaaaagcttttagcgtctcagaaattgagagagtcagagacttctgtgacaacagcacaagcagcaggagacccagaatatctagagcagccatcaagaagtgatttctcaaagcacttgaaagaagaaactattcaaataattaccaaggcatcacatgagcatgaagataaaagtcctgaaacagttttgcagtcgatcatgatgacaccgaacatgcaaggtattatcatggcgataggtaaatccaggagtgtatatgacaggtgtggccctgaagcagggttctttaaggcaattaagttggaatatgcaaggttggttaagttggcccaagaagacaccccaccagaaaccgattatcgtttacatcatgtagtggtctactttatccagaaccaggcaccaaagaaaattattgagaaaacattactagaacaatttggagatagaaatttgagttttgatgaaaggtgtcacaacataatgaaagttgctcaagccaaactggaaatgataaaacctgaagaagtaaacttggaggaatatgaggagtggcatcaggattataggaaattcagggaaacaactatgtatctcataattgggctagaaaattttcaaagagaaagttatatagattccttgctgttcctcatctgtgcttatcagaataacaaagaactcttgtctaaaggcttatacagaggacatgatgaagaattgatatcacattatagaagagaatgtttgctaaaattaaatgagcaagccgcagaactcttcgaatctggagaggatcgagaagtaaacaatggtttgattatcatgaatgagtttattgtcccatttttgccattattactggtggatgaaatggaagaaaaggatatactagctgtagaagatatgagaaatcgatggtgttcctaccttggtcaagaaatggaaccacacctccaagaaaagctgacagattttttgccaaaactgcttgattgttctatggagattaaaagtttccatgagccaccgaagttaccttcatattccacgcatgaactctgtgagcgatttgcccgaatcatgttgtccctcagtcgaactcctgctgatggaagataaactgcacactttccctgaacacactgtataaactctttttagttcttaacccttgccttcctgtcacagggtttgcttgttgctgctatagtttttaacttttttttattttaataactgcaaaagacaaaatgactatacagactttagtcagactgcagacaataaagctgaaaatcgcatggcgctcagacattttaaccggaactgatgtataatcacaaatctaattgattttattatggcaaaactatgcttttgccaccttcctgttgcagtattactttgcttttatcttttctttctcaacagctttccattcagtctggatccttccatgactacagccatttaagtgttcagcactgtgtacgatacataatatttggtagcttgtaaatgaaataaagaataaagttttatttatggctacctatgtgtttgtaagcaggtatattgtatattagtgtattagtaatactagataaatgaattttgtctggggattaagattggatagttaatagattaatacaatcttttaattctgctctaatgctagcaaattggaaaatgtttaagtctttgacacttaaatttatctatatttttaacaaagttcttgaacttagtatggcaccggaacctgttttgaattcagtcaggtttttactcaagtaagtggttgattttttttaagtcaaactacactgaaacttttatccttttcttagattaatcttactttttaaatgtatttacaatatacagcaaggtgattatttcaagagaatcccaaagtacttgaataagggctattgtaaaatttaaaagaaatatttatatatacacatatatacacatacacacatgtatatatatattcttcataatggaggacaatgttttgcaatatataaatcattctatttttgtaaattgtatatcactttaattgaaaatgttctctactaattaatactgtgaaacaaaattgatgttgtttaactagaagttatgagtatcttaactgcctttattccttttcaaaaaggaaaaagctgtagaacattttgtagatgaaactactgtttaagattaatgaattaatattgtgaatgaaaatcaaaatccatactttaaaggtaatcatgttactaacaacctatttttgaattcataaaaatttctttataaatgatgttttgtgaacatagtaaaatagaccattatactatgtgtatgtttgatacagcgtcgccaaaactagtgttctttattagtgcctctcacaaaagatcctggatggaggagtaagatgaaatattatgctattatatgatgctgtttgtaaaggtattaatgtactagtaaggtgttaatgacaaggaattagtactattcctgttgtaaagttagattttgcatattgtatctatcaaaatatgtttgggtttagattttaagttgtctactgagcagatttctgcattggttttccagtcctgttaaaagtttagaaacttcatatgtgtcatcacagcttttgtaaagaaagtatccttaatattttatgacattcta

SEQ ID NO: 36 - protein, 1085 aa, Homo sapiens
MTVEQNVLQQSAAQKHQQTFLNQLREITGINDTQILQQALKDSNGNLELAVAFLTAKNAKTPQQEETTYYQTALPGNDRYISVGSQADTNVIDLTGDDKDDLQRAIALSLAESNRAFRETGITDEEQAISRVLEASIAENKACLKRTPTEVWRDSRNPYDRKRQDKAPVGLKNVGNTCWFSAVIQSLFNLLEFRRLVLNYKPPSNAQDLPRNQKEHRNLPFMRELRYLFALLVGTKRKYVDPSRAVEILKDAFKSNDSQQQDVSEFTHKLLDWLEDAFQMKAEEETDEEKPKNPMVELFYGRFLAVGVLEGKKFENTEMFGQYPLQVNGFKDLHECLEAAMIEGEIESLHSENSGKSGQEHWFTELPPVLTFELSRFEFNQALGRPEKIHNKLEFPQVLYLDRYMHRNREITRIKREEIKRLKDYLTVLQQRLERYLSYGSGPKRFPLVDVLQYALEFASSKPVCTSPVDDIDASSPPSGSIPSQTLPSTTEQQGALSSELPSTSPSSVAAISSRSVIHKPFTQSRIPPDLPMHPAPRHITEEELSVLESCLHRWRTEIENDTRDLQESISRIHRTIELMYSDKSMIQVPYRLHAVLVHEGQANAGHYWAYIFDHRESRWMKYNDIAVTKSSWEELVRDSFGGYRNASAYCLMYINDKAQFLIQEEFNKETGQPLVGIETLPPDLRDFVEEDNQRFEKELEEWDAQLAQKALQEKLLASQKLRESETSVTTAQAAGDPEYLEQPSRSDFSKHLKEETIQIITKASHEHEDKSPETVLQSIMMTPNMQGIIMAIGKSRSVYDRCGPEAGFFKAIKLEYARLVKLAQEDTPPETDYRLHHVVVYFIQNQAPKKIIEKTLLEQFGDRNLSFDERCHNIMKVAQAKLEMIKPEEVNLEEYEEWHQDYRKFRETTMYLIIGLENFQRESYIDSLLFLICAYQNNKELLSKGRGHDEELISHYRRECLLKLNEQAAELFESGEDREVNNGLIIMNEFIVPFLPLLLVDEMEEKDILAVEDMRNRWCSYLGQEMEPHLQEKLTDFLPKLLDCSMEIKSFHEPPKLPSYSTHELCERFARIMLSLSRTPADGR

SEQ ID NO: 37 - DNA, 135462 bp, Mus musculus
  misc_feature (1)...(135462): n = A,T,C or G
cttgccaggcagccttaactcactgcactcatcctcagggctgatagcagcttgtctcactgcacaaaacttcctatagtgagctgtatctgacatgccaatttaaggtgttcttaaaaaattaacatgggatcaaaacaatcatattgtagacatttgagaggaagagttcttttcaaactgaaacagaaagttttacctacaagttacaaaagcaccttggttgtagtaatcgcccgcgcacacagggcgcagtcaggtggcttgctaggtgacttttcaggggggttcagatgaagcagaaccatgccattacagtcagctttcaaaatatcatggcaatgtagaaaaataagaagaatttgttacagaatgcagcacaataaaaagaacctgatttagcttatgaacacatttgcctaggggttaaaaatgtataaaattaatttttctgtaaaggaagcctagaggattgaaccttggctgtagacactgaaaaatataaagttaaacgtgttatataacagagccctggatgtcctgggcttggtttgtttttttcttttttctttttttctgtagaccaggctgatgtcagactcaacctgacagagatcagcctgcctctggctcccagtgctgggactaaagctcaccgccacctcatgctgtaaaggaaagcttctcttaatcacatgctaattaatgtgagcaaagcctttgattggcctaaaacacatcacgtgggttcatgacactgtcagttttgattattctagaacatacttgtatatagtaagaaagaatagatgtaaagttacaactatattaaattttggaatgattatgaagtagtgggtatggagccatttgctatgcattacagccgtaattcccctcactgtcaacacaacttgttggaagtaaggattgagtgctgcctgtattgaacgtgtcctgtgctctctaccatccttgctatggatctaaccttctgaggttacctgcagttttcagatgctctgcatcttcgatgctcttcaaacgtctcacccctcctttacgattcagtctgttgttcgaccgcttgcttctctggaaagctggtcttaagtgattcccatgtatttctcttttgcattagcctggtgcctaaggcatcagtcagccctagaaagctgtccagctcactgaggaacctctgcctttttctatcctgtggcccttgcttgccattgtgctcaggtttgctcctgatggacaaggctgccctcaatatatgtatgctgatctagcaaagagaacaaattattttcatctgtagtgctgcctaaaggtttgcttccccccccccctctctcttttaaatggagtagaggatattactggctagttatgctgggtagatttatttcaactccacacaaactgtagtcatctgagaggaggaaaccttgattgagaaaatgcctccataagattggcctgtgggcatcttcttaattagtgattgatgagacaggggcccaacccattgcgggtggtgctgtccctgggctggtggccctgggtttgtacgaaagcaggaggagcaagccatgggagaagccaataagcagcagctctccaggttcctgccttgtgtgaattcatcttagcttcctacggtggtggaataggtggtgggttatgatgtggaagtatcaggcaaataaaccctttcctccccaactggctttttggccatggtgcctcttcacagcaattgaacattgactaagacaccaatatatcagaattgcctttaatgatcccttgatgctgccttttgaacaaggtagtattgagtatatatatatatatatatatatatatatacacacacacacatatataatatatatatatatttttctttcgagacagggtttctctgtgtagccctggctgtcctggaactcactttgtagaccaggctggcctcgaactcagaaatctgcctgcctctgcctcccgagtgcagattaaccctccatttttatctttaaaaattttaattattattatttttttattttatgtgtatgagtgttttgcctgcatgtatgtctatgcaccacttgcatgcctggtgcccagaggagggcgtcagatttctggaactgaagttatatgtatttgtgagatgctgtgtgggtgctgggaattgaacctgggctctctggaaaagttgtcaaagacaccattccagttcctttaatctttttaagcaaaacaaaattggaattttttacaaaggggtttaaacacagattaagtatggatatcgagggagtgagagagctggaagaagggtagtacacagcataagatgcaggcagagagagagagagagagagggagagagagagagagagagagagagagagaggccctttttctcctctttttcttcttttggtagtttgcctctgcctcccgagtgcagattaaaaatggaggattaaaggcatgcgccaccacgccccgcagctacacttatatttttaaaacttgttttatgtgtatgggtgttttgcttacatatatttctgtctactatatgtgtgcctggtgtctagggggcggggcagaagagggagtcagatctcttggaactggagttacagttcgttccgtgtggaagccagttcctctgggggctggggggaacccaaaccaacaaaacagacagacaatcaaacaaaccaacaaaattcataccgaccaatctctctagcccaaatgaaatacactttaaaactctctctgaaattaaaaaaaaaagggggggggtgctttccagctttttagaacccctttttagtgtaaaagaatacaggaaatgtccattgcaagtgactgggtcagccacaggagcaccttacctctggtgcccttaagagtctggcatggtacctgggtggcctcagggtatctctctgttccctggttcttctgtctcacacccatttgttaccaggctttgcactcaggtgggtatatatataggaagtcattagctcaaaacagataaaaaagagatgaaaaaatattttctaatgttattttttattaggctgacaaatgtggtatcatgggctcctttgtctataatatcccaggatattttataacattaagtaagattagcaatcagtaagttttagaaaattcatattagtctttcttcagtctttagcaggatggttgagttaaaaattttcttcaacttaaatatgttaatttaaaagtatttatttctggatctgcctcttagctcttctatcttctgtattatagttagactctaagttagagtaactcagaataacattaaaaagttagcttagatagacagtttacagatacattttatttgtgtacaaggataccacatagtcgtgtatacagatttgtgtgtgtgtttgtgtgtgtgtgtgtccttgtttctcttgtgctgctcagtgttgaaagctgtggtgttattagactgtgtgacagacaggcttctgtggggccactcgaagttgcacgaaacaagacgaccatgccgaattcgtttcattggtatggtaggagatgtgtggcctctgggctaaggccagggtgctgcctgccagctcatggtctggcttcaaggagatggcttcagggagtgaacattaaacctgggctgctaagtgtgaaggcctttctctaaaggttgtaattttctgttcttgtaccagagtggcacaacttggggatggggcagttttgatcatttagaaaaaatgcccagggccttaagcgtcttaagttgttaggtcagtgctatttgttacctttacagcaattactggttctcagtaatgggggttgggaggttttcatctgaaaggcagtttagaatatccagccatctcaaggttatgtagaaataactgaaaggtttctgcaagaaacctgtgaaacagtacgttatgtaacatggcaccagactattgttaactgaaatcttttgccttaagaaaacgatcagtaagcagatggacatattgtaaaccacccttagatgtccactgcttagaacctattaaatattcaagtctgccactaagaactggtgaagctttttggatgaagtcatcgttgttggtcagttgcggataccagaaccttcttttcctttaaaagctttaccattgtattgcttggttggtttcctggaacaagtgtcacttgttattgtttgttctcacttcgagtggtcctccaacctgccactgaggaaaaactcctagactgagagcaagtgtcccaacattcatatgcagattccacgtgcagggtcaagggtgggggtggggctgagggatgctctgagactgtattttgcaaagtggctgaggtctggttttcctgtccccagacccccaattcaaagggcaagcctctaatctctaggaagagtgagggaaacatcgtacagcagaatgcacggtgctctgtgacccttggctttaaggctttcacacgaagcaagccatgactcattgagtcagtagtctacagaggattggccgttctcgggactttagagaacacgcaagggcctgactccgtggcagagtccagctgagggagaaggagcaggaggaggatgtggtcctgcagggacaggaggatggtgaggtggtctaggtctagacagacctgagacagcccagcaaactgagcgagttcggaatcctccaggggatttactagagcagctggctgcctggggacagggccacatctgtttggttgagtgttggatatgcagggtgtcggatgtcttacatcatcatgattggttattatctggtgaaaaaaaatacacgccgtccctgcaatcattgttaaggtttaaaactcactttatggttctggggatcaaatccaaggtcatatatttactaagcgtgccctccatgtgaagttgcatgaccagtctctcattcataccttgtttgtttattcactcctttatttacttctgtggtggtgtttttaagacaggctctcactcagtagcactggattgggattggataagtagaccaggctgaccttacactcacagtgaactccacctgcccctacctcctgaatgctgggattaaaggtgtgagccacaccacttctagctcccaggtttatttttaatacattatttggactaatccatgccttcaaaaggaacaccaccattctaaataattttctgtacagttcagaattattcctaaaatgatcaaaatggaaatctgtgttaggaaattgaggaaggagagatgtggtaggttgaaagtgtagttaaaatgaacatatagaaaaataccacatagtatagcgcaggggatgatattggcctttgaatcaatacaaactttcgtgaccaagattgtcactattcaaaatggtctttctccaacgggaccttcaggaagcagtgggtagcgtttttgtcggtgggtttctgcaccgccacaggtgttacatctttgccctgtctgatgagtagcccttgaacacttgaattcatgtggtttttaagagtcagaactgcattttaaaattcatttatttttaatgattttaaaaggcaacacatggctggcttagggagcacaaccgtagcgtaccccacagtgcccagggacattaacgtggaggaaaatgtgatcttggccagagagttccggaagggccccgcttagtccaggaggcagatttgaagctgcctggtgatgaactgaggttctgatgttgtgatttggaggcacttcctgatttctttatctggatgtttgtcatctggagagatgccttgcccaaaggcaagccttggccccactggacttgcctctttccaagttggctgttgaaggctgtgttgccagtggggaggtggctgcccatgggctctgtttagtactttcagtttgaattcaggctcagcagcgaaccctttatcttctgtgtgttcacttatcaccatgtggattccgttcttgtcttgatagtactgtctccttggtgacagagtggcctctttctgggttgtggggagggtggtgatacactgtgttccagcggcagggcatgccttgggaaactgatgtatacttccctccatgcagagtctctgccagttcttttcaggacctttggaggtaaaggagagaagttgagcaagccacccacagtggagctagcagggagcccggaaatcctcagtatctcacgggcaaacaccctacaaaacttcatacttgccaaagtgtgctggacattcagggaagagctctgctgtccgagggcttgaactagaggaattatttgcatccgaaaggtgttttgaattcgtccctttcctggataggtttctgatctgtgcctgtgaataaaacctctgcactgtggtactgcattaaagctcgggcacaaaggcccgagaatttctagaatttctagaatctgcattaagtagaacatcagtgtgacactgtccaataaaaactaacttagaatgacatcatttacagctcaaggatttctaactcctattgccttcgtgtgtatttgttgctcttagtgctgattttgatgtctttaatttcaaaaagatttagaaatctcgtggcactcgggatggagcccagggttttgtccgtgctgggccaaggctaggagctaccttctcagctcactgctggttctttgtgctgtttacttgtttagacctgcctgttgattcccagggaaatgaccagcagtccccacttggtcctcttacccgctgttcctaaccgtgcgctctgatggagttccttgagaggaatgtgcttctgtttggtgaagaagctgtgcttcatggcctggtctctgaccaaggtggagctgatgtgagcccctgcccgccttcatccctgctcattccttacagttgcctgtccattcagggaactgtttgccattcaaactttaatctaggttccattaacttatataagggcttttttcatctgtgaagaggagcatgggccagaggcccaacagtgcttgccagctctgagctgcttgcaagtggcatcgagcttctgcccatgctgatggtccccttcggtcacagtcctgtgcccccctctcacctcggcaccagtgcatcttgtgaactctctttgagttacaccccagttattaaaatgtttctctagggtgcatttaatgcataactactaggaagtgaagcattttttctgattgttactcttaggtgtggccctctcgacagtgatataggcacaggtggcattcagtgtagagaagggtgcagccttcaaagtggagctttattttaaacatgttataaaaactgagactcatgttgcagctgcaatttgggaaagtggtcattcacgtggtcttaataaaaaaaaaattgaccaaaatcaattaattaagttaggtcagatcgaaagtatggaccatggttaccagatggattcctggcacagttgccagttggtctgaggtgtcagaaaagattcaaggtggccttggtggccggagagctagcaatcactgatggtagatttcgatccacaggtttttaagtcctgcctgggccacacctgaggtggtcacagctgcagtgggtcacatgctcacttgatgccgtacaatgctggcatttttcatgcctccgggagtggattcttaatgggaatgaatagggaaccggaaggagggaaacaaagccaagcgtctggtataattactctcagcgagcctggtttgtctcttcttgtgcccgtacaacttcttttccccttctgctgggtccttagctgataaaaagcaagcgtcaagtccactgctgctacttcaagcaggctctgcagggccccgggcttcggggtgtgccccagcagacgaagctgttgggaaatgaaggaaggtcttccagaacatataagtgctattaccttccttaaactgcgtggtaagctggctgcatggctggcttaagctgttatcaattacattgtaacatttatttccttggaagttaagagtgagccttgagcaaatgaagactgactttttaagtttttttaggttacgcacaaattcagtttatcaatatttgttgcacttggcactggaatttctactccctgctctggacttttatttgttctggggggaaaaaaaaacccagcatatttttagagaaacagctttcctatgtacttgattctctcctgtctgacctctgtatttggagaaggtagatcagaaaatatatggcaggtagtggcagagtgaggcgacctttgacgttggctgacagctgtcacctgaaagctacagaccctctcaggtgtcatgtctgtagtgctgacagtgagcaggaatgttgtttacatttccataaacagagtctcctccgtgttacgaatacgttaggatagggcaggtagaagagagggttatctgtctcatgggtgactccttacagagttggttatatgcatattcttgtggcaatccgcagtagaattcacaactgagtctgtccagagcatctctggaaattctccatcgtgtgcttctgtgtgtcgcaagtgggtcagtgccacccagtgcttaatgtgctgtgagaggagatcagctggtgacagtccaaaggagtctcagggtccaggcatttttcttatgcgaaatcattcttgattagtttgttgattcagtaagcattgaacaaaaccacttttctgttttggttgttaaagcagtcttcaaatcaaattggttattttaatatgaccccagatctatcagagtttatagctaaggcagaaagctgggatgctattcggttagcataggaggtgaagggatgtgccagctagccccactccctcctgctgtgtcctgctttgtcctataaggtttttaaaaggtctggtggatatttttaactttttttctgttaaagtaccatccagttttggctagtttctgaagaggtctctgtctctaccaacaggaatagtcagttgtctacagctagtctttgagtagtcacttagccctcaccacagccagtggtggggtaaaatggagcctgtgtcttgaccctgctaccatctgccccacaatcgccccacaattctggaacgtgatgggcccagagccatgagtgaaatcggtcctcacggagaatgaaagcttcacttgtggtctctttctgaatcttgcctattcctgctattaagcataatgaaattatgaatttattgtgttttcaagctcgcttttcaacctcattacgggtgctttcttgttagatgcgtctgttgccgttgcagagttgtatgtgggctgtaaatatctaatttgtacaaaatgactgattttggtatttgtataatcctccagtcaatttaactaagttgggcttttcccagtcctcggtgccacgctcgccgctcatctgattaccgctcatgggagtgaggttaaggggtgctgttgggaaccagagctttagcccagcagatgggctgccggctatattcatacatctgcttgcctgctgtggcagctgctgctgcttcacgttgtgtccttttgttctgttccatccaagaacggaatgtgaggaagtgtagtgaatggattaatttaaggttaggttagtgttgtgctgcctttccacgtaaccgatcagagtgcttctggtagaagctaatgagtttcccttaaactgaactaggtttgtaaaatacagctcagcaaggggcctgggttggcattgttgatgggaactaaattcaaatgtgtaaaataccggcagcttttatcatttgttcctaattctttgtttccttttttctctcttctcaccccccactcctttccaggacctatatccagacttcgcccgcccgcctgacactgcagggtccgagagaattaaggaaatctagaatgacacgaagaagattagttaaggattataggttttgaggacaagcaccccagaaaagtgaagcacagacaagctcccaggctgtgttcggaggagccgtgtgttagaagaagatggcggacccagggatgatgagtctttttggcgaggatgggagtctgttcagcgaaggcctcgaaggcctcggggaatgtggctaccccgaaaaccccgtgaaccccatgggtcagcagatgcccatagaccaaggttttccctccttacagccatccctccaccatccttcacctaatcagaatcaaaccaagttgacccattttgatcactatagtcagtatgaacagaagatgcatctgatggatcagcctaaccgaatgatgggcagcgcccccgggaacggattggcgtctccgcactcacagtatcacacccctcccgtcccccaggtgccccacggaggcggtggtggcggtcagatgggagtctatcccggcatccagaacgaaaggcacgggcaatcttttgtggatggcggctccatgtggggcccccgggccgttcaggtaccagaccagatacgagccccctaccagcagcagcagccgcagccggctccttcggggcccccggcacagggccacccccagcacatgcagcagatgggcagctatctggcacgtggggatttctccatgcagcagcacggccagccacagcagaggatgggccagttttcccaaggccaagagggcctcagtcagggaagccctttcattgccacctcaggacccggccacctgtcgcacatgccccagcagagccccagcatggccccttccctgcgccacccagtgcagcagcagttccaccatcaccccgctgctctccacggagaatccgttgcccacagtcccagattctcccccaaccctcctcaacaaggggctgtcaggccacaaacccttaactttagttctcggaaccagacagtcccctcccctactgtaaacaactcagggcagtattctcgatatccttacagtaacctaaatcagggattagttaacagtacagggatgaatcaaaatttaggccttacaaacagtactccaatgaatcagtcggtaccaagataccccaatgccgtgggattcccgtcaaacagtggtcagggactcgtgcaccagcagcctatccactccagtggctcactgaaccaaatgaacacacaaactatgcacccttcacagcctcagggaacgtacgcctctccacctcccatgtcacccatgaaagcaatgagtaacccagcaggcacgccgcctccgcaggtcaggcccggaagtgctgggatgcccatggaagttggcagttatccaaatatgccccaccctcagccatctcaccagccccctggtgccatgggaatcggacagaggaatatgggccccagaaacatgcagcagcctcgttcgtttatgggcatgtcctcggcacccagggagctgaccggacacatgagaccaaatggttgccctggtgtcggccttgcggatccacaagcaatccaggaacgactgatacctggccaacagcaccctggtcagcagccatctttccagcagttgccaacctgtcctccactacagccccacccaggcctgcaccagtcttcacctccacatccccatcaccagccttgggcacaactccacccgtcaccccagaataccccacagaaagtgcctgtgcatcaggtaaggggtgcagacgcctgccctgtggcgtgaaatgcaacattgttaacttgtctacggatatcgtaggttgcctcagagtcgtgaccttccccccaccccccccctgccaaattggttcattcattcaggagttctttaatcactgtcctgagaattgtgctaggtctaaagctgtagtgacttagtgttgactgagcctaggtccactggttagaaaaagattctttgttcctctcctctcccccacccccttgctctctgtttgaagactacactgtaacttggtttccagcagttgcttgtgcattagcatccactatagctccttttctttaccttctgtgggtagctgtgaaatatgtgtttctgtggtccttaattgacctactgtcgagagagtgggaatgtaagttgtgagctgtaggaaatgacagcgaatggtaatttataggagttgctttgagatttgtgtgccggcactgaaggatcacagggttttataagttaagacttttgtagctttgccaatttgtatttacaaaggcacccctccccctttttgtggattttggtctccacggccttgacttgtgaagagtagtgtgtgtatgaacagatttttctgaatgcatcttcacctccccctgggcctacaggtcttcatggggcacagtggttgatttcagaattgtatggcatactggttcttcctgatggacttaatcaatttgggaaactatgacctgtgtgtgactgcaaaccagagtgaaagatcatgagtgcttatgtggcagatgtcccggaagaggaagtacctgggaaggaagagtgcttgaaattccagtaaatctttgcttagggaagtgacccctgcagacatctcatgtgctttaaggtgatttccccaaacatgtatgtgcacctggagttgagctctcttcagggagaagcagctttgagagggaaggctcaggccagggagaggatgctaggatcctgtatcctgttttacggaatttgacttaaatgaggaattactcctggtggccatgtcatcgttggaaaacttgggtgagcaacaggaagtgggaaccagctgtccaggcttgcgaagaaagttgggatcagagatctggtagtggaagcagagaaggttgaatctgggtgaaggaaaggctttgccttcacggtgagttcagtccacagtcaacagtcaagtggtgctggggcttcagcctgactttggctgccagagcaaaggtatagttgcttcagcctggtgcgcccagtgtctcaggagcactgcagagatggctcaccgtgcccacccatgcatgggggcagagcagacttcccatgagacagagtggtcagccttctggaaagatatccaggaagtctcccctcactctttcctgcagcatgcccagaggctgataggaaatgggaagacagctgccatcagagctgtatgtcctgatggagagccagcctcggagccagctctgaggtttcccttcctgttgactcagggacaaacacctgatgggtctgtcctaaggtgggccaacctctgttacctccaaggcagaaatgaatgtggcctagttttgggaaagtattgtgttagtaaagaagggatcgtgctgagaggtggttgtatacacctttaatcccaggcagaggcgggcagatttcccagagttggagactagcctgggctatgccgaaaaccttgtcttgaaatacaaacaaacaaacaaaacaaaagggagggggggaatagaggggtctttacaatgcttgtttccttgtttctgacttttcatcccagcagtgggaaggccaacagtttgttggggctccctgaggacattctggtggcccccagaagagaagtgctctcttacttactacttacagttttcagaggacagtagcagccctggcttctgagccccatgggggccagtgttgtgtgctatatagtctgggagaccccgaggggtctgtggtctaagtgggcacctcaaaagacaaagtcagaacttttctaaggccgcaggcccgggcatttgagctggtgtttcttcataggctcagctctgtttgtatttttcttggcatttacttccctatttgtgtttaacttggtaacctctttagttttgggggcaatcagttgatttgaaaaataaaatcagaagggtgtttgaatctctgtttgcccctaagcaggttggtgacacaggataagtgatttaacctccctgaacctgatccttcagtgagaccagaatgagagcagccccagaggctcgggtggggtaacgcccctcgacaatgaactttcatctctagggtgtagcttatgacctttaccctcgtgttgccaggtgtgaagaggttggttgtgaataattcagaatgctctcatgtgatctcgcctctttctgaatgactcagcctgggcaactacatcattctaactgtgctttgctcgagaactaccaagtccatactgaatttcttgtaagataccatgggagttcaagattgaagtatgcaggaatgcccaccgaatttccacagacatacaagcttgttgagtttctcatccaactcacccagccctgagccctggcagtcctagaactcactctgtagaccaggctggccttgaactttcagagatctgcctcctgaatgctgggattaaaggtgcacacaaccactgtccagcaggttttatacttaaaaaaaaaaaaaaaaagaaaagaaaaaagaaaaaaagttgtattcctgaactatttcatggagagaaagcaaacacttggtgtcatctcaaagcagttctgacattacaggccccagccatagaatttagaaacagtggtcagagccagacattccaaccctttaccttgagcaacttccttagccacagggccttcatttcatttctaaagaaaggggcttctctactttctgggtggaagtgcagtgatattagcagtaccatcttgtgaaagcccagtggggaccccaaaacaaaccactgtcctgtagcaagtgtccagagttacctgtcgccaagttagcttcactaattttagcgtcagacattgttttgactttatttcctgatttcatggaacattactcaaacaatggaggtgctctctgtgcttttggttgaaagacagaaaacagctttgcttttagggaaagagagagcccaatggggaagtaatgctccttatggaggtatggaggatcagtctgagtcgagggagagtggatagaggctgaggacaacagctaaggcttagcaagttgtgatacgaagttgatagaatggctcaggccttgcctatctcatgacctgaaacatggcattgagcacagggtacaccctctgctctatattcctgcaaccctgaggaatatgaagggagagaaggagggcttagtccaggggtaggcatctatccctgtgcaccaggagttgttcatttgaagagcttctctaaatgggtcttctctcatgtagctaagtcccaagttgctgaaagactagtgtagcccagttccgtgttgcctagttccagggtcattctctctgatagaaagttccggtggagtttttaggatgtgaaacactgtgtttttagaataaatgtaatttggatgtatttgtgttccattccttagtttgtcccttaaatactgaccataaaggagaatagaagttaaggtgtagacaatgggtaataatgctctgtgctatccccacatcgtgctgaggtttctagaaataaataaaagatctagaagactcagtggttgttgttgttgttgttgttgttgttgttgactatactgtgccatcttgtgaacattttaaaagcctctgggaaaccttttcctggaaacctgacttagtccttgcctgacactctgctttgtttttggttttttttttgtttttgtttttttttggtttttcgagacagggtttctctgtatagccctggttgtcctggaactcactctgtagaccaggctggcctcgaactcagaaatccgcctgcctctgcctcccaagtgctgggattaaaggcgtgtgccaccacacccagcttgacactctgtatttatccaatatgatagaatcgttagccactgttgtaagtatatggggaaatttggccgtatatcgcaagccacctaaatggaaattgtaattagagaatgcagaacgctttttttttttttttttttagtgacaggaacatgcatcatctgtgactactacatatgatgtcgcccatgcctttacacttgtaaacttgtctgcgcaagctggaaaataaaagacactgtaaagaaatccagcttctaacatgagtggcgtttctgggcgtttccatgtgcacacacctgcagagcatgggcctcctgttgaacgtcctgggagcagctggcccttgcttggcagcacagtcgccccgcccgcttgctggggtctgcttgcttcttcatgagcactcagtaaagctccacgtttgccctttccttcctttccttgtagcagcctagtgactctcatgaagcctatcttctgactggagtttgcatatgctcagcttcctgagagatctcctgacaccttttcctcctccccagagcggatttacctcagaggtcagaattttagtgagtttaaaatagaaagtgccaagtatagagttaaagtgctgcagaaaacacgatgccttggagatagctgtgtcttctagatggcttctgttttgtgacaagggacaattttctatggctatcaaatttgtcacataataagagtttagtttttcagttacctgtaaagttgcatattaggccactgttaaatgtcacaaggagctaagtgactttgttaacggtgtgtgcttgtgtgagtttatgtgtgtcacatgcatgcagaagcccatggtggccagaagagggcatcagatctctaactggggccataggacgttgtgaatccccatgtggttgctgggaaccaacaacctttggtcccatttaaggacagtgaatgcgctaagtcctgggctgtatctccagctcccaagttttaaatattgttgagacaggggtcttgctgtgtggctcagactaccttctaactcactgtgtaacccacgctaacatatgatcctctgtctgccccaagtgctgatatatactggagccttgtgcctggagtccattgttagatactgccatttcatcttgagtcttgggttcttccatttaacaacaccttagaaaaattagcatttgctctcacccaagcacttgattaaaggcagggatcgacagtgtgatgtttggggagggaggcaaaggcgtatccttaggtaagcctggggtttcgttatttcagtctaacgtactgcccagcatcgctcaagtgtttattttgttctgcataagacacacacacacacacacacacacacaccttatatagaggatatagatcagaaattgtttaatgtaattatggcacaagtgacacacacacacacacacactccttatatagaggatatagatcagaaattgtttagtgtaattatggcacaagtgacacacacacacacacactccttatatagaggatatagatcagaaattgtttagtgtaattatggcacaagtgacacacataaacacacacacacacacacacacactccttatatagaggatatagatcagaaattgtttagtgtaattatggcacaagtgacacacatacacacacacacacacacacacacactccttatatagaggatatagatcagaaattgtttagtgtaattatggcacaagtgacacacatacacacacacacacacactccttatatagaggatatagatcagaaattgtttagtgtaattatggcacaagtgacacacatacacacacacacacacacacacacacacacacacactccttatatagaggatatatagcagaaattgtttagtgtatttggcacaagtgacacacacacacacacactccttatatagaggatatagatcagaaattgtttagtgtaattatggcacaagtgacacacatacacacacacacacacacacacacacacacacacacacactctccttatatagaggatatatagcagaaattgtttagtgtatttggcacaagttctccaagacagcggttcccatcctttctaaggatggacaagtgtccacattgctaggtagcgtcagtagatgagtactgaaaggtctgcatgcatgagagttctcagtacctttcttgagggagaggtcactgagaggtcatttgtgtgaacctgtaagaatcactggtgtgtttctttggaaggtggcttccagccattttcaagattctagctgcaagtggtgtatggatactgtgagcggttaagtgtctgggtcagtacaggcctgttctctgctgctttctgtaatactgttgcctgaaaggaaaaagccttacttttaccagaaatctccagcaaccttctgcccctctctgtctttcaccctctgcttgtttattctctgtcttagccaccattcagaaagggagactctggtactgtagaacatagttggctgggaagtagttaataagcagactgagagaaaatgagggagtaaacattggtgaaagtaacctggggaagtcacctcgcagactccgtagttggaactgtcaatctgtagataggctctaaggacacagagagatggctttcatcttcccgtgcagcagtgtccgccctcagccctgtggctctgtcacagcagaagccagtgtcaagtgtggaaggaactcgggcttctgtctgacaaacaggcgaaaacccactgaatacttgagtgtaattaccagtgggtgctgggtgaggtctcagcttagtttaggttggtttgtttgtttttaaacttagttcttagaatggctttttaaaaaaaaaacaaaaaacatttaaaaacaggagaaattaagagaaactgggaaagtaccaagaaacagataaaatcttacagagccaacacagaatcagaggtcaccattctagctttctgggaggccatttccaatacatacaagtgacaggcaggttctccagtttccttgcctcttggtttaatgtttgaatgaaagttctctccctctcaccnnnnnnnnnnnnnnnnnnnnnnnnnnnnnnnnnnnnnnnnnnnnnnnnnnnnnnnnnnnnnnnnnnnnnnnnnnnntccctccctctctctctcaagtaatttggcatcataggtttcaggagattctcaagcccttagtgaggattgtgtaagcaaaagcttgtactttaaggtgtgagctaatcccagcaggttttctgtcttgtctgtttgagccacaggctgtgatgaggtagtagggcaaggaggcatgctgggaaacctatgacgtttcagaaggacacctaatcccgaagcaattcccaagtggggaacagaactcaggatctgcctggctcctgataggctcggccaccagtttgcagcagtacataggaatcttgtcctcacccactgatgtttctgggcttctagcagccatactgagtggtaggggattgcagactgtttccctactctgctgagggaaggaactgtaggttactaggtcactcatcagtgagggagagaacagataggcttaaaattcttactgaatatgaggatattggaattaaagttcaatttttagagcatgtttcttgatggattttttacagcctgaatattctttttaacttaaaagaatactaacttgtgagattatttcatagctatgatatgcttggtttcatcttcaacttaatttatcttaaaacatagtttatttttattgaaagtctgagttttgggttgttgtttctgtgtgtatgtatgtatgtataccacatgtgtgcctggtgcctgcagaggtcagaagagggcatcatattccctggagctggaattgtacatgactgtgagctaccaagtgggtgctaggaactgaacctggtgctcttaacccctgagcacctcagcacttcaccagtaagtgccagcctgtgtgaggagacaccctgcttttccttgggtagccccagatgtgggcggtgaagaactggctggagcattacccagtcctcaccgtcctcgagcagaggttgagcaggagacacgcgctgggccacaaatgggagctgacagctactgtgctttataagctggctgtgtttctgactgcatgcatgctgcagagacagtctcatgaaggattccttctggagactgtggaggtttccccagagtaacagaggcaagtcagacttctgcaggcaccgtttgatggtttagtaaggcaccaagtggtagttcgctcccatgggccattgctctctccttcccctttgaacatgtgttgtggggacagggggtcctgttaagggaacacagccatcttcacactggagcaaggtgctgtggcacatcctgtgtctagtgtctgactcagtaggttatcctctcgttggaaacaatggctgaagacttagctcagtgaggaagtattttgggattctaagtttggaaagatccgtgcttagaactaagctccaagtcacagcttttgtttttacaagagagttaaaagtcaaagttcacatagaaataaagtccctcctctgggaataatcaatgaagaaaacaaaaacaaagccagttaagagacttcataaaatcaaagccacccagacttgtagattggtttctacccgctttctatgaactcaagtctaagaagcaaagtggaagagatgtcagcatgcctctttgcctgtgtcacctgatgccctctagttgatgttatgccccagcctgtggcactgtcaatcctctcatccctggcagaggtagctggtgggggcaggggcttcatgggcaccaagagctccattttccccggctctccagtcgtttttaagtcatgtagtgtacttagttcactaacctctagtttcctgaggatgataatgtaccagtttcacaggattattatgggaattaaatgagatgttggcgtggagctttagcccagcatgtgacatgcgataagtgctcagtaagcattaaatacctttatcatctctgttgccccagtggccgtggaagagggctcttggagtctttcttgtttcgttctctaccttttcacttagattatgaatacttcattttcaaaaccaagacatcactaatgccaagactcctcagatttgtttttgtttttgcttttgtttttgtttttgtttgtttttttcaagacagggtttctctgtatagccctggctgtgctggaactcactctgtagaccaggctggcctcgaactcagaaatcaatccgcttgcctctgcctcccgagtgctgggattaaaggcgtgtgccaccacacccggccagatattttttataaggcaaatggaaattcatgattttaggggcactatagggatgtatgtttcttcactgaattttaagaaacaatgcatataacataccatttgcggtctagagttttcctggtttcactcgagatgaaagcaactcctcttagagcgtagaaccccacgtggcaggctaagttggcatcctgtttcatattgctagggagttttgctgggatccttgtatccaacaggttaactcactgagccggatgtgggtcaacgcactgctgtatgtagttcagtagtacagagtcttcactgtgcagtgtgtgcttaagtctcaagtcccatgatccactccggtcttctagtgtcttccgtgtgtccccagaagcctgggatgacggtcaactctgtgcggtgaatggctttctttctaagcacagtgaagggatagctgggaattcagtgaaagctgtctgactgtagatctttttcatgtttttctttcccttaagaagtaacttcacatgctttaaaacaggagaagtgtgaaaactttgcagcgtagcgtagtagctaagttcaaagtctccatgaaggcagctcacattttcaaaaagtgagatttcatttttggacgcagcttttgcataacttgtgggcttgtacaagcttttgcacacatggtgggcttgaattagaattgggcctggagtctagtgttgtgtttgtcaggagacaatacagctccatcaaagataatgattctatccagggagaaagccttttctttatcatattcaaactttatgtgctacagtttaaatatactgaatatatttcttaatgtctttatgcactatacatttttaaatttgtgtgtgtgtgtgtgtgtgtttgtccttttttgaaacagagtctctatgtagccctggctgtcctagagcaggttggccttgaatttagagatgaacctgcctctgcctccctagtgctggggataacggtgtgcatgtggcaccactgcctggccattataagtattattttcaataaaaatgagataaaagtgaactaggaattctgttccctgtcagttggagatgtttataaaatttttgttcatttgcatatgttgctttattgaaatgtagtatttatataatttatgtataagatgcaatattccctatatttataaaaatgctatagaatgatttcattctaggctgttacatacttttactgaatttgaagtttaagaaaaggaaaaattgtaatattgtgaactaaagtttgtccagaagtatctcatgttttctaagttgttgtgaacaagagcctgtcccgttctttgacatcagattggtagtggatttttgtaaaattcctgtggcctagtcctctgtgtgaactttttgatgaaaccgtctttatttactatcccgagttcggtggttgctgccacacatggacactgtgtccttgaagctgaatgagacctagggcctgaaggagtcactttgtttagctgttattttaaatgttcactttcttttaagggccagtcaagtataacaaaacaactttttatttttaattgctggaaagtaagatatgggcgacagttaatattaggactttaaaaagttaatggtatagatatctagtgtaagttttatgctcctagttttcatttatttatttttgaacacagtaagttcttcctgtctataagccccagggctagtgataggctgtggtcggcaacacaccatatgctaactcaactcatttaactacagtcgggtagccaagttaatccgccggctcctgtttaccatggaattctttaaaacaacacaaaacaacaacaacaacaacaacaacaaaaaaccatgaccaggtgcaggtgatactctggaaggttattaaagcattttagtcacatgtgtaatatgaagcgtttaaaacgaaggcaggtacaggggcattgctcttccgggttgttggccttctgacttcagtcaggagagactcatttgacaggtcttagtcagcaaaaggctctcacatgttctcatgtgagcatgttgtatgtgatcagattttttgtgagttgtatgtgatcaggttgtaactgagtgcaaaatgcttagttttatgttgtataaatctcaggttttagaaagttgaaaataccaatttgtatcttgttgctggagaggagagcccctaagaaggatgttatggcggctgaattcctgacccctgttcccacctggatgagctgccctgtaccccttacccccagcctcccaagctttttgccagccttgagggcagagacattaggtccagcttcctttgttgaaaagtgagtgggctctttctgctgtcaggccctggagctgctcttggaggtgtctaggacagcagcctgtagctgcctgttgttaggaagctcttgggacacacagggatggtttaaggagtgcactttaaggtctgtgtaacagttcaggctgtagtaagtgtatgcatgtgctaacagctgtaacttgtgtcagcacagggtccagacccataatcgatagagcaaaagtctttaaactctgttatctgccaaaagaatttttaaagttttaaaatctctgactttatctttatgtttgcattaatatgttaacattcatctgcgcagcagccaatatctcacttaaacagcctctgctcactggatggagtgaggcccatttggatattttttttaactacaatgctgcttggctcttttgagatgaatgaaactggggttcttatactttgggaccatgaactgtaataagactggggacacaagaaaggacgttctggtgaagataaggattgtgggaagaaaggggcagcagacaggagcagaggagccacatctcctggatgctcacctggcctgtctagcgttttctttatcctggttggaaggccaaagagaagaggcactggtgtctccaatgctgtttatttgctcatgtcttctccttgtaaagaaaagaaccccagctgccagtgtggcccctgacccatgttcaaagggcttggtcaggaggctcttgagtgtattgtggccagaggagctgctgtgcgcccacacaggtttagcctggaggctcttgagtgtattgtggccagaggagctgctgtgtgcccacacaggtttagcctggaggtgttcggaacaggctttaggtggagaacttgagtctttctatgaagtggggtagctaccttagtacatttcagtgaagtgagttgatagcaaccagaccaaagcaatgggttgactttcccgggaggtcaggcaccagcggtgactgctggtgctaggaggagtgaacttggacatggattctgctttctctctgatgataaagcaaggcaggagagtgagcaagaacatacatctccccagttctcagaccatcccatcctgagacaaaggtctgcagggaggaaactgctcgtccgttcacacatgagttagcttagagcggatcccaaggtctctgtatttttaatcgttacatctgtaatttgctacaccagagattagaactgaggaaattgaaaaaaaattaatttacttaaaataaaccattacattaccacaggtaacatctgaaaacaaaaacaactattttcaacaaaagaacagaatagcaggggatcattgtttaatatttttgctaatgattacatgtcctgttttctaggaggcagccgggtcctgggtctgctgcttcaggctgttgttttggttgagatatgtgaaagttatcggccctcacacacatgtaattatgagaggaggagataattatagatattccaaaactctacaagtgcttgactcacctggactcttaagtgtcagtgggaatgtgggggataatgccataccaattaaagatttatagactgttaattagaatgtgtgggtctgtacccaattctgagtgccttcatacccacccctgattctgtaacgtacgttattttgaaaacatttcattgaagaatgttcatcttctgaattcagtgtacattttaaaaagtttatcagaagtacttaaagattgaaaatgcatggaagcaggacaggcccagctctagggatgtaaatgagggctttgtgcagagagaccaggttttacagtcagaaacgaagagtgggtatttgtggatgcagtccacaggtgtatgcaaaattctgttttttttgcttaaaagtttatatttacatactgtaagtacacagtgttagttagcttctttgaagggagaatttatttcaagacaatgcctggcaaattcctgagtgtgaatctcttcggcttgcctttcatcctttcaaattaatgttccatgaagatgggcagcctcttcagttccagccaagcatggaggacatgctgaggaggtggccctcctgcttctgtgtgtagctgttctgttccatgtggactctcataatctccatgcaaaagatcaaaaattatgagtaattttaaaaaatcaaattttcctgtgtcgtccagggcattcttaagtcggctcccttcgtttcccaagtgcagatttgtagccataggagtgatagtgcttacttgtaccgtgtgctgtcctggtggtggcggtggcatatgtatcattgtgtcggtgccagtgcaagggaacagacaggccatgtccttgtgtgttataaagaaactgtgtgtgttacagaggccctgaaagaatgtcggcgattgccaagtatctaccaagtgtacattctacagacaggtgagagaaaattcctagcaccaaaaagctttctttacacaacagaaaatatatttttatttggaaagtgggcaggtaaaacagaatagaggtgttcacggtcaggaagcaaagagggatggagggcgactgttggtgcttagcccccgttcttgggtgattgagccagggacttgaacccacagtgggtcttccttcggtcctggctagcctagaacttgctctgtagaccaccctggtcccaaactcaacagggatgcacctgcctctgcctaccaagcactgggattaaaggtgtgcaccaccatgcccggcttgaacatactgttttgttttgttttgttttgttttttgttttgttttgttttgttttttaaatcatagcctgtggctctcagaagctcatataatgcaagatgtactcatgctgatttcaaaattccctgtagtctctaatagccttaacactatttaaaggtccaaagctcaggggccaaagatgcctccctcaataaggtgcctggcctgcatctatgaggacctaagtttgattcccagagcttttgtataaaccagctgctgtggagtgtgtctgtaaccccagcataggggaggctatatgtgtgtgtgtaaccccagcatgggggaggcaagacaggaggatctctgagctgactggccagctaggctagccagatattcagtgaattcaggattcaataaatgaccttgtctctgataaacagagaacccagggaagacacccaaaactatgccatggtctccaacagcatgtgtacccaaatgcatttgtgcacccacttacatgaggcagtccataattacatacatcccacgtttcttctgagactcaaggcagtctgaactgtgagcctataaactagaagactaagttgcattcttctacttacagcggtgatgggtaaacgtgtccactgtagtagggaggagagggaaggtagcaagaaagactgaacggaagcaagactgcaggcaggagtgcagacaccaaaccctgtagccacagttctggcatctggggttagtgacagaatcaactgggagtcagcagccttagaagccctcttagctctgctgcagcagcagcagcagcagcagcagcagcagcagcagcagcagcagcagcagcaaatgccaatggtctcctgggctagttctatttcatgcctgcagctttccttgctgggtatgttacacacccccacccccatatctggagtctacattacaatgcaggtttcatcttcccagatttatgccagtggggctatgcccctgcctcctattgcccgatctctggccttctggactattgtcttaggtccccgcgctttcacttctgggcctaccaaactagcacagggccctcactgctcagttctgccacctcaagatgctgccgccctccctcggatgacagctacaagcccctgagtggcatcggagctgacccctgggaacgcttccgtaggtggccttttgaatgctgaacccttcagtggtgttctcatttccgtgtttctaagctggagccttctgtgtggggtgctgccctcaaggtttctttcctcctgtccgtaatgtagaatatgagaattgtctgaagtattagcccctgtacaattagccttctctgggaaggagcgaaggcagcgtgtgtctagtggctggcgtgctgaatggtttccaggctggagttcacttgattgtatcaggtggtctctgcctttagggtgaagactgcttcttagcgaggttaggtttacaggtcagccacttcacggtctcacatgcatccatagttttttgttgctgttgaattataacagagttctgagtctgagctagccagttcaccatagaccaagcatggaggtgcatgcctgtaatctcagtatttataaggcagaaggttgtgggcatgagatttgtagtccttgctaatgatgaattctgtccagaagctcatggtacagcaatgctactagctagttgttattaccaatatcacaagcaaggcgtagggccagttacagtgcctgctatgcaggcataaggacccgagcttaaatccgtgtaaagagctaggtatggctgcctgtgccttgactggcattacagcacaggtcaccagtggggactcagtggttagcccacctggccaaaatgagagactgtggcttcaaggcaggaagacacaatagaggaaggcccctaatgtcctgctctggtctttgcctgtgtgcccatctgtgcacgtgtataggtcacagacacaaagaccgtcagctttcagtctccactcccactcctccaacggttgcagtctttacccatacaaagcaaccagttcccagccccccaacccccactttttgtgagccaggatctcactgtctctagccgagactggcctcggacttaagagtcttgtgtttaatcctcttgagttccaccaggcccagcataaagaaatcaccagccttaaagtatgtgaaagtatttatgagaggttgttcatttgacaagcaagtaaccactctcctttacagagcacaataggagaaatcctacagtcaggatgaaaagccagatggtcctaggggacctcagtgtcagaccagtgtgctttgtgtgtcccactttctgccatgctaataacgtgaagaataaactgaggtgtttggggtcagatagggaaacagggaggttagggtggcccttgaattggcgacataagaatttcttttaaaaatctcagcttttatctttacaataaaggtgttttgttgtactggtgctacatttgcctacctgccccttccccacatcctgatataaaagtcctgctgctttagaccctacggccacaccccacaccccccaacctccagagttatgtaatgttttctgcatggcgtttcttgtgctgtgatcagataactgacgaaagcagcttaagagaagaagggtttatttttggctcagagttggaaggagatggaatatgtcatggcagggcagggaaggcttgccagtggatactcaggtgccgagtttatagtctccgcagtcagccactggggccaggcgggtgctgcggaatgggtgctttccccttcctccttttcatttactcccagtctgtgggatgctgctgcccacattcagggcgtgtcgtcctttcttacaaacatgcccagcggtgattccaaatcttgccaaagtgaccgtgaaaacaaacacaacacatcttctcacgattttcctaaaatgtagatgtttgcatttgttaggtgagtaggcagggtcttcagaagcctttagcctagtgctggccgagccgctctgcctgaaggtacatgtcggggacgagggcactgacgtcccttcacacaaagacgctaaggttggttcagggctgagaccaggaataaggcaagtcctgccctcctggtgcctgagctttccatgtctccttggcctggtgaaccagttgttgtttttagaatgttttccctccagagccctcagtccagagcgtgcacccataattagaaatctctccctctgcaaggctgtgcctgcctcccagtgaacacagatctaggcttgttgcctgcctgagtcagtcaacactatctgggtagtgactactgttagcagctcaccagccatggatggcagtgtaacatgggagtaaagaacatggtgatggagcccagactgtcatttaggaagatgtggtagaattaaatgtagtttttctgggtctcagtttctcccctctaaaatgagaattgtacgtggacctgatgatgatgtagaggactcagatgaagccagtggtgtgccacgcctggcccatagcagttgtccataagttactgttgcagttagtgcgatattgttgcagtatctcttgctattgtattctgctagtgtccttgacccaatccccgccattgtgttctaagtggagtgaggccagagcttgtgcccattgtctgggccatcacattcacagggcacagcacacggagtctgtctgaatttggatatggagtgtgtttattagcagggtgttttgggggtggtgtcagggacgtcctactgaaaggaagggtccttgctgattctccaaatggccagggtgaacccagagccaatgctacatggtagctccctgaaagaagagtctggagggaggttggggggttggaggagacaggagtgctgagtgaggttagcacagaacctgtgaatggtcatgggtggtgctgtgctgtgtgaacaggatgtgaaacagaatcatccattatgttaaaagcgcaaagtcaaacaggcgaatcttagtgtgtgtatataaaatatgtatatagtctatttagtttatacatatgtgtagtatattttattgtttatttaattatagtatatgttatttagttccaaatatacacaaaatatttttaacgtgtagcatttgttgtcatttcaacaaatagcaattaatataaaatgatgttttcgtttgttttgactgtttgtttgccctgagtctttgatatgtgttgtgatttttatgcttgtggcacatctgtcgtactctgggctagactgcttcaagaacccatgcaaccgatgacatgggcctcagcaaaaaagacgtggccgtaagggtggggagaaggtgagggctgatagctggacagggcaggacaggactggaagactggcgtgctctctctgtgttcctgaggcaagtggtcggcagtttagaaaaattcaggagaaaaccttgaggtttatctatgctctcaggaaacaaggcaagggggtgagctgaggagtcacactgtagaaggcatgctgctgcaggaatggactccatgcaagtaaacctggggccctgtgggctcggagtcctgggaaaaggagctgatatgctgtgaatgccctggggctgtccctcccagtcagtcctgctctgctcctgccctgctctaccttaagctatggtcgagctccaggaaataggcacccaccccaacccagggctgtggccagagataggagctcgggggcattctcacacatgccttacccttttgctgaaggatcacggaaaagctttacagtcctgagggggacagggagcaggaagggcagagggagggacgcacgcatgcaggagctcttcagagaatggaacctgggacttattagataactacactaccactgtaccctctcagccccttttaattttaatgtcgtgaacaatcacaagccatttttggtattaataaaaagtatgctcattgtagttcagctacagtagaaaaaggtctgcacctagttaggggatgaaattctgagaccgcttccggatttctgttgaggcagggtgcctctgtaaggcagtctgtctcttcaggagtgaagggatcatggttactgtagggagttatctgtcaggtctctcacgcagggtgcttttctgttctgtttctatgcacccattcagtctccagtcatcacattgttcatttacaatgtgccagtctctttacaagaaccagaaataagggcacagaaattagctttttatccttttaagaaaaatcccagttatcacttagtggttggtctgcatgacaaaaactaagtgcagccatagtaagtctgtggagttgctccataaatccacactttataccgccaagttatctgtggggctggggagacaggtgaagcttgagccgggtggaaggggcaaggtagcaatttatcagtgcacagctccgtgctcccagacccaaaggctaaagtgtgccctcatttacacatcaccactgggcgtggtggcgcacgcctttaatcccagcacttaggaggcagagacaggcggatttctgagttcgaggacagcctggtctacaaagtgagttccaggacagccagggctacacagagaaaccctgtctcgaaaaaaccaaaaaaaccaaaaccaaaacaaacaagcaaaaaagaatctttttgctcaactaaacgtttacttccctgggctgggtaccagaggcacagagagcatgtgagatgttgctggacccagactgagggttgagagcggacatctgtgctcacacctgagggtgtggtgagacttgatgttctttgcagcactcagcctaaggagtgcatctgtgttccatgctcctgtccatcctcctatccttcagagagcagagaaccagaaggtgtcagtagtcaggcagtatggtatgctgagaggtccttggctttgggagggccttggccctgcccgtacagatcagggaaggccccatgaagagagtggagtgagtgaactgagtgttgcagagcaagtgtggatttatggagaggatttggagactgcttccatctgtccaagctctagattgggaaagagcaaagtgccttggtgtgactgccatggtggtgcatgggtgaaggggctggtggccagctggaacgtagcacaggcaaggccctaatccttggtgctgggggattctgacttgtgtagctggcagggagccctaggtggactgtgcagaagtgtagtccatttacactgatagtggccattcagaaagactcccggggcttcaaaaccatgagatgaatgagaagcagttctgtcccggcctggactgcagaaacatggaagagacatgttacctggaggacttgggggaggcaagtgttaactggtaatggacagagccaggtagagggagggaggcagatttctgattgggtcaggaaacccaggtgtggaagtcagtttagctgagggaggtgactttagtgtgcagatcctgggatgtcaccaggcagcctggagtcttcctgggaactgagcacctggctctgtcctgtggtgaatggactcatgagtgctgtcagaacctaagagagtaaagagacaaattctagacagcatgaatgaggggagccatgcgggtgagaggatccagctaagaaaatggatcagtgcagtccctcgcttggagttttacaaatttcaaatctatagaactgttgggaaaatattacaataagaaccagatgacaattctgggtcctggaggtggatagagaaccaggaagtttttcctcccctctctcagatgactgtggccatgtcagagtggatattgggcaggactgttggagagaggggcccacagcttagggtagaggtctgagctggaggcaggactttgcaaagcaccaggctagaggtagtatgcggacttggaaacatggtagagatgagactggcgcaccgcagaagtgacaggtggggaagataagccaggcagaaagtgtaaggaaggaggggaaagggccatcctggccggcttgaaagaggcagccagagtgagcagctgtgtgggctgttgctggtaggtcaggtgagctgaggagccagccagtgggggtggggtcaccttggcaagagagagagagagagaaagagagagagagagagagagaggcgctgtggaatattaatgtggttagagcagactgaagagcactggaggagaggaagtgaagacagcaaatgtcgttgctctttcaaggactcttctctacaggggaagagagaagcgggtgagagtgggaggaagatgtgtcaagaggctcagtaaatacctgaaatagttagcgcacgacacggggcagaaggctgtgcagatggggaggactggccatacaggaggcacacgaaggaggaggttggtggatactccccaaggcagacttctaaaccattactttacagagttgctgcaagggtcctctgtcaaagtggccagaatagggatagccttggctgtgctgaaggcttccaaggctctgggcacctgccggtgctcatcagtgctgctgtgccctggcccctgactcctggttctgctgcatgcccctggctcttctgtgtgtgctgggaagaatttgggagcctggaggcttcctggtcacaatgtcccaaggccagtgtccagcctccaaggtctcactagagcttttcccagtgaaccttctccacctccagtctcctgaccgcatctggtcttctgctggggttgaggctgggcagcctcgggccttcagtgccttctgcttctcctcctgtctgaggattagtcattagggtgtaagacttctcagttcacaacctgtgtggattttgtctacctaagccttactattctgggcataatgggcaccattttatacatatcgtgggaggactggaggcccggtgggggcctctcagagttttccttctgcacctttgagttcgtcactgtccacggcctagtgttacgtgtgacttctcatagaagtatatactgtaattggatatctcttcccgtggctcctctcatccaagctttgcttttgtagtggaaaaaaatacatattactggaaggtttcacttaggtttccagttctggaatattttaatctagtcttcatagatcttcagattaattttgtttttgtttgtttgagaaacttcactagtacttcctctgaaattacctgtactcctcacagcccatcttactggtgcttattttgataactctaacccaacagtgccaaacgaccttgagaagattgtgtagcaataccgatacataaatattgcttaaaacccctctgaatgggaatatcagtcttcttttcctttttctcttaaattatattttaaatgagaatgttagaatacaggtgttggtactttaggcaaagtgaaaatatctgatcggaagtcacctgaaatactatattttcgacacagtagtgaaggtaacagaaatagattactcagtgctaaatattttcaggtggacagtatctcagtgaagccaagggtgttgctgagtggatgctggtcctaagaccacgctgacttacacagctgtttaaactctagcagcttgactcaaagggtactgctgttttataactgtatttaaaaatctgttcctcttttactccctcaaactgagctcggagatataatgggacccattataggtaaaaggtctgtgactcagccatccagctactcaaactctgggctcttttaattgccaccattaaagctttagtacttttatctcataaaaatagatatcattgatgtaaaatgtgtgcctgttgaagatacatgtgtacctctgccctcacagttagctaatcagccagccatctgagttctaagttagttgggttttatgcaaatgagaacatgacatagatcacaaattttgttctgagttctttaattaagaagacattccagtggtactcagggccgagcctcactagaatctcaatctcaatctcagccctctctctctctctctctctctctctctctctctctctctctctctctcatagaaccttactttcttcgctttgtgttggatagaagctgtatttagttgatagaacagtggcgggtccctcggttccttgatcccaagagtgcagtgcttctggttcaaacactgggatttcaagaatttgatggacacacacagattactcttctgtctctagctgaaacatcagcttaaatgtaaatgtggtccttgaggtatttctctctgctggtctgctggtgggttcctgttgccaaaaatataagctctatgatgaggaaattccaaagcgcgatggaagctctgataattcattgaagccaaatattaaaatgtggacagcctgtttgttctgaacgttttttccagtgtgctagcaggctaccttcattcattattcacattgctgtgcacagagatgacacctctctagatgtgccatgagtgtattgcagcgaagtttagctccctacccagtcatgctcacatttacttctctgttgtgaaaatagcaactaattagtggggcatctccataggcgggcgagcctctcctgctctcacagtgatagggtagccctcagataagagaacagagtcttgactctaagaaggactcaaatccaaacaattctaaaatacaaacccacccacacaaaacatatgtgagctacacagccggcctctctccttgcccagctgtgtagattcaattataataattttctcagttgcataacattgctatttgtttattactgcgttattagtcagtgaatgaacctccctctttttgacccctcagcagtgtttataaaatacttaattgctttggtatcttctgttttgtgtgtaattccagctggaaggagccatggggacagagtttctctgtaagtgtataacagaatgtttctaatgtgcagtaaactttctttaaaaaggtgtgtgtgtgttttaagttgaaagtaaagttgttttgtttcaatctccttgtgaccctaagtagtgtcgtgggagccactggccgctgggcagctctgcacagggggtccgggaggacctgatgggagcatggccaacagtaaggaggcagttggcgctgagcttgagaaagtggactttgcctggtgtcagtcctgtctcctttttggtttttttttttttttttttttttgtgacttgggcaagttttttgtccccttggatgtattattctccgttagtgaatcagagaatgtatgaccacactcaatgaccccttcagcatagcgtctttacagagacacagggaaactctgcagtgtggtcaaggtgtgagctatctcacaggggaagaaggaccctcggggaaataaaccaaaaagaaggaagtgcaggttagaaataaggggaggtacttctttgaacgtgtgtagtgttgtgtggcatgttaccacagacttcatggcttatagccatgccctgctcctcctcagcattttcttaggtaggggtctgggcatggtttacccgaggccactcagggctctccaggatgcagagctcaggcagagtttctcactggaatcttcctgctagctccattgctagctccattcaggttgggcagaagtacttatggctacctggggcagtgttgctgggtgtctttcaatgctacccttagctcctggagactacctgcaagttatgcctaagggttccccccactcccctatggccactggcttcttcacagcctagataagattcttccctcctctttaaaaggctctctgatttaaggcagacttgcctaggataattacccctttgaggtaaccccaaaccagtgatttctcaccttgatcagacctgtgacgacatccttttcacctttagctagaagtcaaaggtcctaccactcttagagataatggggcagattaagagttctgcctcccacaacatgcgaatgagtttttatagaccacagtagtctatcattaagcatttattgtgagctaaatatgctagattcccagtctcgaactgtggggaacttgtctagagtgtataaataaactttatcactaaatcctctaatttttccccctttcaaaaactcccagttctgcaaaatccctggtattggtcagtgttactaagagacctgttgtcatcctttgaagttcgagtttttaaagccgtaagaatagcagagtaggttgctttttaatattaacacacgtaagcagcgtaaattgcttttctggggccaaactctatacctttcctttttataaagcaaacttgctgttgaatgtaccagtggcggcaaagcatgctgtcaagtgtgcaccagtggcttaatgcactggattcattttgttttttaagtatgtaagtttgaccttcgtcttcattgtctgtgaatagaattccctggtgtctgtgtgtgtgtgaaatattttgaccaacccggaggctttgttgaaggcacatacaagagtgtttcactgcgcctgagcactggcagccacgggagtttggggagtgcttgtttatggcacaggttgtgggacagggagagccttactgctgaagaagctgtgctgtggattctcattcgtgagtgctaaggagagggcaggggaagagaggagaggcgggctccacggggttagtctagggcgctgcagagctgcctttgctggccttgcctctagaaagctgagctcagaagcacagcacccgaagcctgctgtcagcagcccagagatggcgaatgaggagctgaaagcaaagccctgtgtggcagggctctgtaatgggtccatcctcatgagcagccagagctgtgcaccccactttccctaagatgtccctcctgtggaacagtggccatgcctgctcttctggcccaggcaacacagaaaattattactcttactaacatggaccctttaaaaaattattattattttcattaggatgcgaactcctaggctttcctatagatcttgaattgtggtgtgcttgtgttgttttgtgtctttcccatgacgcagaagacagttttgccacccctgtacctctcttaccaaaaggacttttcaggaaggaggtggtccagcctgggcacattctgcttacctgtgcactagttttgaacagggatcacgtgggggaacagcactcagatttcacataaacaactaagctaatttttccaaacatttctgaagccatggagacacatcaaaacatgttcaatttaacatcagattactttgtaccctaggagtgagtgagtgagtgagtgtgtgtgtgtgagtgtgtgtgtgtgtgagtgtgtgtgagtgtgagtgtgtgagtgtgtgtgtgagtgtgcgtgtcagtgtgtgtgagtgtgtgtgtgtctgtgtgtgtgtgagtgtgtgtgtgtgagagtgtgtgtgagtgtgtgagtgtgtgtgtgtgtgagtgtcagtgtgtgtgtgagtgtgtgtgtgagtgtgtgtgtgtcagtgtgtgtgtgtgagagtgtgtgtgagtgtgtgactgtgtgtgtgagtgtgtgtgtgtgtgtgtgtgtgagtgtcagtgtgtgtgtgtgtgtgtgtgtgcaggttgtttcaactctgtgagttttgcattttccctaagaaatggcagttggcttaccagggggaggaaagggtgggtttagagtccttccccagagatagactgcagtagatgagtgagacacacgcaggtccatcctttaggatctgggtagttttcaaggcagggcagggaggcagggagctaactcgtcttttcctggtcccttcggaattgaagtggctcggggggggggggggggatgttcccgctcattgctcttaagcacctggcttgtaccgtgaacctctccacatttagataccaggtccagcagcccttccctgtaatcccaggtaaccatcaggctgaggcagggggatcacaagttcaagggcagcctgggcaatgtgcaagaccctgtccccaaccgaaagttatgaaacaaatgcacagacacccacccgtacccctgagggggagacaggagagacagagacagacagacagacagatgaacacgtatctcagcttgagttctcccacccccgtgtcccagcggttctgttatttgtttaaatatgtgttgaatgaacaaattagcctcttaataacaagtgcagttttaaaaattaactttcaccccaaaagtctcagtagcacttactgaacccttgctgtgtgctctggatctttatattttggcccaaaggtagaacttcagatttgataccagccttactgtcttaagggagtgtagaggatccaaggcccaggggagacaaaaccaaaagttcagaatgtccaaaaacatttcaaaaaaggttcataaagtgcatttccaccttatgtgactaatttgtagtttgcaaacggtttaaatcatggttggctgtgttgtgagcccatgtttcttgctaccgagttcccattggcggccacttccttagcagatgtcttgtctctgagagctccgatggctctttatgcctctccatagctaatttgcggggggtacaagttggcagaaacagtctctccatggtccagccagtcccggctcttcttttgtgaggcattactcggaatctgtacttgtttgcatatgtgtaaattcagatatgtaaatgtatgcttgtttgcaaataagccttcacccacaggcctaccgtatgtgaagtactgtgagctttagaaattgtatgtgttgtatgttggtgctatgactctatattgcttataattaaggcaaaatatgaaaagaagatagcttttttaaagctagaaaaaccttagaaggaaaggacacttaaaacagtcaagaaatctctcctctacacttttccaccgtctcatctgcggtgcttcctaagtttgacatagcagagggatttgccctcgcttccccattggctggcctttgacagtgcatctggtccttcggcagctctgtacaagtgctgacttcctagttgatgtactgtcagcagaagagttaagggtaaaaccaatacaactgggttttttctttatataaaacatacaccttgggccatttttacttatcatttaaatatcagtccgctggcttaagacccaagagtccatactgtacttcttacagacaccacagtatgtcaaaaggaatatcatgaacgatgtcgggatgtgaagtctgcatggtatctaaaatccctcaccttcgttttaataaatgagaggtttaggaatggcctatatggtaatatcagatgttaatggcattgattacctgtcaggcagtggggattgatgggaaaatgtccgctgtaaaattaaatagcattagagaagactgtaccaagcatttggtgggggtagccagggaagtggggggcctgagggactgtcagggttttactgggagctccaggttttttttttttcttaccccacatgattaaggcagaccatctgttctttgttaaatgtttacaaaaacagcttccctctaaaagattcaaggagaagtaggtctggtaaacacgcatttccctgagcaccttcccgccctccttcagatagtaccaaaacaattctgccgtagagcagacgagattaatacgtttctatgttccatctttacttttcccctccttgtgggagattaaattttttacagagtccctaatttatggcctcatttatttataaaagaagcatctaaagtgatttgtatgctaacatgtatagatgaattttcagctttttttgtgtttttattttgtgtgtgtgtgtgtgtgttgctctttttaattcatacatgtgcgctggaaaagctctcaggggacactggtattctgtaactggagtggaagccatgcaggttgaagatgggtacatatccctcccatagtaagtacattgctgtcctacattggagccatccctccgattttcccttggtttttaggaataacttttcttctatttttttgaatgctagattctcccacaaaagtttcatttctatcctccatgcagaaagctgtgtcttcctcctgctcagttacgttaggaaatgtaagtaactgagcttgagctgtttccatgtagaaagtggaaatcaagtcagccaactcagctagtagccggggctttggttgctcgggtccctgaatgtttgtgagggaatataggccagtagtgacccttcagggtttgctcagttcagtgttggctccatgttttgtcttttccagaaagaagacttcaagaggagtgggttggcatcagagaagtgctaggtttaggaaacacttcacctctttcccttacgtgactcctgatagcctcatcacctcctagaacgcacttcctgtctggaagatggggtagatataaccacatgctgttgtcctgtgggacctgtgtgcgagtgtgtgtcggcgtgctcctcctcccacggtgcactcacctctgacttctgacatgcctttctgaattcatttcctctttgctgtgaccaaaaaagggcaacatatatttttaagattggtcttataccaatttgttgttgttattgctgctgctgctgctgctgctgctgctgctgctgcttttagaacgatggggatcacaaccggggcctgtgcctgttaggcaagcactctaactatgagctatatgcccagctcaccccataatggaaagaaacttaacaagtagagaagctgaactctgggtgggggaaatgacttccccagaaagtgtaactgtcattagagtagccagggcaggctttggttggaatggtgggttaccttcttaagcttgttctagtttgtcatgttgttttggagatgatcatggagccccttggagataggatgaaacttgaggcacctctctagaaatactcctgtgtgtaaggttttaggagctggttggagttttaagacattggatgaagaaggaaggctgcattcaggtgtcacctccagtccttgtgtggcctgaaagacagagataagttctacgatttccttgtagattcaggtatatggacacataaactcactatagggcagaagatatgcagccataaagattttatgttgagttgtgatttctgtaaactgtgctaaacatgagcttctaaccttccttcgtgttgagtctgtggactaagcctgggccctacactgctctgtttttgtgggttataagttgtatcacctttgatattggttccgttatgacttttgtttcctcaggcaggttactttatgttagtgtgtcattgtccccaactgtgaaactggaaggttcctcatagtccagagacctggtgtgggaatatagtgatgtttcggccatgaagcctatgctgggcttgttggaagatcactcagctctcagggatatagggaaaaggcagaggatgactgaggttgcagatgggacgttttcagttattcatttgaaatgtgaagatttctcaggtgcagcagtctgtcggatggatgatgcgcctgcgctgtcgctgccctgtcttgggtcctgggctttgaggtcactctgtgcaggagttatttactctgttctcacttgacttctcagcatctcatcttatttgtcagtattttttaatgtgtactccccccccccaattaatgtcagcattgatttcatttgtctatccattcatccatctatccatccacccatccatctggcttcaagaagttagggaaaaaaaagattgtccacatttctaattacttcaagaaacttagccaatgcaaaatcattctttcacatgacattttaatctagacaatttaatgttatttaatccatatatgacctgtgtactctgtaaaggttgtattgtacttagctctatctttttagtactagaatctttcaatgttggatatgcttgttctttgtactctatctgtgtctttgagtccccccccccaccccccattcagagagaggcctctgaggctgagcctgtgttttcattttacttcttgccctgtgttcttgcagttgaaaggtgtggaatgtctagctctgtagcctctttcccttcctgcactaatgcttttctgtagtaataaactggcatttaaagcattccccttaaagaaactcgtatgtttctaggctgagagaaaaatggcgaatcctgttacccttagtttgtagacgttgcttccttgagtatagaataggaccatcagccattgactcctagttcctttcttcatcgtgaagaatgagactaattcagtcccatttgtgtctcttagcattctccatcggagccctttctagagaagccagtgccggatatgacccaggtcagcgcacagaacgctcagctagtgaagagcgacgattacctgccgtcgatagagcagcagccacagcagaagaagaagaaaaagaaaaacaaccacattgctgcaggggattccagtaaaggttttggtaaagatgacttccctggtggggttgaaaaccaagaactgcgcaggaactcactggatgtgtcccaggaagaaaaaaagaaaaagaaaaggccgaaggtcaaaaaagatccgaaggaatcgaaggagccgaaggagaagaaagagcccaagaccccaaaagccccgaagatccccaaagagccaaaggaaaagaaagcaaaaactgtcacgccaaaacccaaatccagcaaaaagtcaaggtaggctgtgggtgatcaaaggctgcgcatggggcagaccagcctcacgctgcagggtctgggtgagtgggggtgtggagtgcctgtgtattttagatcatttgtgaccaactttggctcatacagtgcaaagctaaggtgtttgtgtattccaaactttaggactctactcttacgaactgctgatttatgcagagttttactggataaaaaaaatgttattttgcagccggcttctttttgtaaaaaccacaacggtgcttggttctctccgtaactcataggggaggatttcagaggaaagcaaggccactgaatggctctgaacattttactgccaactgcagaatttgaaagagagttgattgtgtctgcttagcaggataggtctttcacggcaggttgaagtccttgtggacagtgtgggaaaacacagtggaactcatcattagatatggcttcaagaacaggcatgggctctgggtataggaaagagcctctcttgctctgtatgccccaccaagtctctggccccctagaaggcatatttattcagtaagaaaatccgagagaagacattgaggactaatttttttcatttgtcctgaacatttccaacaactgttctgaagcagttccagacatctgaatccgtctttcagaatatggctcatgttagaaaatattaaaatatggtttccagatggaagtgtagccggactcggttaatctgagcctgttcgcatactctgatagaaaacacactccactctctagcccacgtgcacatgtaaacatttatgtgctcacacactcagttgggtcattgcctcgtactttctgtgtggagctatagccctttgctgatgggctacactgtgtcatgtgcagacacatacaccagtgcacagaggaggtcataggtgccgagagagagagagaagggggcagcttcttcagtgtcccgccagcaactcgaccgtattccgtgggttgaggctgtgagttttctttttaccatggattacttgtgtggtatccaaaaagccaagtatagacgttcactcaaacttaccagtgcccttatatttacagacaaggcttgattgtgcagtcttcattgaaaaggttttttttttcctccctgtgaatattttctaagcccagaactcattacaaaacctttgcatttattaaagaggcattttattgaatgcttatttgtaggtaagtgttcggactataatgataagtaagatacaggtaaaatttttagtccgacagtatgtgtttgtttttaaaaagctgctgcatgaatgtaaatactgggctttggtctgaggaagcacatcccccagggagagtagtcaaatccaaatctgaaacagaaggtgtgccctcttttcttaaggtgtaggtgtgtgtactaaaggggtgttctggactttagcggtattatccccaacacttttagtaccagaataatttcagttcagttttcttttgttgttgttactattattatacttaatggtaaaaatggatcgaatcattctaggattccgatatagatttccaaccatcttcagctcgtgtctgatcaggcagggtctatgttcccagcttacttgggcatatccttaccagctgtggagtggttcggaaacagactttgaaatggtgtatgtagtagtgacccttgtatcgtccctgacacctgcgggaatccagcctggtcagcactgggtgtgtagcatttccttggtgcagctagagatcctgtgtccacacagagagctattggggctgactccagggtagccagagactgtactcctgagagtgaggtctctgccgagtgtttagcacaacttttttttttttttttttttttttgtagggacaggagggaatttttacttaagaagaaaatatactttcttccttctccctgctggcactcactagttgtctcccttagagctatacacaaatgctgttttgagtcttaatggtttgggaacctttgacaggagcagggtgatgtgtgtggagatgtacaggggtcaggaagccgcatcaggtatgtgccagagacttaaaggccatgtttaggggtggtgctgggagatggagggagttggtagcacctctgtttgcttggatcacttcacacgcatgtgaccactggctgatttacagtgaagtgtggtaagggctatccccagcagctttcccgttgttgatggtctttcaggattggctgtccaaacataggataattgcattgagatgttaaataaattaacaaaccaaaccattattttgtcaaaccacgttgttgctattggtcagatgaattgagtatgtcaattgtggtctccttgttcagttacatctacaaggaaatagcatccttgaatcaaggataacgagaatgcatacaactccatgtagattttgaatagcatagcagaataattatgtaaattggatatgcagtgatgaaggtaatggggggtttgggctgtgttagtgctggggctcaattgccagagcagtttgcgtctacgccgtgaaacacaacagtggcaattttgttttgcaaaatgctatgtgataccggttatttccatccttgaataagttaacttgatgaatttgtttatacagaaaataattttcctacagggggctgaaacagaggaaatgagcaagtgaaatgaaaaatttagcctagtagctcctcacttctttccgtcggtgtgagctgtgtcgttgctgccacactgccagcagacatgttgtcctttgagtgttgatgaggaagtgacctgctggtggtccgcatcattctcacacccttggtaatgagggatgcacagaggtgatgggcgtgcagagtgggtcctctggtgcccacgtggctctgctaaaagtcagttaaatttgtggacatcctcaacaaccaagatacagtcacatgtgtctttactgtgccagggaagctacaatagtctgcctagaagcagttacgtgggatggtggagaaataggagaaacagttgctcaacacagtaggataaagacactttgtaccctaacaacagggtgggggtgggggatgggctacttctgggcccaactcctctgatagagctatgttccttttttttttttcttacttataatatatttttcctatacctgttttttattgctctccatgggtgtccttatagctttcaaatattggctgttaatattgaaaataaaggcaggccctcggcgggcgggcgctggagaggctgcgttttgcatgtgcttggattccgggctttgcttttccctctccgggctttgcttttccctctcagtgctctctgttgtgcatgcgcgggctctgggaagagagagtttggaggaagcgcttcctctgaatgactcttgaagggtttagtggtccatttagctacataaagattctttgaatgtacagaagaaggggacttggccagagcctgtgacttgactactgaagcctgaattagccggagcagtgtgactgccgctaatgtagtttctaggaacacgtttggttcattgctcccttccccacccccactgttaaatttagcagaaatgaaaatgttgtttttcaatcgagtgaagatagcattttattttaaaccagaaaataaacatactactctcatttttaaaaactacacaaaatactaagaacacaggccatgcattttttgctagctcctgtaattatcattaacagtagtagttaatatttatttagcaccttcctcctgaggaacttattttctcaattataatcttacagagttagggtgttttcacccaagaaacacttattcagtcagcagactcaggtcaactaatatatcttcgcattgtgctctctgtcaagcttctcgagaggggtcccaagtaaaagcaactctgtaagccagcctaaaactggggccaaacgcatctgacatcaggtgtcttcacagcggctgtgggaacgaagttcctagattctagtcttttcctatcttgttccttctttccctttagagcacttacgtgctatgatttagtttgattcaaaacactggaaaatcagaccttgttttggctcatgcctgccagagaggctacacaaacatgcgtgtgcatttcaagtgtgtaaatcgcaaaagaagctttgagcccctttagtgctggtggggaagaaagaagcaccctgggtgatcatgctggctctgcctccgagcctgtcttgctaagtctcttattgtcaggacacgttagagatgaggtgcatgtgcccacccttctgtcccaaagctgcccttgtcttctcagagccattaacaacgattcaagtccccagacgttccctgctttggggtggccacctcagtccctctgctgtgggccttcctctctagttcaaagtaggagaaccatcaggcagcttggagagcaagtgctgccccactgcgctgtaagctacatgcaggatgtccctggtgggggcatctactctgcagtgagcttcagtggactggaaagcaatgacctgctacaactttggtttctgcaggaaaggagagtgtgtcctcccctcccccagtacaccaccaaatagcagtggaaggtaaggaggccctgagcagaagtgggtagaagagggagacttctctagagatattttttgaagtctttctgaaggagagtattacagaggagtgtattttgctatggtagacttggctttcatgttatctctgggaggaaggggcaaagaggaccgcaggctgacagtgctgttggcattggtgctaaaatgtccttactgtgtcggagtgcttgggaaaaataggaaaatgggtacaatgcagtgtcccgtctctggctgtgtaatgatgcttgccgggctagcctgggcctagccagagtactcctggtatcagtggatgtcagagagaaccaggcagcttcctcgctggcttctcctcacctgtgtgcctttagctctgaaatgttagataaggaaaagctatgaattacggaaagttaggatcgcaacgcccttaaatattcaatagagtatggttttattttattttattttactttatttttagtcctgaactatagtggagcaatgtagttcgcttcccagtggtctgccttccctgtttgggtagatggtggcagttttctcctttgtgcccttactgttgatccatctaattcccatcctgctgatttgacctgattgaaatatgggttggtaacatgacctctcctgtgtcagccaccctggcaggtcagagaagacaattgtgagcctagagagtaggatagtgagtgccagggtgaccctctgtggagtgtaaacatggtacaagtagttgaatgtgcgtctagcagcccggcactaccataccatagaggctccggttggcatcagcatcgtagggtagaactaggctcaccctctgtgctgtactgcaaggcccagcagtgccatgtagcttaagcggcctgtgtcggtgtcgggcttcagtgaaaagacagcatcttagctgactgcacttcttttccaggttccacatcttaattgagtccacaaaacaatgtgtagattttcagtcttaattcttgacgacatgacaaacatctttgcttcagaatatattattgttaaagatttagttctttcaggaaaattttctgttgttttcccaggtgaacttatgaatgatgctctttagaaaatgactaacactatagcaactctaaagacaaggtcctgatattactggcttaaaatgacccagggactacaccatgcagagcagatgtttacagggaagttggttaagacctgccagatgccatgggaggccatgcagctctgggcctgacactccaacacgcacacatgggctctcaggcaaggtatctggttctggacgacagtgcctggcgtttgattgttgaatgccaagatgtcccacgtattcaaaacataaaatcagattagtccttgcaatctttcctagttttctttgctattctttctttaaaatgtagcacttggggataaagaaatggctcagcagttaagagcactggctgcccttccaatggacctgggttcaattcccagcgcctgtgtggtagctcacaactgtctataattcagtatctgagaccttaacacagacatacattcagggaaagtacaatgcacacaaaatagataaacaggtaggtaggtaggtaggtaggtagatagagagatagctattttttaaaaatctagtacttacagtatcagcaagaatcttttctacagtagctataccttttaaggcaacaacgaataggactgttttctgggtgttttatgtaatgactttcatagaactcaatgctagtagtttttgttcacatcctgtgtcatttctagtgagccaccacgtggttgctagaaattgaactcaggacctctagaagagcagtctgtgctcttaaccgctgaagccatctctccagcctctatgttttctagtacacccaagctttttaggttgccctagtgggtgagcaggtcacctggtcccagcgcaggtgtcagggcgtgcattagaggagagtcttggtgtgctggtgtgttaccttctactcagtgtgtcccaactgctttctcactagtttattctgctgtctgcagtttattatgcagtttatgctgttagatacctttgggcagtaggacttaaattttatttttgtcttattttgtagggctgattttactttctcatttactgcattttatgctgctttaattaatcttttaaaaaaatttgtgtcccctcccctgcccctaagacaaagtttctctgtataacagccctggctagcctggaacttgctttgtagaccaggctagccttgaactcacagagatcttcctgcttctgcctccaaaatgctggtcgtaaaaccgtgtgccctcatacctggcttacttttgtgctttttaaaaataattttcatgtggcttacgaaatgggtttcattatgtaattttcacagatgcacattattgtatttgtcttgtatctgtcctgattcttctcacatccactcttttcctcaaacagcacccctcttctgaatatctagggtgtatgtgttcgcacacgcgtgcttgtatatgtgcatagtgcatggatctagatttcccgtaagagagaaaacatgaagcacttgtctgtgtgcctgcagcttattttgtttaacatgggtgttatttagttccattaactttttctgaaaacggcataatttcatccttatggccagataccattccactgtgtgatacacacacacaaacacacacacacacacacacacacacacacacacacacacacacacacacacacatatacacacacacatacaccacacactcgcttgagagcacctgggatggttccatgtcttggctattataaagagtgctgcggtaaatatggatgtgcccgtttctctgtggtgcaccgacttagatttgtccaggagtggcagaactgagttatatggaagttctatttttagtctcttgaggaacctgtacactgatttccacattacattctcacccagagtgattagggttcccctctgcccgagttctctccagcatttgttaatgttgctatttatgatgacagccacttgaggagagatgggaatctcagcacagtcataatttgcatttccctgataggtgaaggctagggaacccttttcacgtagttagtagtcagccatatgcagttcttttgggaattttttcttccattcgttcacccatctgagtggatggttgtttggggttatatattaaagaagttaacaacctctgtctgacgcacagttggtgaagattttctcccattctgttggctgtctctttgctatataggaatttttaattgtatttgttctcatttgtcagattttggaattgtcttacactgttggggtccttgtcaaagaaagcacccttgtgtatacctgcgtcttgttttgactctgttgtttcagtttcagcactgaaaataaaacaatggttctttacctgtgggtcttgaccccttcataggggccacctatcagatatcctggagatcagatatttatattactgttcacaacagtaacaaaattacagttataaagtagcaacaaagatagccaccacaacccgaggagccatcttaaagactcacagtgttaacaaggtcgagaacccctgcagtaaggtccttgatacattttgaattgggattttctagggtggctatcccatgttcccagcaccacgtgctgacaaggctgtcttttccgagtatgtctttgagactgtagctgtgtgagttcatcactgggttctccgttccattcccctggtttagatgtgtatttgtgccttcctgttgttgttgttgccactgtggccctgtagcacattttgggatcaggtattcccttttctgccctggattgcttggggtggggggtgcacactcgtgctcatacacgtgcgtttccatgtgatttttgagattcctgtttcttttctgtgaagaatgtcgttggaattttatagggattgctttcagtaatatagacattgtcacaagcctcaattctcgcagtcaaagcgtgtggggtcttctagtgtctcgttcaccatcttcaccatcgaaaaattacctaactacactgggtggttttattcttagttacattttttatttttaattaaaaaagttcttgctgggcgtggtggcacacacctttaatcccagcacttgggaggctgaagcaggcagatctctgagttcaaggccagcctggtacgcagaaactctatctggaaaaaaaataataaaacaaaacaaaagtatttttaaagctatcttgatttctccactctagttctttctgggcaaatttgttgtcaacccacggaaaagctactggtattgggatgctaattttgcatcctgttactttgttgaaagtgtcaagagtgagcgcgttagagcctgtggtctttaggcgctctgaaggaccagctcatatcaggggcaagtagaggagacttgacttcgtcttccctcgcttttgtatcactcgatactttatggctctacctgagacttagataccaattccaaacacacacacacacacacacacacacacacacacacaagaatggaaagacgtccagatccaggcaggttgcacatgcctttaattctaacacataggagacagaggcaggtggatcaccccaagcaccaggctagccagcactacatagtgagacacccccacacaccccactgctaccaaataaaagaaagagacacttttgggtttccctatttagtagagcattagctgtagatttttcataaagcttttattataccaaagtaaatttcttctgttgctagtttctgtggtgtgttgttttttttttttttaaatctgttactttttattttcactatttaaaaaccaagtagtaagggctcagagggcttctgatttttgaaactagatgcacttttcatcaacgttgagccctgctgtccaccaagtatactgtgttctgttatgccagcctgaatctttagaattgtaatactctgttatgccagcctgaatctttagaattgtaatacctctgacccacatcctatgtggcagttcttattggttaacatcagtaaattgaaaagtctgttgttgttggatgcattacttcacacctaatccaagctgtctgggaggttgaacaggaagactgctacacgttcaagtctagcctagcctactaagattatgcttgctatgcaagtatagggacctgaatttgaatagccagtagctatatgaaagctgggtgtggtggcatgggtttgtaattgttgctctggggaagcaaaaccaggttgagcttgctgtgcagtcagcctagccaatagctgagctccaggtctgggagagactggacagggaccgactcatggtccgctcatgcgcacacgcccctccagcatatcagttcgaagaatctgtctcagtgccctttttaaagaagatggtgtaatattttggagaagcttgaatcctaataatgttcctgattaatcgtcctgacctaagtttcaaggttgatttctcccactgtaacgagagtcctcattaacttactttatccttggggcctgccaggtcactagctcccgcccactgccagtcacctttattaactgactcactcctcatcacatttggtttcatgatatgggtcctttttaaagtttcttctgagaatgaagatctgtaggttgacactaatgactatttaactgcattctgttttgtcgtaaatcaggctagcccaggctttctaataagctctggctctttggataaagccttgtttagaaagcctgcaatttctcacacaagagttggtcagctctgatccaccagccccatcttaggcaatggcttccactctgtgtttttggtgtgttatgtcttcagctaaataggggtccttccagaagtgaactcccgaggacatacctgacaacagtgcagctctgaacgtggagtttgtgattgcacctaagcattctcctccaggtggtgcacggcgctgggataaccatggaactaatgagctgtggggctggccgctgtgagtctgctcctataataaggtgtgaaacacgaggcttcaggagcaacagtggcctttcaaatttccagggtgtcactggatttatgtttgatttccaggactcactagaacgagtagaacctctgtatctaagtctgtggggcaggatagatagatcagtatttgtatttctctcgtattgctgattaaggaagataggaggaggttggatttttgacttggggataaaatttataaatggtaatttattgtattgattttgaaaacttccctgtttccctcaagtttattatcacctcatttcacactgtcatcctttggggnnnnnnnnnnnnnnnnnnnnnnnnnnnnnnnnnnnnnnnnnnnnnnnnnnnnnnnnnnnnnnnnnnnnnnnnnnnnnnnnnnnnnnnnnnnnnnnnnnnnnnnnnnnnnnnnnnnnnnnnnnnnnnnnnnnnnnnnnnnnnnnnnnnnnnnnnnnnnnnnnnnnnnnnnnnnnnnnnnnnnnnnnnnnnnnnnnnnnnnnnnnnnnnnnnnnnnnnnnnnnnnnnnnnnnnnnnnnnnnnnnnnnnnnnnnnnnnnnnnnnnnnnnnnnnnnnnnnnnnnnnnnnnnnnnnnnnnnnnnnnnnnnnnnnnnnnnnnnnnnnnnnnnnnnnnnnnnnnnnnnnnnnnnnnnnnnnnnnnnnnnnnnnnnnnnnnnnnnnngcagaggtgggcagatctcttgaatttgaggctagcctggtctacagtccaggacaaccaggactacctagaaaaaccctgtcttggaactcttccccccccccccacacacacacacacacatacacacaaaagaactttgtacttgctattaaattgtttaaataggaaaagaaacataagcagcctataagcccatcttaagcaggcagtaggaattcagagatagttccttttagctcacaagatcgttgatgaaagatacacagtgctttgattttaatacaacccagtaatgttgacatccatttttttagtgttttaagtatttacatgttgtgtgacacctaagtaggaatttgtaatcatacctgatctagactgctgtgtcgttctgaaaatgtttcttggaactcattccaagatctgtcagctaagccttgcagaggagcaggtaggcttcaagggagcagaggccacattgcatttgcctgccgagcatggctgtgaggagcagaaagaagcgaatgttgtgacttgtataggttggaaggagtggcaccccagtactgagatttgcagacatcacacactggggatttaatttaaggactacttcctgagattttagtaacctgcggagaggagatggcattggtgatctggctccatcaggatgctgagcagagtaagagctaacagtggggcctgtgcgtggctagctttcctcgaggtcctgcttttagaccaaggttctgagaaggcatcgttgcaactgttggaagtacaccagagctctggatctgcaccacgcagcctccagtgtcatagtgctggcttagggagtgcctaacagtattctcatccctacaaccagcgcagatgtcctgtttgcatattccagctttgaacacagtttggaagaagaacgagtatatggctgtgtttggagtctggcagtataagaacagtttgaaccttacagatataaacaggatggtaggtggactctgctcttttcccactggtctcatgctggggacccttgccttggggcgagagtgaagtgacaggcagtgactgttgtcatttaggttggtatggcaggtgcttggctgaagcagtggtagtggcagggtgaacgtgccgtgtgttctttcagctagtgactaacgctatcatcggtgttccttctgtgaacgctctttaagtgagctgatactcgaagcttgtggattttctccatgtgttccgccactgaattggcactggtgggtgtgggtctgggtcgcagagagagagcatgcactgcacagatgtgctgcttgtcttccaggggtgtgcagagagtgaccatctctgtccaacgctgtctcctttcttgtcttttctcattcaaacccacagaaatactgagcggtgcagatcttgccctcatgggatagatgagggaatgaaggtgcagggaaactagatgtgatttatccagagtcccagttggagctgtggcggttagagctcaggctgactcctgtctggtggaaaccagcattctgtagtacttcaggtagaagaaaaaaattgacttgtgttttacgtaggtcaaaacagtttgaatattacacttcataggagtccagattggcttattccaaaatcataatgatgtgatgtaagtgattgaatattgtcctggtttataaagtgtctgggtggccactgaagaccccttagtctttttctgacttcttagggtgcttgattgtatactggtgggtgggagaacctagctgtgcctcagcaggaatgtcgtgagctctaatgagtttgcctcttgcagtaatcagaactgaaagtgcttgcctgggctgggaggtttttgtctaagcatttggagaggccctgcctgtctgacttccagccatcttggaggttctgtacagtgcatccttggatggagcagatggaaagtcattagtgtttctgtcccccagcaaatagatgtttcctcaaacctggctctgggcactaagcagacaggcagcctttgctcctgcagggtgccgcttgcacagcccgaaaccccacaaacttgaactccatcctccgcgctgcttgatcgaggtcaccatggaaaacatgcaccgccgctcagtttacctggcagtggttcagctctttgacagacctacctctgatttaaacaaattcgagaaatatgtaaagttttggaagcagttttgcactgatttgataaaagaaaccacaaaacactgcagcgcaggtgttgagagtgtttgaaagctgattgagggaagcagatggctttagtcagtggcatccagccaaaagagcaggtgctggtcacgtgaccgctggttaccagggtaatctgattgctcttggcgtgcagatgaaaggaaaggggcccagtgttcagctgtagtattgtataatttgtggcagttagagcggaaataaatgctggaaatggagcctcatggtaggggagacttctgtcagtgtgtagcgtaaacaccaggacactctcctcaggaactgctgcatgaattttttaatttaaaaaatattctgctgtctgtggatttctctgacttagtcacaccacctctttttattttttaattttttgtaaataaaatcaatttttgaaatgtaactgctatttgtgatcatcttgaattgttttcagttgtttcctgatgtagctgtttgctatgctaaaatgctcatgtatcaaaataagctctgagtatgtaaaaaacaacaggtttaagatgatcaaaaacatattagtggagaacgctgccctaggtgtgtgccggaaacgctattgacacactttggaagggtttaacgtgacacatctgtacttagaatcattagctgctgcagcctcttcctagtggctcaacaacatctttcttagggcctctcttggtgagcttctctgggactttataacatttaataaatgtggggttttgaaatatgtatctttagtttttcaagctacttagagcttgaggcaccctagaaatagtaaaaaaaacaaaacaaaacagaaggctggtattcggatcatacattttctgtgttgtatatataacaaacagtcatttgatggtaagaagtcttgggtgcagagtgtagatgaaagggaacactgagtgtttgctctaaaagtactgtgaggaacggttttgggggtggggataacccaagaattttatttttcctgtgttttggtttaccattcaactcctggtgtttctcaggaacatggaaagcgagcttcagttattggtgagaaacaagcacacgcttataatttcaaagacttagcttttggtagaaatgctaattgtggggctggtggtggcctcagtggtagagagagctcttgtccagcatgtccagttgctagcactggaggaaatgaaggccaagtgtggctatccctccaaaatgcttagcaccaaaaggaaacttactcatagacaagaacaccgaattaaataaaattatgtatttctaggaaattaatttttagtaaaaatgtaccggtcaccattggacttaaaaaatgactgtgtgaaactctgtgccagagaaataagggtatagtcattagatggtatttttcccccctttggttaaaagaattggtcttcacccgactttttagcaaagagacatcctaggttttttgtcacagctttgtatgtcagcaggggctgggggtagaattctgtgaagtgttcaaagttctacatccagttctgtttcaatgggtgagaaatttgctgaaggtcatcaattataagttttgttgtcaaaccttaattaggagtaccatttaatgaaaagcgcccaagacccatcgacctggcctttgccaccactctttattaacagaaagagaaggtttggggcatgtgggaaaccacaccgaaggtgtacgctaagtgatgtactttgaattctagtaataagaaaccggattcagaagcaagtgctttgaagaagaaggtcaacaaaggaaaaacagaaggttctgaaaattcagacttggacaaaacacccccaccgtcccccgctcctgaagaggacgaagacccaggtgtccaggtaacaccattattcccttcggggctccagctggggagtggggtaactttagccacatgtaaagcacgccaggtctctccaggctttgtttgtcaggtgtgtgtgtgatggccttattgttgtctggaacattatatccacagtgaagagagccagagcccacagaaacccagcttactctagggccttctgagctttgagattactaaagcaaagagctgccctttatttccacaaatgtatgttttaatggttatgctgttttaagcatttttagcgttgctattatatcgcttcatttaaagtatcattcacatttaaatttttttctaaattttttttggtcaatttttatttgatttctccctctccctcgagtgtgtgtgtgtgtgtgtgcgcgcgcacatgtgcacgtgtgtacattcatgtggaggcaagaggccaccctcaggtgtcattcttttaggagctaaccaccctgtgtttttgagacaggctccctcactgatttggattagtgaagcatgctagccttggctggcctgtgagccccagagatcttgtctccactccctaatgctggaattgtgagcatgtccttttatgccttgctttctgttcaaaggagcaaggctgaggcctcttgcttgcaaggaaagcactttcctgactgagccacccatcttgcccttgttaattttttttttttttaataaaaaccaaaacatactttgtagcttatttatagcacatggttggagatgtgatatattcatgatagaattttgatcaataagtcagtggtatcccagatggtaactggttcagtgttagattctcctgaggtctaaaagtgagtagtaggaattcgggttcttgtgtatgaagcttgctgccttcactatttggactgacagaggtctcaaaagtatgcatgacagttgtgagttatttccttgataggttccgtggatgcatgccagtctggtcctttgggatggctgggaatgtggcttgtgcaagtgacatctgaattatcagggagtgggtcccattggaataggcagccagcccttagggaccagttgggcttcctcttacctgtaatatatcctcagatcttcctacccaaggcccaagggtctgtaatatgtggccccctgcagagaacttcagcttgaatactgcattcttcttgagtagaacatcctggaagaaggttctaagaaggtagaatggttgaagatggttgtgacccaccacgtgggtgcagggaatcaaaccttggtcctccgcaagagcaacaagtgctctcaacaaccgtgctgaatcttctcttaaaagttggttaaggagtttggaactaagaatgtataatgaaattcattgtatccttgaggttgttttgtcttaatgtgctcttttgggactttacaacaaaaatatttggataatattaagaattgttctcacaggcctgatgtggtggcacatgcctttagtcccagcacttgccagtttgaggccagccaaagttaccaaaggagaccctgcctcaaaacaaaagaattatttcccgttctgactaatgaactactgtttggggtgggatttcctccgggattccccccgccccccattttcccttttctttccactcttttccttgccttgtgtccactttccaccctgtattttaggtacggaaaagcacttagcagttcaggccaagctccgtgcttccatctaattgtctcagtaacagttctgcattcaacagccaaagtcaggcggccacagaaactgcctagaaagctgtcttcctggtgcctgctacaggaagtgatgacgcaggctgcgtgtttgttacacttcttcctgtggtgcatctgtgaggggcttgagggaaaagttccaatgctctggttgctcatcaagagttaatgacatgttaactctaactgactctttcacaaggtgcggccacagcaaggccacattttcattttctcctcaggacacactgattttaaccaaaagtatctttataaagcaggttaaatggaatcgttctcaggctatgaggtaccgtcctgaggccgtgtgggtcttgccccaagagatcacagtgtctgtcatgtcttcttcatttgtatgatgaatattttacgtcctcccatcttaatgctggcctgcacaattgatgaatctttaagaagcagcagttcgtaattcttagaaaaatgtttgtgtcctgtattcctcggtggcgtcattatcctttcattatttattcctattttttgctctctatttctttaaaaagaaatttatttctttaaaaaggattttcttttagggctgaaattacagtgttctacccctacccccactcattctctctcttcattcagagagaaccttatacctagtaacactttttatttcttcaggttgtccctgttagcggaagcacacacaggtagcttctccaggagtatttctggagcggtagagaagtaaagcgctatgcattgcgcctaagcagcagattctcttcctcttcagagggctcttgatcgtctgcccatccagatagagaaacagtttgcatttgtcttaagtagagtcataagtgacttttgcagtcacgtgatttgctttcattcatcaatttaccatggacagatttccaaatatatcacgtagcttaccggaagtggcgctggtaggtcataggcttcacacatctatgtcgtcctgcacaggctgtgccgggttgtgcttgaccacaaacatgaacattcgccagcagtcgtactgactaccaggctttgacatttgcagcagcatggtaaaaagttgtattaaaactagaactgccaggcagagtggcacacaactttaatccaagcatttgggagacagagacaggcagacctcttgggggttggagcctagcttggttgtgaatttcaggccagccctggctacatagtgagaatctgtccccagataaacaaacaaacaacgccaccctacttaccaaagctactcattatgagatgtgcgtgtggttcccacttctccctccttctccaggactaggaattgacctggggctctgtgcattcttcgtaagtgcttagcactgaggcggacatctccagccccgaactgtttctttcaggccccagagtaaagtgcattggaataccttgagaaataacaatataacaatgtttgtattaacctttatagcctgtagattattttctaatgcactgttgttggtgggctctctacattatacttttcagtcatagagaaataagagcagagtgtgctagactgccataggtccactgtgcacctccggtattgccactgcccgcaatggagatggccaagtgagggacaaggtttgctgtacccgtgtgttcttgttgaagggactgctgtttggagcagcagcattacaaggtcctaggaccccatatctccagataattgctgtggttgtcacaatgtcttttcactcggcattctagatgaaaattgccagttttcctttaagatttagaaaaggaaaggaggaaggaaagcagtcttactactgtgtaccgtgttacagagccccaaagcctgccctttaacactcacactgttgggcttctgttgtagaagaggcggtccagcaggcaggtgaagaggaagcgatacactgaagatttggagttcaagatttctgatgaggaggcagatgatgcagatgctgctggaagagactccccatccaacacctcgcagtcagagcagcaggtcggcagccaggcttgcgccgtttcatgtgtgctttcagggtggactgggaacttatgcctggaagccaagcagttcagtggcagaggtggacttggggcaggggaatgttctgctgatgttggctgacatgtcgtgggaaattcattgttcagtagtatcttaaaaagccctacttgctcaaattcatttttatacaaggcaatgatatgtaatgtgccagaggtttggagaattaaatgtctctgctgaggaagagtctgagctagactatgaacctctgagaattcagtgctgtagctcccggaaccataataaaccactcgagctcatctcctgctgcttggcaccgtcagaacccctttataaaattactgccttggagtacccagcagggcacactgtattttctgtgcaatgtaaatgatggataaaatagtttgtatgtagctcgggcagtaacagaattgattattgcaaagattttatttattcttttttttttgctcttactgtactttagttaacaaactggctgccagttgaaaggccctattaaatgcagcttggtgtttagctggcaatcggatctctattaaattgttgtacacagcctccgtaggacagagctgcctacagtagcagggcagagggagcattcagtccgtgaatatcggtgcagggaagttgctcctgaccggctgtcgcgcacaggttacttttccttagcagccagggaggatgcgttgtggcttgagggactgtgcttctctccgtaattaaccacacagtcaggaagtcataagcacagcccttcctttgccttgctgtatgtagtgtgaggtttttcttgtttttagtaatttttcccactgttaactttgggccctgtggttgaaagggcaggaggcatgggcagaggggagtggtgctttcccactcgcgcttgcagcacaggtcagatggcttgccagtgggatcggctgataccactttctctttttcaggaatctgttgatgcagaaggcccagtggtggagaagattatgagcagccgcctagtgaaaaagcaggtgagcggcgccctgtgcaaagatgaggatcccatggggtgatcgtccaggtggtttgctgcatactgccctgttaagatgccactatggcgcggggtatggtggtgggtgcggaggatcaggagttccaggtcagctgtttcttcatgtgaccatgtctcaaaaaagtaacagcaaaaagacaaacaaataaaactaaagaaaagcccaatggctacattatcataagatgaagtgtctgtcgggtgatacttcgcatccccttggtgattgattgctctggaatgaaatcaaaactccattaagcaatgaccttaagatgtatcaacctttgtaaccctatttggagaagtcaagaaactcaaaagaaatgtttaagacttccagaggtacagacaaccttttccatagaaaatgctcccaagaagaccttgctcgggagctcccaatgccctcatcaggctcggtctgttactggggcaagcagacgttgtatcacgctgcttacaactttttgcataaataacttaatatgttgaaagtatctttattaccgatacagttcatattgataagcaaaagtgcctgccagtggcagcaggtaagctcgtggcccaggcgcgttagaaagaagaactccattatgttctctaagcactgggaattctctgctccgagtcagttgccttcctgcccagattgggaaatgctgagcttgtatctccagaaagtaggtactgtggatatacgtcagccaggcaagcctgagtagttcttcatagcttttgaaatgtagagcaaatgtgatttcttttagtaaaatgaatgcaaggtatagtttcccagtggccaagagaatcatggaacttagatgctgtcctaaagtttatcaactatcagacaagggaaaataaagacagacagacagacagacagacagacaagcacgctaccagcaacaaaatactggtgagcacaggcacttaacacaattgtttctgttaatgtatcatcggttggggctgaagaggtgactgagaagtcaggagcacttcctgcttccagaggacatgagttcagttcccagcaccctttttgaatgtttcaaaatgacctgtaacgtaacgccaactccaaatgatccaatgccctctcttgacctgcagtcatatatgtgcacgcacacatacataaaaatagaacttgtattttttaaactgagagcttattgagatacccctgcaccaacagtaggcttgcatgtccctcttttctcacatactcaggatttgcacacttattaccatatacactacatgctcctataaaaactatccggagcaacaagtcaacgtacttcaaatcgggtgttgaggtggagtgtggaggatgcagttggtaactgagtttgtagcttcatgccctaatggatcaaatgataaaaaccaaggcaggtttgtcacgtgttggaacagacacgagcactacttagctcgttacaaaggctgccttttcctaatgtctctagaactgttagtttgtgagtacagatatatggtaaaatgtaaatagttggcatgcttcaaagagtggtccccttcactggactggcgctacttgaggaagatagctgtgttcttggaatgggatgcactcatgtctgttgaacttgtagtacttcggcaggcatacttagcaggcttagagctgagattataattaactctattctccatagctagtgagattgtacctgatgcggacatggcttttctttctgttttgcctgcttcaaagaacttagtttttccccctctgcccacctttactggcaggtacctatggattacaaattgatattacagccccgtgtggctcgctgtaaggcattagatgtcattgcagatgtatatgaagatggaacatttattgaaatggctctcaacctccctaattcgtgaccctttaacacagctccttatgttatggtgaccccccccaccagaaaatttttttcattactacttataactgtaatcttgttactgttatgaattgaaatgtaaatatctgataagcagggtgtctgatacgtgacccctgcaagaaggttgttcaagcctcaaaggggtcatgacctgggttgagaaccactgatttattggcttggtgaatgtgggaatggagaaaattggtaggaaaagttctctggaagacaggaactgtctgaatgtaaggattgtagagagcccacagatgctcatccgctgccgccgctcagaggctgctaaaactccatcagaagagacagaccattaacagccactaactttttaaactgcaaatgttctcaacattcgttgctttaatttataattgctataagtttatcattttaaaaaatgataacaggggacaatattgcacgtggaaagaaaaagaaatttgatattttcctgtggactctagctgtgcttcctcttactatgaataatttaagaattgtctcccagggagagccacctcagcttcacacaccatgacagtgggcgtggcttggcatttaaatattgtcctaaacacaagttaatgtccccaagacccaggagaggggtcttgtatatgaacattgaggtatgtttgaatgtgtgtgtagatatttagagtgcataggtgttttgttttccatatttagttatagcacttcctatatgccatctatctatagaaaataatccaagcccttttccttttagaatcataaggtcagaagttatcttagagtcagaatctgggtgtactatatacacaggagagatactatcccctaacatttatttttctttatttaacatatgttttctccataaggagttatattagattccaggataattgaacataacaataaaaaatagaacattttataaagttaaagtcttaactatagtctccagaatatctttattttctcactcagtactctgtaactcactatctctgtttgagtatgaaatatattagaccagaagcagtttattattcttctctgtatactttttcattttttgttcattatttgtatagttttgagtagaagagctgtctaatttagcaaggctattctttccttgagggtgcaggttatcatgtgctaacggctgtttcaggccacgttagagaactaggcttggctccttggtcacatgaacagtgagacaaatatgttaatatagccaaaacatcaggtttcctgtaacctgttaagattcctttacattcattcctggggaaggaaaagaatacccattttcaaatgtctattgaactcatgaaaatactcagagcactgtcaggttagacagtagctggccaaggagtgatctcagtgtttgtgtgtgtgcgtatgtgaagctgtgcgttatcaccctatcattcattgagtctgcagagtatggaagtttctgcacactggtactgtgggctgctggaggatggacaaaggagatgtctttagtgaattcttgtagagagtcatgactcagcattctctccgggaagcatgtgcacacttacgtgaaatgtagttagcagctggagttgaagctccacagaagaacatggccatgttttatgtgtagccagttaaacagaagacagcaaacaaaatttttgtttacttggggacatggcacacgcctttaatcccagcactcgggaggcagaggcaggtggatttctgagttcgaggccggcctgctctacaaagtgagttccaggacaggacaggagggctatacagagaaactctgtctcaaaaaaaaaaaaaaaaaagcaaagctgtgttatggttaggacctttcataagcccactagagtaaaatgagatgttcgtacgtattggccatattctagaatatctaggctttgcactggtgagaagcagtttaaaatgcacatttaattgaaactgataaaaggttggagggaattctaaaaggtctttaactgtggtttgagtgttatgtatggaagccagccggagtgcccttataagacatgtgccctctgtcatcctccacgctggctctcctgtttggccccaaccatgttcctgttcaccctcattttcttcaaagatctatgagaccacccagcacccatgtgtgagcctccaggcaagctcaccagctctcgtaggagcagaaaagaacttcctgacacgtgggtaaaggctgtttatggtttacatctttgctttatctgctcaaacattgtaagaaaatgacatattatgaatcctttcacactccaaaagcaaaagccaaaaggaaaagagaggttctaaaccatagcattgatgttgtcttcggtactttctggaagcactctgaccaccgaaagctcttgactcggcggacatgcatcgcaattttaacccaccgaaatgtgggattggaagtgttaattttatttggctgccatgtgtgtgagacatcttgtctgaaagactttaattgttccactgagtaaaactcaaaccatgagtagtgatgccccgagtcccaccataagagcaaggtttccttttatatggtttcttgtttagagttattaactatatggagaaataaatgtcttttaaatattttaaaacattacaaaacccacaatgtaaagttgccatgaggcagccaaaaataatacatatggcattcaggagagcagttgctaattggctgctgcctgagaaaatggtacacttggcgtctacttaacactgcgggtttggcagccagccaggcttggggtcaggttgttgtgaatgaagctgcatgtggttagggaggggttaaaatgattcatgccatacaatcacaagcgcgttgagtggagcagcgtgcatgtgcctgagtacgtcagtccccacggcacaggctgcccaggcttcctgtgcgctcctctttccagtcaggccacctcaggcattgtgtccccctgtgggagtatgtggctgcctttgaaatcgtcggtatatgattttaacgtgtgtacctcaatcttctttcattgcagaaggaatctggcgaggaggtagaagttgaggaattttatgtgaagtacaaaaacttgtaagtaaattgttcctcctttcagcggggaagggtagacctggagtacaggactctttaagaattgtgaacatggagagtttggtatggtttctttgctgcctcagaaaggctgtttcctcctaactttgttatttgtagtactttgcacatgcttttctagaaaatatttagtgtgtagaagttgactaattttcttatataagcaagaagctcatcatagatagaaacatctgatgtgatcatagtgaaataaagtagaagttgactgtcccccaaagagtggctcttgctcttcatggttgcgcctctccctgcatctgtgatgagaactctgtagcccctcagaggccccgaggcccaggatgctctcgggctttgatgcagtgagctctggctttatgtgcattgctttccaatatttgtttagtgggtttagtttagtttagtttagttttaatctgaatggagaaacacagctgccttgagctgtgtcatgggatctgtgtgctcactttggcaagtcagtgtggttttcaggattggtcactaccctcccgaagaagacagaggcccttcctaaccagacacacagctaaggacagacacctttgctgaccacagatctgttctctctgctttgctcctctgaagaagacatatgtaaagcccgggtgaatcagtcctgggttttaaaggatgatttttaggagttgttgtgaaaacagcctaagaaagtacattgccccaggaaaatgtcaccaccgagtgccatgtttctctgcttttgtccctttggtctgcattgtgtaaatacagggtcactcttctgaggaggtaagcaaaacattaagtaaaaagtctctctcagtcttactgtgagagtcagtgaaatgaagtctggcagtataaaataaaatgcacaataaatgttagctgccatcagtattgtgtcctcatggtgagtttatgtctaagcacatcgttcatatgaggtgatttcctgtggggaatccttaacgagagaagctgaataggcaaagagggggtaacctaaatgagttgcagggggatttcccttgggtgtgtcaagtcagatggaggactgagggttaagtgttgattgacatgtaattgcaccaatagatgacaggcatcagagacagagtgggtgggacccaagggttgccatccattcacctgtgggaagctccaaagacagtgtaggaccctgtaccagggactgctgccaagccagaagacttatcaaacaggcaacaagaagtttaagggaggactaagctggtttcctgtgcactattatggagatgaaagagaaattaagctttcaatagaagtttttattaacttgttttgatgctaactcagatttgtaagaacgttgcaaaaattgtagggtggattttttttattgtgattaatctatatctgaaatacttggagattgttaaatatggtaatgtttgctaagttggtggaatacttgggcctttattctctgccctggctaattcatagtcaggggggttcattttattgagatttgaattcttctctctggtagtagtatttattttgctcacgtcactacagatgtagtggtgggaatccctttaagctggctctgtcttttcccttatcctgtttggagctctggtgtcagagtgtgctcccagcttgtcctctgtctgcaagttgtaggatcagtaattagatagagaatgtaggagccaaatgtgggccatgatcttgctcatggctgccaagaagtcactgttggtagacgttgctaggattgtatacacacctgcaaacacatgtacacgtgatctttaggcacatgtagctgtttgttatatatatgtgcttacctctacctatgcctccacttgcctaacaacaaaacagtgccacccaactctcccacagggtaccctctgccctttctcctttcaatgggtagctattcccctcttcaatgatatgaagcttagctcttaccatctggttgttgttgttgttgttggtttggtttggtttggtttggtttggtttggtttggttttggcaaccttaaaatatatagaaaaggaattaagaaatcctagctgagctgctggtggtgcactcctttagtcccagcacttgggaggaagcaggcaaatctacagagtgagttctaggacagccaaggctacacagagaaaccctaatgaaaaaataaataaataaaaagagaagtattagctgagtttttgtttcagtttctttgtttaggatgttttatcctagtttcacagtgttagaggttatataccttactcaaaatccccttagtcccaaggtctccatgactttatgtttacccacacaccactgagttgagcagtgtcagttttcgatttaattttatcttcgacatctcctttgcatttttaagttggtgaaactattacaatgagtcagaagtcggagctgtatacacagatagtcaggtgagaagtgtcccttctgctgtaacctaccattcaatacggacctgcttcttacacttctgactgacgcgagtagcagctatataggtcggcatgtatgtgcacacataggtaggcatgtatgtgcacacagaggtgcacatgcgtttccctgtcttacaaggttgtatagcgttactataccttttgctcttccccctccttcagtactattctggacatcactgtatgagtctttgtggggtgtgtgctgccttttgcttttggtttttacggcttccactacatgattgttgtgcatctcttcactcttccacatctgtgaccttagcaatagcgtcttacattttgtagtgatagacagcgccacagtgatttttctcaggcatgcctatatattttttaaattgttggatatttaccattagggtgaattcctaaaaaaaaaaaaaaaaaaaaaaataggattgctatatgaaggcataatgtaatttaaaaatctcgtacattttcatttgtttgtttgttttgtgtgcacatatgtgagggtacatgcacgtatgccactgcatgtggtagtaatcagaggacagctttgtggagtccgtgggtaccaaggaccaactccagctgcgtagggttgggaggaagcactgtatcccctgagccatcatgatagccccatgctagtgttgagagatgaacactatacctgcatacagaggtgtcctcagccttcccagcatgctgtgctgccttctcagttttggtgacatttattacgttttctcttgactgtaagaacaccatttcataactttatgaccatcttttgctacgtctctgggtatgtatttgcgcatgttcctataactcattgtattggtttgtaagctctttaggcatgagggttatcctctcttgggccagaagccgccagggactgagttcactgtgctgttgtcttctcattttttttttaacttattacagcataaatgttaaaggcgagatggctcagcactcatgtgcaaatctgacaacctgagcttgcaccccagatcccacaaggttgatgagaaaatcaacaccagagagttagtttcttaccaacagtggtgtctgacctccactgtgaaccacctgacccaccccatacccccaatacatttaagagttctgcagttagatttattagtcttttgttggagcgggcttcccagtcattctcccctatattgctgggaaggtagaattagcccacgctttcctctagcttacccatgtttctttctgcttcaaagcacggtgtttggtgttcatgcttgtcaacaacagaggcccatcctgagaaacacaccatcatttaattccctcattgtgtggatggcatggcatgtccttaattagacctagatggttccggtcagtcattcagtatgatgctttgagtcagtcaaaaggtagggtaaagatgagctgtctaatgctgtcgccactgtaccatggcttgtgagtagaagttcactctaaataacgaaaaggattgcataccgaatgcatagctaggaacgtggttgttgttggcattgctattactgtatttaactaactatatgtgctatactttcatgaagttggtagcacagtaagtttctgcttgttaccacaaacacatgggttacgtactgttccgtggcattacaatatttatatcacctgaccatgggaagtttttaggtcctttataagattatgggaccactgtctgcctcatacaaagtctgtcacagagcacaatgttagatggcacacacccacagttaagtctttcctttcacagatatttgagatatacagcttgtgcaatagatctacttatatctatgtatcctctcttctttcttctctcctctgtgtgtgtgtacatgtgtttgcatgtaggcatgtgtatgagtatgcatgtacatgtgggtacatgcatatggaagcattgggagccttcaatcttgttttaccatattcattgactcggggtctcagctggacccagtactcgcctttctagctatccttgtcagagaaggctttgtcttgtgagctccggaattacatgtcagcttccatgcccacctggcatttatgtgggtttgtttttttctttagaaatccaaactcctgagactcatatcttagtgagggtttagttagtaacttagttaggctgtggcagaggtcagcgcctgcactggaggtaggaactgcagcacaagccatgaggaactgtttccctgtgttcctcatgacttgctcagcctgctttctcacagaactgagtgccagcatctcacagtaagccgggccctcccacatcaaccagaagtcaagaaagccacaacagactcttacaggcaatccgatggagacatgttcttaactgaggtttctcgtcccagataactctagcttctgtcagggtgacaaacagcaacactaacagaacaaccccacatcagaccccattcttacttggtatacaagcacatcggttattaaatcatagccctgtccttttcgttcatccctgagatattccagtattaaacattccaactcacactataaaaatgcaaatattttaaaagtttagtatctttaaaatgtccagtctcttaaaagcctctgtaaatgtccattgtctttaaaatagtacaaacgggcttaatggtagactctataagataagaacaatatctatacagttattttttaaaaaggcagagccagggcacagttataatccgatcaaagcaagactgaagcccagcggtgcagtgagttcagcgtcttacacgtgggattcactctagggcagtcgctatgctgtgacccccccaatacgggattcactctagggcggtcactatgctgtgaccccccccccaatacgggattcactctagggcggtcgctatgctgtgaccccccccaatacgggattcactctagggcggtcgctatgctgtgaccccccccaatacgggattcactctagggcggtcgctatgctgtgacccccccccaatacgggattcactctagggcggtcgctatgctgtgaccccccctaatacgggattcactctagggcggtcgctatgctgtgaccaccccccccccaatacgggattcactctagggcggtcgctatgctgtgacccccccctaatacgggattcactctagggcagtcgctatgctgtgaccaccccccccaatacgggattcactctagggcggtcgctatgctgtgacccccccccccaatacgggattcactttagggcggtcgctaatgctgtgacccccccccccccgaatacgggattcactctagggcagtcgctatgctgtgaccccccctaatacgggattcactctagggcggttgctatgctgtgaccccctaatacagctcctcagtctgcagtgaccacccaaccataaaagtaattttgttgctacttcataactataatttagctactgttataaattgcaaatatctgatatgaaaagatggtcttggggaggggacccttgtgagcaggtcatgggttcgtaacccacaggtcaagacctactaatttatgatcttctgggctctataggggctaagcagattttcgtctgactatgccatctggagtacacccagcttgtctcagagacgcagcctggctccactccatacctgttgctgtccttggtagtcagcccatgacaccgacatctccaaaatgctaagatctgtaatataactgtgtgctctcatcagtggctttccttaggctctcaaggactctgaccctgccacacggtgccaaagcctcaatttagctccacgatcccttcagtactgcggcttcttctgctattgaggctgcaccttcactcgtgtccttttctggcttctcacaacgctcagccactctccatgacccctttatgctttctaaactgtcaccacatgcgagactcttacacacaagtatcacatctagccttggccccctctgggccacacagcttctgcgtgctgaccttgaggaagcagttccaagaagacttcagctcagtgtggctggactcttctttatcacagctaacccgtcagccccaaccgaccagaactacagattcttaattcaaataccaaatagtgcaataatgtttaatgggctctcaaacctcccactgaaatttcacaagcctggcctccatcatctgcatagctttcagcggtcttatcttccaggctcccatagaacggctccgtgaactcttgagcacttggtggtctctccatctcagaatgcacctattaccacactcctcttataaaccacatggccaggtctgtcacagcctgtcaccccacagcctggtgcctgcatctgtcttagttaaggcttttgttgcaatggtaaaataccatgaccaaaaagcgacttagcaaaacagccattactgaggggagccaaggcagcactacagaggcaggagctgatgcagaggccatggagggatgctgcttactggcttgctcctcttggcttgctcagcctgctttcttatagcacccaggaccacccaaccatagatggcattgcccaaaggtcagtcttttggaagtattttcctaactgagattccctcttcccaaatgactctagattgtgttaagttgacaaaaaaccaaaacagacaaaagcagaagagcttgcatgttgagttaacacactaattagaagagggctgaggcctggaagacctcctgtggtcagtttctctctctgtgtctcagcaccagcttcctcaggagctgtctagtatattttaatatctggtatgtttcctagatgctccctgtttttaatgtttctgtgggtcttgttgcatatttatttttatacaagcagtcttctgtgaacttgtgtagttccacgattatgcttacttatattttctctacactgaattacacttacaaatttataatttagaatattgactttgtactgtatagaaagccgacaatccttttagttggttcagctctatgtttgtgactttttaagagtgtgtaaacatttcattatgcacatttgtacagtttgtgttaaattcatagctaaatcctttgtctttggtgttgttatgaaagaagttttatgcaagtctaatgccctctcattggctgtttttgtgaatgatgtctacgtattaactccatgtgccaactttactttcttttacattactgaattagttttctgaactgttggtgagttgtgtgtgtgtgtgtgtgtgtgtgtgtgtgtgtgtgcgcgcgcgcgcgcgtgcgcgggagtaatcatttagtctgcaaatagagatagtttatttaatagcattggtgcctacatgatattgtataatagtgggtatccatatcttccttacccctgacctttgtggaaaagtccctgttgcatctcttgtctgataagacctagcttcatgtctaaagcctacatacttaattatgttcataaaatatcaatcaaatccaagtatcctgaattttttattagatattttctttatatacatttcaaatgctatcccgaaagttccctatgccctcaccccgccctgcttccctacccacccactcccacttcttggccctggcattcccctgtactggggcatataaagtttgcaagaccaagtgatggctgactaggccatcttctgctacatatgcagctagagacacaagctctggggggtactggttagttcatattgttgttccacctatagggttgcagaccccttcagctccttgggtgctttctctggcttctccattgggggccctgtgttccgtcttatagatgattgtgaacatccacttctgtatttgccaggcactggcatagcctcatatgagacagctaagtatcctgaattttaaaacagcttctgtaagcgttaaatttcaagcaatgttgagcaccaataggaataattgtgtgacttttctccttagacatatatcaacattgtatactttaaaatagatttgctaacactaagctaactctattattactgtagtaaatcttactttcttgttgttgttttttttttttcttccttctccccatctgggggtgggagagactgtctgtcagatgacagcctgcaggagttggttctttcctttcacagtgtgtgtttcagggattgaactcaggtcatcagaattggtggcaagcatcccttaccactaagccctcttgctggctcatctgctgtcttcttaaagcagtatgggacattttctagcatcttagttagaacctttcactaacatgtggaaataggtggaattaatttcccttttgtaccatctttttcaacattacatataaatattatttaagtcatttcttttagaaaaatgtctggaaaggaaggttcgttttgcaaagtaactgcaagccatgtttttctaaggcttcctgaggttatttaatagtttatttttctcatagttgacccctccatgaacatttgtctcgttttcagtgctagctagtctgtgaggaagagctcttctgctttgttccttaatgaacaagagatggcaggcagcctttgattgtttccttcttctcctccctgcttgagcctccatgagttatcagtgtcgagggagaaagtggagtttctgacggaaaatttcagatagcaggtggcagagcagggccagcctatgccagcccatgtgcttgtgtccagcttggagcctttctggtggcttcatatgtctttgtccccttctctaggcaaaaatgttaactgcccatgtgtttcttctgtcaattaacccggaagtctggagtagattccttgtgttttctgattgtggttatattgcttattatgtactagaattttgtccaagttgaaagcacacagtacagcagttgttaccttactatttatgatagttagttgcttgttgatgcatgcacatttggtctgttttctgagtatatgttgggagttaaatgaattgatatttgtgtgaggcatttctgcttaaaatacttttctctttcacttaactttagtgtttaatccactgtacatttgaaaatacatattaggacataaatatcaatagaaaagggttttgaaagattctgtaatcaccacttaatttatgtgcagcagcatcttgatgctagaagagtcatagatccaagtatgccccattcttcctttcttaaagatgatggggctggaacccagaactttgcacatgcttgtaatatggtctgctgctgagctacatccctggcccttagttttctgaagaaaggatttttctgtgttacctaggctgatcttgaacatcctcttgtcttgcctctgcagttcaggtgctatgattttaggcatggacccatgtgcttagtaccaactttttgatgccgtcaccggaaagaaaaacaaggtgatggtagctattaggggcagtgatgggtagatggggcaacacagtgccaaaatatcaaatagcacaaagctgcacagcgtggaaggtgttgcaaaatatccgttgttcttctaaatctggtgcaagcagaagggaggatcagcggatgttcaggtccaggttaaggaaggaaaagacatctaaagggagacgttgtttcaagctcttagaagaacacaagctaatgacaggaatgatggttgagggtcatgggctggagccagagctgcaccgtcactcttggtggctagtcgtgctgtgaattggggacctactactcgcttatccccaaaggaattgaggctttaaatttaaattattttaacttgataaaacccttttatttctcaaagttaaaaggctcaagacatttcataattaagggtgccctgtagtgctcattgtttgatactgccatgtaatctgttaacttaggaaaacaatttgtttttgggctgttttctgtttgattgtttgcttttaagtttttgggttttttttttttttttaaaatgggtaatggataaagcccgaggctaggcagatagcaactttcagtactattacattactgattctcatttattttcaaatgttagtagctatgctggatgcttggcattatccattatcattaagtaggggtgtgtgtgtgtgtgtgtgtattctcttttgatgatttttttagtaagacataaattagatgatttctttctaaatgttttaagagtattcctttcctgttccagctcctatcttcattgtcagtgggcgtcagtagaagatctggaaaaagacaagagaattcagcaaaagataaaacggtttaagtcaaaacagggccagagcaaattcctctcagaggtatggaataacctgattagtttttgaattttgaaatgttctctttatcaaaatattccagagtttgaattttaggactttaagctgttaacaaggcctggtttggtactgtgacttggtactgtgacttggtactgtgacttggtacggttacttgcacattggttaactgatgctgctggaatttgtaaacaggaagtttctcattcttcctgttggctttgtctagaaaatgacatgtggaaatagcagtgacggtgtgattaatattgtacgatgagaatgcagccgagaaatgagcaaagtaagcagacagaggtctgcagagagcaggtccgaagcttcagtatggagggttttatgcgatggggatacgtggccattggtggttgctcaagtttgtgcctcttaccaaggtcacgaacagatgctgtgccattgcgcagagggtaggcagcgtctcttacccctgtcctctttgccctaggttattagttaaagatagacagagatatctaaccttctttgaggagaggaccagcccctgacatggtcagttatgtctcaaagatgcttttacaagctgcttagccggctctctggactcgaggtcactaacttatgttcaaatacaagacaagaagatttaaaaaccagcagctctctaactttgaaggagattacttgatggtttcttagctgttctccagaaagtgttagccaggcccaagcaggttgcctgcaaatgtgagtctgtggggtttgttccttccacaccgacaggggcaaaggcaaaaaggaaataactaaagacgtaactgcacataagctgtgaaggatagggttgtgaaatgctcctactggtcagcctttcaggtttagccttctgtggaggaggaagagatggaagagtcgagagtctaaggtcacgtgtgtgcttttctggagcatgttcagggtacctgcaggcaagcaggcaggcggcctaggatacctggcgctgctttctctggtctcagcctcctgccctgctgtctcaatagcactgagtgcttgacaccgggtggcttgggctcctgactgtgactcagttctctctcctgggagaacggtagcaaggctttttttttttttttttaagagtagtctgaaaataaacctgtgtgtttctatttcctgtgcccctttttatgaaagttaagctaaaatgttgagatgctgggtgaccagcatcagcagagagaggacccatgtgtcctgttgaccttctgtgaggcgcagcaggagggaaaccaggaagctccgtgggctttccctgtctgtaaatcagggccctgttcattcagtttacctggactctggctcctgtattcactccttagggaactgtgcctggccctaatatacagcctgtttctctgaacctgctgtccacatgtcacttgcatccaggatacaaagcaccctggtaaaatggcaacttagaaatcttagttctatctggaatcttagcaggaaagagtacagctctgtgcaccccttcctgactctgtctaggatctctggctatggctgctgttgcagtctttgctgaaacttagccttcctgactctcctgaacctacagtctactcagaaataacatctaggccaggaagcccatcatatgcctatgccacagagcactggaagagggtgtaggagagaacacgttgggtattggctatgaaagctcatgctggaaagacagtggtcttacagagggcctttgtcatccaggactagtttgtggagtatttttacggcttgtgttgtatataaataatatgtacgtgctaattgcctaaatccagcacttttggcaaagctaaattcatcagaacgttaacactttaaatcgaatacactgccgtagtgtattctttttcttaccgctcacctctgaggaaaaacggaaggcagcagaggcattttttttgtgtctgtgttgtttggttcatagttcataatccaaagcacccagggtggacattttaagtgggtacaatagccagagtgacagagaatgaggtctgattgactctaagctgcctttcacgtgtaagcattacagagtgttaactaagctactctacagcacgcgtaactgtgtgtctttgtttctgactcagatcagaaccttcacagatgtaggtttcttaaagtatgacgtggcctttagctttcatgggagcagcagtctgttcttccgtatgaaccagaatctgcttgaagcgtattctagcctcgtattctttctaaacaaacattgttagaatattagttaaattagttagtaactgtgtttaaggttactttggattcttttacctaaacactcacattcagtacaattaagttattggaatgtttaagattaatgggacgactgttattctatgtgaggtggtgatatcggttggcaaagatttccaaccatcccgaccatgctcacagaccagtgtgagacctgctgatttcagggttggtggcttatgctaacattctgtacgtggtgctgtgcagcgttcttagatgcgctcactagctagtatgtactgtgtgtggctctgactcttcactgcagactgtactttcaagaatgctaaatgtattgcatgccataggccttttggattgcccattagtgaattgtaatttcacacttcatttgaaatattcttaaacattctctcacagtagaaggcttcacacagtaattaaaatactcagttaacaaagtctgagaagtttgatttcctcacagggagtgattttgctaaattgtagcatttcaattaatataatagaagatgtcaaatacaaattttgtgttgctgtgacccaaaatcctgcctagtgaaaagtgaactactgtttctctggagacaggaacgagactttaagccttttcttccttcttgggaacagattgaggatgacctttttaatccagactatgtggaagttgaccggataatggactttgcacgtagcacagatgaccggggcgaggtaacagagatcatttgtgttaccctgggtggctcacatgtgttgacagaagggacaaaatcaaggtctgagcctggtcaaagcctccactaccaagcttctagtctgtgtttaactgaaacgttaaacacagaaatcctccttccctcaaggagaattcccactgactcagagcacccaaagtgtttccccttcagtcttccagactcatattcaccattgtaagtgactgagagcaaacaggatagtttttcccttgaagaaaaaacttgtctgtttttcactctgcaggcaactattcagttatataaacaaatagcttactataataaatccaaatcatgtaattgagtaattagattacataaaaattaacctttgatttggctttttggtattcattagctactccttaatatttggtcatgaaccaatgattcagataaaaagctcattttttttttctgttaatacccaataatccactttctagtatacactggaaatgaccactttcagtgcttatagttataaaatgtgggcagttgagtcttcccagtgctgggggttgtcttggtcagggaagcagagctcatgtcttttcctgaatatatagtatttggtcaaatgactttagttctgatttgtttgaacctggcccagcctgtgattcactacctggtgaagtggtgctcactcccttatgaagacagcacatgggagctgaagcaggacatagatcaaacaaagatcgaagagtttgaaaaactcatgtccagggagccggaaaccgagcgtgtggtgaggactggctctcggggaagggtttgatttgggcatagcatagtggtgtagtcactgagaaaccactaatggcatctactatatttggaacaggagcgacctcctgctgatgactggaagaaatcggagagttccagggagtataaaaacaataacaaactcagggaataccagttggagggagtaaactggctacttttcaattggtacaacatgtatgtaaacatgcttctttttactttcaataaatgctgtagctcatatcctttgtggtattaagaatataaattttaatgctgtaatacgtttttaaaattcaactgttggaatatacttaatttattcaccaaattaatcaatggatctatgtagaaatgatatctgtttgctgggaacttttctttgagatatattttgttgaactaagaaaatagctaaggtggtatggggtatgcatttatggagtgtatactctgtaaaaagagagtgacagctgataatcacgaagctttcctgtccttttctttcctaaaggcgaaactgcattttagcagatgagatgggtttgggaaaaacgatccagtccattacgtttctctatgagatatacttgaaaggaatccatggcccctttttagtaattgccccattgtccacgatccccaactgggaaagggaattccgaacctggacggagttgaacgtggttgtgtaccatgggagccaagccagccgtcggaccattcagttgtatgaaatgtacttcaaagatccccaggtaaagcggtggggtgtgacccctgtgcatgttgtatatgttttagagggttgaagactcagatctctatgacctggggatagaagcctcgatttcccttacttgagaaacttgcttgagatttcttatccaatgcatgtttgaaaattgtcctacatccatgaatactggttttagcatttgtcattctgattattataaagagtaacttaacatttaagaccacaaactctataacatattagtaacctagttctattttgtatgcctaagacaatgccacacacacacacacacacacacacacacacacaaaaatgatgctaaaatgtgaccaggggggacattttattgtcctatgatcagaagtgaaaaagtcattaagtaaaaatccaagtatgccacagaagagggagttagtgcttgctcgtgtaagaattgttctaatcttgtcttgtagttacctgcttgtagttattacctcttactggcaataaagcattatgcatgcatgataggggatggtatatgctaaaacatgtgtaatctttaagtagtagaggctgttgtagagttggtaacaatacaaagtgtgacctatagttaaaagattaaaaaatattgaaatctgtttttatctttagatttgagaaattataaggctcatcctctttggattcttttttaaatttcaaatattttggtattttacagaaatgttttaaaaaagaaaagaaaaaaattaagttagagaaacttaaaaaaaaattaacgttacctcagcattgaatttcctgttaggttctgtgggctgtgactagactggagcacttaatgtcactttattcacatgtgctctctaaggaaatttgaccccaaatttttctagtacttcaccagtttctttttaaaaggaaatgtttcaaagtcctactttaactaaaataactgtaaccagaaaacttgacaacagaatgtgccacctaaaatacagaggtctccaaagggttaaatacatatattttagaagcttttttatgctcaaatgtaggaacatagccagtcctgtgaaacagctctcacgtgctgtgccccccccccccagggtcgagtgataaaggggtcctataagttccacgccatcatcactacattcgagatgattctgacggactgtcctgagctgcgtaatattccttggcgctgtgtggtcatcgatgaagcccacaggctgaagaacagaaactgcaagctgctggaagggctgaagatgatggacttggttagtgaccgtggcggctgccgctgagtccctgcactgttgccttggtctctgagtgtgctgccttcctgactgctgtctgctggtatctcagtagagcatagtcatgataatttgaacaacatcaatttcaaatatttgccatgtcattaactgttgggccaagccttgcctccgtgatgacaggccacctacgtttcccagcacgtgtttttgctccagtgagggcagttgtacatgcacgctgttggttagtcggctgggacatctgttcagtttctgcagatgctgagaagtttgtaatattgaaggcctcacatttgctctggggttttaaaccacacttattttattttcccaaagaaatagccatgccttcctactttggtgatagaagatttttcttttctgtaggaataattatcagtgacatgttgtaagaatagcaggattttgttatttgttgtgcctgctgctgtgtgtacaatcctccgatagaagttgctacaagctcttctgtccttgaattccttcttgatccatagttttcaagttagtatggccatttgtttgtcccctccctccctccctccccctccccctcttgcatggatctgcttgtgtgttgaggttgcacacataccttggtgttcttgtggaagtgagggaaccacgtgggtctccctaccatgtgagttccagggagtgaactcaggttttcagaacttttacctgctgagccagctcaccagcccagcttctcatttttaatgtacatttgaaaaagcattgttatcctgtagaatgtagtggcagagttgagaacttctgtagatgtcttgttattgagagtggatgatgggaaggaaccttctgcgtgttcagggctgtcctaaagactggacctgctgaagagaacctcagagctctccgtcacagcttttgcaagggtttggcctaaccagccattcttttaattacaaacagcgaaatctaattttgcttaaaggaagaatattgactgatttttttttcttcctacttagggtagcatttcccattttattatcaaataaacagcttattaacaaggtcctagatgttttggaacgcagttcaccaaatttgatagccagtctgcaaagcagcatgagcatttagaaaaccagagaaagtccttgactagggttctgtagacggaaggactcctagctggctccggtttccctgagtgatactctagcagtgcagggaagtaattcgttctttgcaggtaaacacaaatgttcaggacctacctctctgtcttcagagcagaggtgtgccttcatggtcacccaccaagagacaggctgtttctgaaggcttaaagtcatggggctgagcttgccctaagttgtactctgttgttagtttccaggtctcaaaatagtagattctcattgtgaaatactccttagttagtgagagaaatgtgctgtacttctctcaacatcaaaacatttacttgcttttgaggtgttatagaaattactcttttattaatggataagaatctggcatagcagtaacttttccgttacatatcacaatatttgtttacttttttatgcataatagcacatagggaaattataatgttttcttcactgagctagacagggagggtgaggctgcccctcgaaatgggagaccagtcatggggttctgactgtcatagccagtgtgcctgtagcgtgtttaagataatgtactcagaatctccagtgtcctatctcagaagagatgtttttaaggtggaagatattattgttgttcaaggccaaaatgtccttgtattgatgcagctgagaattgctgactgcttggtgcttaagtcctaacttcaatgtcatttgagcctattctcttgccagagttacctagtgaggagccgtccaggctgctgtaggccttagggatgccgatcctcaggctagactggcaggggtgagcacatgcttggtgaagatgacctgcaagctagaagggaggattactgagtgtctgtctgcctctcctctgtaacgaagtcagagggaggattactgggtgtctgtctgcctctcctctgtaacgagagacacagagctgtgtcagtggtgatcatagttgacaacatcctcagtaagagctctgaaaggaaagccctcgacaaagaggggctatcctgaagttgttagaggtcattgactctgttgtctcctcattcattgacaggaggctccacacaaaactgtgttgctaaagggaaattaagcacactttgtccatttgcactaaagaaagcaatcatgttttcaaggcaggcgcagctctacctatccattgaactggaggctgtagtgcccagtagcccaagacaggagaggtcctttgctcaaataagtttcctttgaaatgtgcatacctaaaagtttgtaatttctaagttaagtgctcagaccttaagctcatgaggaaggagattcgatagctctgagacagtcaacacagcatggccactgttctttcactgtccgggatgacactttcaaacgctcttggataaagtcattcaggactttggctaatcagagatcacagccagtgaaacttaaatagtctagaagaccttgaactcatttgcagattgcacaggctttgtgagcctagtaatgatgataagccactcatctgctttagtcggagacttttacaagagaggaagaaaccagaacaaacccatcaaactgcctcccctcccgtttaaagtgcttccctgacagatagacctggtagagattgctcttacttagattatgtcactagggttcagtgagtatatgctctgtgtggtcagctttcaagttaaaccagaatcttattttgaaattactacatggctgcagtcacttcctaaaataaatttgtgttgtgcaccaggaacccaaacaaaaaagaaaattgtaaggcttttaaaatttgtaagctcgggtctaaggagcctaacgatcaccaaacaatacacttgtttgacccagcccacaaagcactgcataaaacctggcacggtgatgcattccttaatctcagcacctagaaggtgaaggcaggagggtcataagttcaagtccatcatgggacacgtgagaccctgtcttaactttttaaggacctggaggagaggtgagaggagaaattgcagtctggatgtaatgtatgagagaaataaataagtgaatgaatgaatgaaagataccattgttgatttcgatcagtttaaaaggcttccttatgttgaatgagagaatgctaagtagtaggtaggtaggtaggtaggtaggtaggtaggtagataagtaggtagataggcatctccgttgcttatgttgaaatagaaagagaggcttggttgaatcaacggctggaggaaggcgagcacaagtggaaacactggttgaagcaatggctaatatgtttcaaagaaacaaaattagaaaagcgttgaatttaaaaaaaaaaaaaaagacggtggtatttaaaactaagccgaccgctctgctagttgaaaatttttgccaaacaaaatggttttccacgtactgttgctgtttgaagcacctcttttgtctccgtcatgagtcaagcaggaagcagatggaaaggtgagagtcctgctgatgtagagaacagaaaggagcgtgtaaccgagtctggggccttcagaggaaaactaactacagcggagaaaaaaaaaatcactgagattgggagacttagaaagccatcctccttaaatctccaccttgcaaactcacaagaaacaggggcaagccctccagagtttgctgcagtgttctctgtgtctgcctgccctgcaccaggagccatgtccacgtgtctctgctctgaggtctacaccttgtgtacatgctgacccaccacagtgagcagaaatagactagagagagagagagagaaaagtgttagcgctgaaaactgctctgttcctgactggcaagttgtttccttcatgttcttccaggaacacaaagtcctgctgaccgggaccccgctgcagaacactgtggaagagctcttcagcctgcttcatttcttggagccaagtcgcttcccttcagaaacaacctttatgcaagaatttggtgatctgaaaacggaagagcaggtacttgacccctccgagttgcctttcagccatgaaactgaagatgaacttgtgaaatggccaagatttttggtctttgcaaattgtaaaaagtaagggttgtgttgtaatagttaccaccccagcaaagagctttgtgattccttctctaggacttgaagtcatcattacaaagttgatctcttcttgtttccttctcccgcatcccgcccccgccctcaaaagagccctttgagtttttatcgtgtggttactttaccaaggcgacttttagagatctttgtgccatttgggttagttttctgcagggtgtaatcacgggtagtgtcagaaacccctagggtttagagaactacctgtccactggaattttgggtccttggtctcattgctgagtcatactgcttcaagcctatttatttacatttcaaaattggaggtgcaactaccccactggattcctgaaagaaatcagagggcttgtgtgtgagaagcacttggcacctgtaggcactggtgtggagcatcctgtcagtgaggcagcagagacccacatcccactaattttaaaataaatgcattagtaagctcagaatcttggacttgtttgcccactctccagtctcctggcgcaaacctcctggttaagtttgctgttttgtttctcttctgtaataacaacagtacagtgccatcagtgggagagagggagactcctgctcggtttgctcattgatgcagagtagtatcctccagcgccctcaccctcgctgtacctctttccacaaaggaagggaagcatagagtccccgaccttgctcctgacctcttcctgtccatccccataaggatgggaaactaaaccagtacccctcccccaacacgcacttagagtttctcaagcccctcaagtgattcaggagttctcaataggtaaagttttctctctgacacaagcgacaactcacagtttagctccttcacattcttcctaggcttcaaagaactaaagatggatattaaataaataagacagccttccttttttttttttaaatgccaggatgttttaacacgcaagtgaatggagataccagtattgacttgaggtccttttttaggtgcaaaaactacaggctattctaaagccaatgatgttgagacgcctgaaagaggatgtagaaaagaacttggcccccaaagaagagactattattgaagttgagctaacaaacattcagaagaaatattaccgagccatccttgagaagaattttacatttctttccaaaggtggtggacaagctaacgtacctaaccttttaaacactatgatggaactgagaaaatgctgcaatcatccctacctaatcaatggtaagcctgctcatctacccgcctggagcccccgctgcccgtgcgtgccgaggctcccagggcgtgctcccagggggacccccgtctgtggttgctgaggttggtagccagtgctctctgaaagcaccatgccaccacacatcgccttcgtctgaaagtgggtatttgcaccaggaatagatgtcagcagggccaggccagtggctaaagccatgcctgtgagatgttcttgaagggagtggtgtgcttgattccaaagcagttaagagcatctccttgtgggcagcacccttgcaatcggaagacctttagggagtgtcccctgaaaatgggaagggattttaaagtttcgattgctgtattgtccctgttactgagaaggactttataaccttgatgttttctattcgactcccgcgggttaaatgccttacacacttccagaaactattaaggagatgtgtcccctgcctgtgtgagcacagccagtagggacgtagggggcgctgcctctgagatgcaagtcccaggggaagatggtgtatgagaccaggattttgccaggcaggacaagaaaaagaaaggtcgctgaggtgaagccctaactcaagcaaacaagagaacaaagggaccttacccaaagtatagcagtgcgcggcacagagggactgtgccccttagactcagtgggccctgctaggaagcagatggggtcacatgctactttggctccagacagtgggtggaggaagccacagctggtgtttgagctgagcgctgtctacgtgcctgaggatggacctcagtgggtggagttctcacctagagtatacagagcactgggtggcatcccaaaacaccgcattaagccaggtgtggcagcatcttcctgtcgtctcagcccggaggaggtagaggtcagagaatgagaatcaggaccgttgtcggttatatagaaacgttgaggctagctagccatttgggaggacgggctgaggaggggctgttgttcctgagagcgtgcctcagaaatgaaaggactagagactgaccagagccaacattccaaaaaagatggaatgaaggatagacagacaagcaaggagagaatgatcagctgaagggatatggctgtgatctgggcagtttgcactgtgatggcaggctaacccgggagtgttgaggtccgtgagggaaggagacaacctcccattcccctgcctcagcatgcacctgtccaccaccctggatgtccttgccaatggaggagaaacagtagtatccaccaggaggataagctcagggtatagaacctgaggccattgctctgctgtgacatctgtgaactcctgtttttaagtagtgtttcagtagtgtttgttttctaagagagcaccatgtctgatagttgcccgtccactgtgctagctaaccacacagtatttatgagcccatatggtgtccactagcctgtggctgagttgggactcagggaaagtactcgtgtatgaggaggacacacctgactatgcgcgcatacttttatttcatagcttatagagagaaaatagataacagcaacccccagcaggaaagaggagaaaaagagattacataaaggactcatggtgctgacgaggcctgtgtcacagacgctcagtcccatgacaaggaggactgctctgagcttccatgtccttcctgctcactctggttaattgtatgcagagagcattgccaaggctccccccacctccaaaacatagcaggggcccttttctgtatctgatttgtctctggagtcccctgtatagatagctcttcttctagagccccttaggactccttgaggtatttgtcctaattgtcatgccttgaggtgagctctcttgtcctaagaataaataacacagtgactgttagggaggggttcttgtacccatttttttggaaagttaaaaaaaaaaaaaaaaaaaaaaaaaacatgtacgttaggctcctagctccagagacagtgagacagtgtatctcatggacatctcagggattggtccagggccccactgcacactcttatccaggcttatccaggatctgtaactgagctctcatggagttatggctgtgtccaagtggcacccgcaagaaagtttaatcatccgtagtaagctgttatgaactagtcgtaagagaggaaagtgcaccaactggcctaaacttctattctacagagcatgtctttggaaaagtaggagcaaatctgtacattggtgggagtggtaagataagcttagtgggagagaactctggatggtgggagtacatgccataaagatgcatgtggttgaagagtgtctgcatatggtagccagagtccccggcaagtagcagctctctgtggaaggaggaaagctctactcttctttccagttgcctttgctctgcatacaagatgaatgcactaccagctgcactttaactaagtagttgagtttatcataacccatatccagttgatgttttcaaatctaacctcaaaggaaatctttaattgctaatttttaaattttgtcttgtgatacatggggcagaaattgcaactgtctccagatgtttgaccccggtgttcacgtcccatcccatgactcacaactgcttataacgctgtcttgggaggacctgatccctctggctctgcaggcatccactctcgaatgcacacatgcacacgtatgcacacactttaaattctaaaagttaaaggaaagaaattatcagtggcatcaaaaaggcaggagtgttgttttgctgcttcttaataaatttaaaattttataatgtgagtttagatttctctttgaattatttatgtttcaatttttcactaaaataattccagcctgcctgacatttgctttctcaaagtgaaagtctcatttttaaaagacaattccttgatcattaagtggttttaaactatattacacttcatttttatcccgggttgtatgcctcatagacaaagaatacccaaatatcatagggttaaattattcatttctaaatcgtaagcatcttatgagcattatacaaaagagtaaaacttactaaaagatataatgtgataattcactgtgagtctctgtgtgagcccaggagagctttctgaacctagtgcctgccaggtctccagaccgcaggcctggggacaccatcacctttagtcagggacactgtggcttctgtccttaacatggcatctcctccttatctttccttggtctgtttccacacttacagaactaatctgaatctcagctttttgttcttgtggaaggcgactaagggtcaggcccttccgagagagttggcattttctgcccggttcactttgtgaaaaggtcgtgcacctgtggaaggcctggcattcgctccaaacatcaagtggctttaatctgcccttgatgattcttaactcatctagtgttctctgtatgaccccatggggacagcctcaacaccaccttaaatggaagcaagactgtccttcactggcattgtgttgcctgtggaggtgccataagccgttacagtggccttcctgacccaacccgaccttcagacgcctttgggagatttctgtaacccacatcggtacgtcacatacagtgggaggaagttcctggcacagtataatggcaggaagtgagtgcttggggttaaacttggtgtgctttcgttctcaaaagcatctatgataggagaagagtgtgaaacccagccctgtgtactgggggcccagaggccaaggagggggccagatcacctctgcttcactccagccaaaggactggagcattgagagaagcctacctgccgctgcctgaacccacagcacgatggaggccgtagctgtgagccttcctcctcggggacatgtccttccactgagtgctctaccgcactctgtgagccttcctcctcggggacatgtccttccactgagtgctctaccgcactcaaacttctgcacagtgtagaacatcgagaaaggggacttagccaggaagccataggttgccttggttttcatctttggagggtttgggcattgctgtttttgttttactcagctgacacccccttcgcctgtagttcaggctctagcttttctgtaggtatttggcccttggcttgttttcgacacctatggcctaacagtctgttgttgaaatctgggtgtgttttgtttggttggttttggtttggttttgttttgttttgttttttaatatagtcagcaaacatttggtggctggaaaatgtggatctctctccaaactgcctcagtatatggaacttaaaactttggtccctttttaggcctgtggttatgtgtggatctaacttggagtaagcaggtggcttcctgctcttacatgtgaatgggatattctgattttgccagtttgctgtgggttttgaaagcaaatccattgtttttagtaataaaaacctcttacagtattcacgtcatgccatccaatctctgcaggtgctgaagagaaaattttggaagagtttaaagaaacacacaatgcagagtctccagattttcagctccaggcaatgatccaggctgctggcaagctggtgctgattgacaagctgctgccaaagctgaaggctggtggccacagggtgcttatcttctcccagatggtgcgctgcttggacatcctggaagactatctcatccagagacggtgaggccactgcatagaaacaacagagagagagggcaggatgcggtgtgagtcacctagaagtgacatttacagtagaggtggcagagtgggaacaatatatcacacacccccccctttcaaagccacagttatatataagggcatcttacatgagagcagggggcactgtgtactttttttttttttctgagacagggtttctctgtgtagcccctggctgtcctggaactcattctgtagactaggctgctcttgagctcacagagatccacttgtctctgcttccttagtgctgggattaaaggcgtttatcaccaccgccaggtatatgtaggtttctttgtttgtttgttttatgctgcatacttttgtgagcagtttttcttcatttcgttcaacttggggagaagagttcttacttaaaattaaaatgtattttatcagctgtttttagagtttagctgtttccttgaggaagtaaaacaaaactttaaatcttgagtgttctggcagttgtatggaaaacactcctgatttgaagtatttatgctaaatccttctattatgtgagtgcatattccatattggaatacttatttgaaagcaaaaatgagcgagcatatggtagctgtgggtcaggcctccgtgttgtatttccaggtacccatacgaaaggattgatggccgggtcagaggcaacctccgccaggcagctattgacagattctccaaacctgattctgataggtttgtgttcctcctgtgcacacgggcaggagggctaggcattaacctcactgctgctgatacctgcatcatctttgattcagactggaatccccagaatgacctccaggtaagtgggggcaggccacctgtccccagtgcctctcgtgacagacttatcagtcacaccagtgaactagtgtgtcattgcctttgtctcctgactcagaggatatcaactagtgatcacctgatgtgtgatatgagaggaaaccctttagagtgttggtatcgttccaaactgcacctttcattatttcaacaatgtgtggttttagaactaactagagagacatgtgtttcttttcgttcttttgttttgttttgttttgtttgttttttgtttttagagacagggttttgctgtatagccctggctgtcctggaactcactttgtagaccaggctggcctcgaactcagaaatctgcctgcctctgcctcccgagtgctgggattaaaggcgtgcgccaccacactcggtgagacatgtttgttgagttgatcactttggctgccataacagaatgctatgatggggtagcgtaaacaatatccatgcctttttcaaggttctggagttgaactgtgaggtctggatgccagcaagattaggttattgctgcatagacagctgtcttcctcctgctgcttcttacaggacactaatcctgttcatcagggcaccaccctcgtgacctaattacctctgagtcctcatctctaaatctaacattgagatcagcttttaacccacgtaattagggaggacacagacctgtgtgtgctccacagtcctgtgctccattgcagcagcctttggttccttttctttctaggctcaagctagatgccacagaatagggcagagcaaatctgtgaaaatctacaggctgattacaaggaactcctatgaaagggagatgtttgacaaggctagtctgaagctgggtctggataaagccgtgttgcagtccatgagtggaagagaaaatgccactaacggggtaagaagaaactgcccaggttgtgcgttcagtctgccttccttttgcatccagctaattgttaggaagtatttgacattgttttttgttgtttattttcttgagacaaggcctcactatgagctcttgctggcctggaacttgcagatccacctgtttttaacctcctgatttctgggtttaaaggagtgtgttaccacactccactggctggtggttttggtttggtttggtttggttgggttgggtttggttttggttttattcgagacagggtttctctgtgtagccctggctgtcctggaactcactctgtagaccaggctggccttgaactcagaaatccgcctgcctctgcttcccaagtgctgggattaaaggcgtgcgccaccactgcccggctccactggctgttttttaacctcagattctcagtatattttattgtattttcctttgttataagtaaactctcttaagacatttagtttgtgttttaagcctgaattactctgaatacttaaaatttctctgaaaaggtacaacagctgtccaagaaggaaatagaagacctcctgcgaaagggggcatatggtgcacttatggatgaagaagatgaagggtctaagttttgtgaagaggatattgaccagattctccttcgacgaacccacactatcaccattgagtctgaaggaaaaggctccacatttgctaaggtttgaatccaggtctttagtgcagccttctagaactcatgaagagaacttatgcagaacattggcctttcattgtgaattatagactagttattactttcccagcgcctcccaacacacacagcgttctctgtgcgctgggttctctcctgtgcggtccctcatggtcctgtcctcctgtgttcttcccgatgctcccgctatgaagtcctcgtgtgaattttgttcttcataatctcccagaccccagtgcccaaaacgacccgaaaagatgatcaggtcgctccatgtttaagtctgtcttgttttcccctttcgttagggctccacagctctgctcacagctaaaatgagcccatggcattctaccccagctcctgccactgcctgcctcacagctggcaccgtgtgctcttccaccaagccagcccgctaaggccaagctgctctgagccctgactgtcgcctcaaacccacttgctagtattcgggttgtccacaccaaggctcactctactttgtagttttgctaaactggtttacttgccgtaaagcatgaaattcaacactttgacatattataggctggggtgaccgttagcacaacgctaggttttgaatgttcctactacctcagagagctccctgtgcccattagcaggcagtccctacccttcccgcttcacccagttctgcaaaccgcatgctctttttttttaaatagctttgtccaccctggaaacaccactcggtgtgaagttatatcacgtgtggtcttttgagtgctttcataaaattaatgtttttcatgtttgcccttatactatacatggataatttgttttgttttggtttggtttggtttttccagacagggtttctctgtgtaaccctggctgtcctggaactcactctgtagaccaggctggcctcaaataatttattcctttatggtttgcaatgttctactgtgcgggtatcacacagtgaccaggtgatgataaatgctccagtcatttattaattgctaattgatgaaatttgggttatttttactttgggattttcagtgtagtagggttttttttttttttttttttggacatgtcttttcgtttctcttgcacattcgacagaagcagaactctaggtgatgttagctttcttggctccccagtgaggtctgtgcatgcttatcatttaaggaactaacaggctgggtttctttgtttctgtttctcttttaaacaaattggggaaagttctgggctccaaccccccccccccatcttcttccactggtcattgtatacagcatcccttatctaaaaaaaaactactgccttcagtggcccctccactctgcagaagccccttcatctgccttcacatcacataagacctattattccttctccccttttgcttaaaaatctcttcctgtcgtttcatgacggagcctacacacacacatatagcatccaggttcacatgtgaaacaaatgtgtttatatctctgagcctgccttagattgctccacaccgtggtttctggctccatccacttcctcgcaagtgccatgattttgtttttctttacaactaaataaaagtccactgtgtatagctagaacatcttcttttatcagttcctctgttgttggacatctaggctggttccatttcctgcctattgtgaaacttgggtgtgcaagtgtctctgtggtgtgttgactcagagaccagccttcaagaacacaatctggtggcgtggctgggtgacatggtagtgctatttttagtggtttgaggcgctccacactgacgttcatagtggctctgtgaattttcgtccctattggcaatgaatacgaattcctttttcactccatcctggacagcattccttgtttgtttgttttcttccaatttctgtttccccggtggctaaaactgttgaacctgttttctttctggatggatcacttcctgttgctttcccatacctgtgtgttcaggtggcttttccctcgtcctcacaggtaccatgttaactagtttgtgatctgtttcaagctgagctgtctgtggtgtgaggaaggagttgagctcccccgtggccccagcttgtagaggttcttctctggcctctgcacgctcatgtcgttacagtctcttgcagtctttcctcagtcctcacatgcagtctcagcatgtgtaagacacatgtgtaagacacacgtacgtgtttcacgcacgcatgcacgcacgttctccttctgagtaacatgcagatgccagagttggatgtggtagttctccctgccttcttcactcttgttgttcatgtctgctgatgtctacctctattaatttcaccttttgaagaaggtctttttaggaagtcttcttcatatttggtcattatttctggtgtaaactgctggagcagtgtgctctaacctcactggtggctgtcgctataacttctcccccatgcaactcgaggcacagccatgtccatattaaacttatccctattttctaatagctcctgcttcccctgggctagggctcagactgctaaccacacgtgcccgccccctgctccggcctccaccctcatcaacttgccatggctcctgtacctcgagcccctcatccttgctcctctcctgggcctttgtgcagggctctgccatgaacattcctgccacctctcttcttgtacaagtcttctaaaatatggtccaagcattttcttctagagaaaactaattttttttttagatctgctcctagcaggactttgctggaaccaagttccaggcctttctcaattgcttgtacttttctactcctgtggcaggtgtggaaaagtgtacatggggcacttgtcatctgtctcccatccactatactgccttgcagaggctgagcacgcatatactgtgactagataaacagaggctaccgggggtcctgactctgagaaccgcatctcagagtaacgcacacgttttccacctttaggccagctttgttgcgtctggaaataggacagacatttctttggatgacccaaatttctggcagaagtgggctaagaaggctgaattggacatcgatgccttaaacgggagggtgagtgagaaagtcccatccagactgctgcctaatctgacccgaaggttggtatgacgctcaccatgcttgctctttcgttagaacaacctggttattgacactcctcgagtgaggaagcagacccggctatacagcgcagtgaaggaagacgaactgatggagttctccgacctggaaagcgactccgaagaaaagccttgtgcaaagccacggcgcccccaggataagtctcagggctatgcccggagcgagtgcttcagggtagagaagaatctgctggtttacgggtaaggccggttcgctgcatggagtctcattttattttaccaacagctggaattctcagttgtcataggaaaaccttctttctgtggatctgcgtggctccccttagcgtggccagacagatacctccgcactaactttctgcaggttgtggctcgtaaagtcgatatgacccacgttctaaatcctcctgggtgtggagagagaagccactggaatttatgagtgctagcttgcaccatgggaattacgacagttctaattattaaaaactaagaatgatgtaaaattgcaaaatcttttggcagtgtactgtcacataaactttatgaccatagtcacctttaatagatttctgctgtaaaggcttagcagaggcagggcttccttcatgtgcctgtcctccagctagtctgcagcctcagagcccatctgaacgtctccagtctgtgggcttccttctgctacaggacgactcccacatcagcttcccatcccatgtcccatggcacccacgtagcactttgaatcgcagggtcctcagtaaacacctgaatgagtaggaagaacgtgctcacagatcatggggctgtagacagattccattaaaacagagacagccaacagagcacctgtcactggttccatgttgtcctggctatggcctgaggcatttcttccaatggctccttgctggtgaagggggggggggggcgactggggggatagcacatgtccgaggcctacagggttctgcggctgacacttgtctgtcggaatctttctcatgggtgagctctgtttgggagcttagcttccactaactcccctgtcgcccctacccttctctgtgtgcccccttggttctgcctaggccccgccccctcctacacaggtgaccagccttaagcctgcctccgctccgcgcccctttgcactctggcctgcatgtctcatcattctctctcctgatggaatcccattcagcatttccagaaggacaggagctctttcagtgtatcctcagtgtatgcgccgtgccacagatacaccgtgctgcatagatgtttgtgtgccagctgtacactgggtagctcgccggcctctacccaggacagagacttacccctgtacctttgcccctgtacctccttccttgtttcggcctgatgatcatagatacaaactatgttggaaaccttaggactggagcatacttataactcctaggatgctcatggcgtctgtctttcagtcaagtcctttcctcttcccacttctactgttatggattaaacaaccaccctgtggtgggcactcagataccagagctaccactgagcaaggctggtatagcctaagaggcaggtgagcaagcaaaaatgtcagtagcctatgaagatgaagtgacaggcagcgcctggctaagaggacacagaagctcagcacattcccttaagacatagggactgccctcacgctttgggggcgaggaggagtcacagagagaatctgtggctgagggacatcagaaatgtgcagatgtgagaaagggagggaggagcaagcccgaggcctgggtctgggagaggtcagaacagccaggaagaaccgtggtttggcgagaggcagcacatggcagaggattttctctgttctcgaagcacgactctcagctgttacagaaagcagcagagaggctctacattgtgagctctgcctggtggggaaggcacagctcaggcggcctttgagcccgtgtgttatgtagtaggtatttctgagaccgagcagtacgacggctgtttgtgtggctgtttgtgtgacagtggtacgtgtgcttttgtttcctgcgcttagtccttcctcctggcatttttttctgggaggccctgagacttggtccagcatcttccctgagctggaagtagccattccctgttgaaaaggagctccagggcttttagcacttcactaattactgaggcatttgagatgggttgatgcagcaggacccatccgcatgtagctttgatttctagtagtcacacagacttaaagtcatccttcatctcaaaaggttgaaggaagacagatgccagggtcctctggttgctcgcatctcctaaaaatgacagccgtagctaccagcagcctaggaacactattggcaagcaacatgggtgtcagggctttgtcgttccctctgtgcggaggtgtcgtacctgtgcttctttcctatctctagaagtgactagtgccgttgtgggtccaggatttctcagtcccagaccctggctgtcaaggtgatgtcacatctatatagtcagagattccatctgcatgccaccttttttttgctttctagctggggccgctggacagatatcctgtcccatggacgctacaaacgtcagctgactgagcaagatgtcgaaaccatctgcagagcgatcctggtgtactgtctcaaccactacagaggggacgagaacatcaaaagctttatctgggacctcatcacacccacggcggatggccagactcgggccctgctaaatcattccggtaggtctgtcttctgttctttgtgcttctgggtcacaaaaggctaccagaaacaccaccattcggtaaaaggctgcggtgtagactcttactctcccactgggccttacagtatctgcctctgacactgtaatgtgcactgtaaaggcatacgtgactgtgaccctggtgcttctaggtctgtcggcccctgtgccgaggggccggaaggggaagaaggtgaaggcccagagtacgcagccagtagtgcacgatgctcactggctggcaagctgcaacccagacgccctgttccaggaggacagctacaagaagcacctgaagcaccactgcaacaagtaggtaccaggcggaggtgggcaagcgtgcagagcgcctgaggtcagcaagtacatgtgtaccgtgggaacccgtttgtaagagagcagtgtgtcatgtgcagagtgccccgtgcttgtcactgccatctaagatggacactcagtcatccagtccatcctggactggctgctgcacggtgaataccccacagtattcatcccctattctgatcgtttcatttggtctggcacccatgcttcgtccgtgttgtaggtagtgtcaggatcctcttgtccgataaatgctattaagctctgtgtacgccttactttgttaatcctttctcatcctctagtggacatctggactgttcccacgtttacctgttacaacctcgctgtggaattgtagatgattggtgtggggctaacgtgtggtagacagacaattgcaggtcctcttgtaggactccacctttcactgactgcttccatcgttagcactggggaagtcacatggcgctttttgctttagttttgtctctgttgctgtgtagacccagctggctcaaagtcacagagctccttctgcctcagccacctgagtagctaggatggaagggatgcagctgttccattttatctcccgcttatccacaaagacgaaggtctctaacgagagtagtttacctaaggtttctcagttcagaacccagtgggacttggtggcacacttcctttcccccatgcccacctgaccacagaagtctgactctttgcctccgggctcttgaaagggtcaccgtgatccttcaaagcatttggtgtctgtggaacttgttactgtcctagcatggtgtttcatactaaaattgtaacctgatcatcatagctctcagaaaatgtccccgtcttcatggtttaccttgttttgggttagttgccttctgggttcaagattcaaacagaggaagttaaatggtttaatgtgacatgccagcatagctgtggtagtttttaattcctagtctcctgtcagcagcagtcttcatagggagccctctgcagttaggacacgtggtggaactggggctctttgaatatctctttcagtctcagaaaaccactgttgataccttctagcttttctctggagtggaaagtgtcccattgtccttggcctgtagactgtgccttgagattcactcttgtcaaatgtgaagagatgttgctgttaaggtagaaaagtgaggccctagaaggacatcgtagagaaaagatgaccactgctcctcacaaatgggaagcttgcaagaccagacagatgaaggaagccgagtgggggatgttagtcccgtgtgcagtcctggtctttgggttgcagtcactggcaggatgtgtgagagagtgtggaccagccccaggggcacgttagccaccttgtccctccgtcacggagtggactctctgagagtgggagctgtgtcctggccatcctttctcttcctggctttccctctagaagaaaaggagatgctcacatcagttcatagaaagctccacactactaaacctgccccgaaatggaagtctgtgttttctaccaaaaggaaaagaaaccattaggctccctgccttcgagtcaaggaaagagtccatccacaggtagaggagatttcctttggaactactgtttctgagcacccagtgtaagaaaacactggcctgcggatcctctagccagaggaaagcagtgctaactccatgttccttattggttcagtgtggcaaagtcagtacctgagcttacctgttaccaggagaaagaaaactgaaaagaaaaaaggcattccccaacatgactgcatatcttggcatgcattttaatatttgcaaccttgcagcctatccaaaacctatgttggccatgggtggactcttggggtagacagcgcatctactgatgcctggacaggactagtctgttttagtaagactgcccctgcttgtcattttgatgtcttagaggcaagtcgccgcatcttgggagacctagatctgcatgcttgtgctcaaggtgtccctgtgaccttgggtatataactcgtcctctgttaccaacagtgttcacatctgtagtgtggaaatgagaacttgcccatgtcatcacaggttattatgaagaccaagtgagccagtgtatatagatgagaaacattggtacaggggtgttatacagttatgtgacaggcttattcagctagggaaataacactggaagaaaccaaccttcaccaagaaggtcatcttcaggtgtcaatcaatcccatatgcacatatgggctgtagtaaagacatgacctgtgtggtataccaggtgagttttatttgtgggggtggggaagtcacattttagccattgaggagacacacccaagatggaaaatctggtggcctgacagcatcaccagtttttagtgctgattcattaaaaatgagtatcagtgagttggataattttaatcttgtagtgtttattatttttaaaccacaactaaggtcccctgataatataagtagaagtaatagaaatgtttactgttccctgagtagggtaaggacccaccccctgcccactactctcaccatcttcctttcttggaagcaaagttgtataatctgaaaaacctgacattccatattgagggtttattgtaaggtagtaaaaccagattttatatctcgtttattcctacaacttctgatgtgcttccaaaaatggtattaaggcagcagctgaggaaattttatgagataatgaagcagaacagttactgaaagccatctgctcggttgtttacaaacttgcttcaatacttcagaggcagtggtagggtacgtgtctaaacttcacaagctgcactaggtaggtctaagtgaagtgcgcctgggctgggctgagctcactccctctctgtgcagcgtgagcggttgccaggcaggcctgttggaagccagcagaaagcaccacacagaggtgattatgtggcaccatctgtcacgcttcaagcctaccatacagcatggctaatcagggttggcagtatgatggatgaacagcagcagctgccaaaagccactgttggcaaacagcactgaagttaagaacttttccccccctctctcttcctctccagggtcctgctgcgtgtccgcatgctgtactacctaagacaagaagtgataggagaccaggcagagaagatcctcgagggcgctgactcaaggttggtgcaagcacacgtttgttcaggcctccacaggccagcccaggtggttgggaaactctaactccaggcttgtgctcagaaccctcccctcgcaggagctcacctcctttctgtgtttgtcctctgggcctggggatgggaggaagaggaggtcagggccatttgcatgtgcttggttgtaagagggtgagaaacaatggcttctgacctagctggcatactttgtgatgaggctcatttctggctactgaccactgccccttccgtgctgccgattccttcctacatggtgggtgtttaccgtgtaggactagggttcattttcagtgctcctatttaaagagtgcttcaatgctgtcttccagtgaagcagacgtgtggatccctgagccattccatgctgaggttcctacagattggtgggaccgagaagcagacaaatccctcctaattggagtgtttaaacatggtaaggggcctttctgtttgagcgcatcttgactgtgtggcttcatctttatttagaactctttgcgtactcttttccaaagtcataatattaatgaggaccgttccaaaggactcttggcgcctaccatttttctgtactaaaaatctaatatgaactgtaaatatcagatgctgtttttgaatgtttgttgagtgtttgagaagaaaacatttctttcttggctgtaaacagaagtcaaaccatatttgttttagtaatagccaagtcgtaccgtagcattcccgaaactttgcttctggaacggttgccctcgctaactctgccagcccgtgtcagagtggacggtggtcttaacctctgctattaatctggacaagtgcctcctgggctttgttccaagcaatatttcacaaatgtcagtgctgaggactcacggctcccccgagtgggatgtagccttgttaactttgaaaggctggggatgcagaagtgctgtgatatatacagtgagcgactcctgattatagtcccaattgtctggaggtcctggaggtattctcagccgcccagcctgactaacggggagaatgatggcttataaagcctttcatgattacagtttggcttgcggctctacggcagttaggagcggtgtgttgtagtacacatcctaattgaattgtgctgttgctctgtgtactccagccgtgttctgtgagcccggcctcagaatcacttccctgcagtgcactgttgggatctgccatttcccatctagtcaacttgggcagtcaaaaagcaaattgcagtttgaaaaccatagagggaacagtgtcatcttcctgacatgcagcatcataaacctaatgagacaggttcgctggcctgccttccatacacgggcattttcagccgcccatgtgagttcctgcaggaccaaacctactgaaggtggggggagggggggcctggagaacccctgcagaggtcataaagaaacgttaggaagccttttaaatgtcaagcaaaattagatgttggggaagaatagggtcagaacccctccctggcatcctgcagttatcctgagccctctctgtctgtgtttgtggtgagtcagtggcacagccagggtataggggccacaaaagctgtcctaaagtgctgcaccaaagcaaggtctgtttagctcgccacaaatgatgtctgggagacaagctggctgtgctgtggcaggggctgtggctgtgttctgacagtgacgggtcttcctttgttgtcacgcgtgtcctctgtgtgctggtggctgtggcccaggctatgagaagtacaattccatgcgagctgaccctgcactgtgcttcctggaacgagtcggaatgcccgatgccaaggccatcgctgccgagcagagagggacagacatgctagcagatggtggtgacgggtaagaaggacattctaaaattttaataaactttatgtcagcatcacatctactggcaagagttggttcttatgctgaacggggccctctcttacatctggtttgaatttgatgctaccagtaggttctgcctatataccataggaactattctaaacaaagttcacacacacacaaataaatgaaattgtctcgtgatcaccccctcgccaccccgtgtaactgctttctgaatactggtagagtccatttgcagtgcagacccagacttggtattggggaggttgtccctcttccactctctctccctacagactgatgtgatttaaaactatctttctttttttttttttaattttatacagtggagaatttgatagagaagatgaagatcctgaatataaaccaacgagagcaccattcaaagatgaaatagatgtaagaccttaggtgtattggcttttacagtgccagtaacaaattatattcccatatagaacttgttaaactttatagataatggccttcctctaaaagacaaagtaaaatccaaccccagttgaaagtagctctgtttctcacattgctttcaaggaatttgcgaattctcccgcagaggataaggaagagtccatggaggtgcacagctcaggtgaggctccagggcagctgtagagcaggggacaggttgggcagcccgagggctggcagctggaccccaaggctgatgatagcggcccgcgggtactcttccacatgggcccttcctttgggaatagtggtgatccttatttgtgctttttacttccttaatttcttgggtagaactttttgattaagataattgatctgctcatttatagtcattatttagtggaaaaatttaaagtccttagaatacttttattgagaggagggcatttgtttaaatctgaaatatttctgtagactattgacccaacataaaataattgttatgttcaagattgtcgtcgtaagcatgtttacacgaaagacctgttttctttgtgtaagattgataaaccttcgcccctccctagaaggacttaaaagtaaatagtttatacatcctctccacttttactgcttgtctgcattttcagatctgagtatagcggggtggcctctctcaccctgtcctctgagatctaacgagtcatctctctttttgttgttgttggaaagttgtctgtgttatgagagatgtttcagactctttatttccacttcctcaggcaagcacagcgagagcaatgctgagttaggtcagctctactggccgaacacgtcaaccctgactacgcgtctgcgccggctcattactgcctatcagcgcagctataaaaggcagcaaatgaggcaagaggccctaatgaagacggaccggcgcagacggaggccccgggaggaagtgagagcgctggaggcggaaagggaagctattatatctgagaaaaggcaaaagtgagttctccaccttttttgaagtgtccccacccccatgccccaggccttctcttcccttctctgctgggtccccgagaagtagtgatcaaatcacacagtgacagtaaaaaaaaggcctggcgcctggaaggtgtctgtccctcaaccctaagacatgctctgcgagcagaggaaagacagcgccctgtatgcccttctgagcacagtgtgagccagatctttccgcaggtggacgagaagagaagaagcggacttttaccgggtggtatccaccttcggggttatttttgacccagtgaaacagcagtttgattggaaccaattccgagcctttgccagactagacaaaaagtctgatgagagcctggggaagtatttcagctgctttgtggccatgtgcagacgggtgtgtcggatgcctgccaagcccgaggacggtaggtacacgaatgaaagacgagctgcactgcgctaggcaggtggcgcggtgcgtgcaggctaaggtgggcccgggacctgtccacataacacccatgcttcatgttgcagagccacctgacctcgcctcccttatcgagcccatcacggaggaacgagcatccaggacactgtaccgcattgaactgcttcgcaagatccgagagcaggtccttcatcacccacaactaagtgacaggctgaagctctgccagcccagcctagatctgcccgagtggtgggaatgtggacggcacgacagggacctgctggtgggtgctgctaagcacggggtcagccggacagactatcacatcctcaacgaccctgagttgtccttcttagatgcacacaaaagctttgctcagaaccgtggggccagtaccgtccctcctttgaatactctggccatgggctttggccagactcctccagtcatttcctctgctcacgttcacgaagaaaaggcaatggagcaggctgaaggcaaggcagaggagtgtgaacactcaccggccaaagagaggtcggatgggaaagaggaggaagaagaagcaggcggggccaaggatggcaagcaggaatgtgaggtcgaggccagctctgtgaagggtgaactcaaaggggtggagggcagtgcagaccctgggtccaagtctgtctcagagaagggctcagaagaggacgaagaagagaagctggaggacgatgataagtcggaggagtcgtcgcagccagaaggtaatgcctgactccatcactgtcctgataccacagcagtggtgcagagccttggtgtgacgccataacttgtattttatttttaattgagaaatccaaaatcttccttcatagctcaggctggcctgtggctcacagacccgcctgctcctgcctccagagggcggggattaaaggcctgcgccactaaggccggcgtctttgcgttgtaaagaccattgatggctaggcctggtgacacacactttgaattctagcataggttggttggtctatatactgaagtccagagctatgcaatgagactctgccttttcttttccccctaagagtaattaatgtccattttcttctgtgaaggaatagtttcaattatgtgtacacgtgtttgacctcatactttatacctgcaaacatatttcaagaactgtaaactcgcagcatctgtgaacacaccggtcacttccggtttaaggacattcatagtcagctgtgcaagaattctttgtaatgttaaagttgacgtgtgaatatgatgggagagagtcactcaccgagcaaatagtatttcagaataaatgatgattcattggttggttggttggttggttggttggttgatagcatgttttccatgttacagattgctataaccaacacaaagtagaaaccaggtaccatgttgaactttgctgctgcagtggcccttctttattagctaatatcttaaccagaacagaaacccttgggtcagaaacatggctagccttcagcaccaaaagatttccttagtgtaggggcacgtgcttcttatttcagcacctgggagtagagaaaccagaggatcacaggtttaagcccagcctctctatatagtgagtctgaggaagtcttgggctacatatgactctgtctctatatgaccacaaaggaaagatttccatggcttcttcatcaagatggaagaaacaccatctatatttgtgggctgttttgttgtaagttttagacaagacaccccatatctttctagatgtacagttggcatgcaggaaagcagagctgctaggtggtattcctgttgtcagcaccgtcctttgtagacttgagctccgtgcattctggctatgagtgctgcacataactcatttcccagcaggagccgtctcgagagggaagactttcgatgaagaaagcaatgcttctctgagcactgctagggatgaaacccgagatggattctacatggaggatggagatgcttcggtggctcagctccttcatgaacgaacatttgccttctccttttggcccaaggttggcaagattttgttactgtgattgttttgttgatctaacaaaagagcgggaaaaaaatctctagcttgatttttcaaatagtttgaagtaaaccttgttggagcatatcaagtgtacagaattttcctttattttaaagtaatgatcagaaagaacccaaatgaagaaacatttaggatacttttgtattagataacgtggaagctcaaaaagccaaaaaataaaataaaggtaatgtggaagagcgagcagaaccgttgatctgacccacctacccactccttggggctcttcagtttgcctgtcctattgtcttgtaggaactctggctatttcaatagatttgacaaaatgaaaagtgtggaactttgaaaccgtgttaacttttgggggggttgttttttttgtttttgtttttgtcttgttttgttttttccagacaggatttctctgtatagccctggctgtcctggagctcactctgtagaccaggctggcctcgaactcagaaatccacccgcctctgcctcccgagtgctgggattaaaggcctgcgccaccgcgcccggctccgtgttaactttttaaagattaagtataagtgaagctttcagatttaaaataacgtattaaaactcccgctgtgttcctgagagcagagaagggtggtggtggcccctttgcttccagtcaccctgaggtcatcccagatgtagttatctgtagctcaaggcagaggaaaattgctctttggcaattaggaagcataattctttaaatgttctcagtgccgttagggcctgtgtttctcaaggcaggaagtagtcatcataagtaccatgacacacactgcacttgagctgattcatcccaggacactcttaatggtgttaatgtggcttaaaaagaaggtgacatttctgtgtgaagggtatactgtcagcgaggtctttttgtctgttccccgtgtcctcttggttcctggtcacactaatttcccacattgagtctaggggggagtttctcggttgagtcaaaggtttatagtcacaggcactattgatctatggaggcttggtctaaggagctgtaattagaacattttaatgtgcatgcttcagtgaaatttggagcgataataggtggggaacccaggctgacattcattaggtgttcctaggttagtgcccacttcataatgctgaactttattaatagtgacgctaatgatggccccttcctgggacacactgcactctggcctgtggctctgaagggccagacccactgaaataggaagtgcagaggctccattaaacgcactgcgttcttgaagcctgaatgagttccttttacaatctaaggttgttttgaaggtggtgtttacttggtgtgctccctgcttcatgtcattcattgaacatagttgaaaatagtaccttttctttactagagcagctagaacattccatcagaaccaaaccattctgatgcattttgtctgtttacttcttgccaggctaggttagtccaaataattgacctttcagcattctgtgctctgcagcatcttggtggacatatttatccagtaatttaaaataggtctttgttacaaatgtcctgtgactcttcccccttcaggacagagtaatgataaaccgattagacaacatctgtgaagctgtgttgaaaggcaaatggccagtaaatcggcgccagatgtttgatttccagggccttgtccctgggtacccaccctccgccgtggacagtcccctgcagaagaggagctttgccgagctctctatggtcagccaggccagcatcagtgcgagcgaggacatcaccacgtctcctcagttgtccaaggtaaaacacagcagtttgctttagtgggagaaaggagattgctgtgaattttaactgatcgaggagcttgtgctcactaatctgacttgattttatatgtctgtttagttgtgttgcccacattggcctcaaacaacctttctgcctgttatgtagctagaatcacaggcacacattactataaccagccaactagtcagactttaaaataagacggtagctattgccatagctgtggccaccactatcgaatggctttttttttctaatgccagcccctattgcagataaaggtctgcctcattacaactctgttctcttgggaattttcaataggatgatgccctcaacctgtctgtccctcgccagcggcggcggaggagaaggaaagttgaaatcgaggctgaaagagctgccaagaggagaaaccttatggagatggttgcccagcttcgagagtctcaggtggtctcagaaaatggacaagaaaaagttgtggacttatcaaaggcctcgagagaggcaacaagctctacctcaaatttctcatctcttacttcaaagtttatcttgcctaatgtctccacgccagtgtctgatgcctttaagtctcagatggagctgctccaagcaggcctttcacgcacacccacaaggcatatgctcaatggctccctggtggatggagagccccccatgaagaggaggcgaggcaggaggaaaaacgtggagggcctcgacctacttttcatgagccacaaacggacgccgttaagtgcagtaagtctggtgttcgctcccacagtgtctaccccggttgacagccagccctaggctcctgaccccacttctctcagcagcatcacatggaagctggcttcctccaccagagaaacagaattacagtgaatgcaatggtgctgagccagaaaactgtgttggtcactggtacagatccctcagcctgagccaaggcagcacaaggatttattcttcccaaggttctgacgtattgattgctcccgaaagaatagcataaagcagaaacgtgttcttctgagcttgcagttgttatctctgaattcttgaggagggagaagcttctgctcttagaaacactgctgttggaggccagcatcagttagactcgtgtgagtgcttggtattaggcctcagatacctagctagtagcttggaatgctctccatccctgcaactagttgttttagaaatctgagacatgtcattgctagttggaggacaagtcggtggatttttaattagaaggaaataaaatgcagtataataaattctctattatatggcctcaaccgtaccatcccaaaagggatgatgactctgacggcaagaattttaccctcaagaactctgttatgtgtgctctgtgaagagctaaggaattcatatcctgagctattgattggaaactctaatcagtggagccactttgggctaggcgactttgagagcctttctccacaggtcgtggaacaggtttggggcggggcagctatgattttaaaatagagacactagttgttttttttttttttttctggcccatcttttcttcttccaactctgttatttacaccagctctctctcttttgtgagacaggatctcactgtagcccaggctggcctccagcttagagagaccacctgcttctgccaccctgagtactgggttaaagacctgtgccacaatccccagcaccagttccttgagcctagagaaaggcttaaaatttcaaatgaagcaaaggcatacttggaaagaaacaaaacatcagtctttggacagtttagccacatagtggagtgtgagcagaagggtccatactccatacgggttaagaattgactttcatgttggcacatatctaagagagctctttcttgttgctttggatttttgctttctcaagacagggcttctctgtcttccctggctatcttggaactgctttgtagaccaggtgggtctagaactcatagatccttctgcctctgcctccccaatgctggaattaaaggtgtgtgccaacaccttccatcaggaacttcaagtagatgttggaggaaatgtatttttcaggacgtttctttaaccattagatgttgtgaattggagatctccctgtgaataaaatgcacagactgtgctgagttggcatagcagcagtagaggctaaggtgtgctgaacacagcttcgcctccttatttcaactcccactgctgtcaggaaggaggagggtgccttcactggcatcaccagtggtgactgtgttttctgtgccaggcatggggatttgaagagcaaagccctgacttgacaggacatttgtagaaagtcagtgttggggtgacttttgagtattccccaatcaaaacatgctaagtactccaaattctgaaactttggggtaccaacagaacccaataactagaaaatcccacaattgacttcatatgaagggtcacggttaaaacagctgagaacaggcagaatgactcactatgtaaaggcacttaccacccaagacagattacatcattttgatgttggaacagaagtacataaaggtagaagaagaaaagcaactcctcaaagctgccctttgacctccacatacatcatgatacatacatgtacacatttgtacacacacacacacaaatcatctatctatacagtcagttaaaaaaatttaaatcagttacattcaaatattgcataaaactgcttaaggctatgtggtgaagatgtatataaatgtaaaatgtaatgaattcatgtttagacatgaatcccagtcccagtatgtctgacagagtatgtataaatactcaaaaaatacaaaattgaaaatgaatcctggttttaggtgttgtggataggagacccaccttcagtgacatgtcacagttctgcatgtgtgctggcatcaaggcatgctcccagggctcccagggaaagcttggagtggagggaggaggttgttatctgtcactaaatgggagatattgctggagcagaagtgctggggtgcgagagtatctctccagctttgagacccgggcgttttttgctggcaagtttgatgaagtcatgaagatgtagacacggagatgaagtagggatgcaggttgtggaaagcctagagtgccgagctgaagaacatgggggtgtcctgaagacatcggggagcctacctcggggagtaacttaatggcagcttttgaactgggtggagcttactgcattttagaaagccctggggaatggagaaatggatgttggaatgttgaaagcacagcatttaaggacagtgacagggtgagcatggagtgctaacctcgggtctttccacacctgctctcccaacagggccagactgtgctcgccgagcgctgggaaaccacttactgataaactggtgcttgtcgggacagtgtctagggatccctgagcggtcacatgtcacacagctctagctcagaccaccatgtagcatggtggtgtagtcctagtggcttgcttggccctctaggctttcctactgaagaatgttgttcctaccttgtgaggagtctacaagagttgtcttctactctgaaagccatcctaacaagggcattgtttccgatcgcgtctccctttttgatgaaagatcctgtgggctgggagggtatctttcttgagtagagcgttctcagaatcttatgtgacaattcagatcactgtctgcttcctgcaggaggatgctgaggtgaccaaagcttttgaagaagatatagagaccccaccaataagaaacattccttctcctggacagctggaccccgacacccggatccctgtgataaaccttgaagatgggactaggctggtgggagaagacgctcctaaaaacaaggacttggttgactggctgaagctgcaccccacctacactgtcgatatgccgagttatgtaccagtaagtacctcagagcctgggctatgaagcctcacggggtctgcctaattgcttctcatctgagcgagtccttgacagctccctgcaccctctgtctttggcgtgaatgtgtgcaggttcacgtgtgccccatgtttctgctgtgaattcaacatgagagaaactggttgcagtctgtcctcctgaaggacaccctcagttacgtgaagatgtctgctactcatttgcccactcctccagcatgcttccctcacacggtctagctcccaggggtctaggctttgcatagtcttaagtgcgtttccctggtcttcagacaaagcctgacccagcccagagctataagctcttgtttccagagatttcttttaagcacctaacccttgtgagtgcccaatatacaactttctagctagcaacacagatctcttcctgtccttttgtgattaatatttttcaaacattttctgttttttttcactgagtttgggccatcccctctcttgctaccaacagcaacctttcagcctccctacttacaacacctcaaagacaaaggtcccatgtcgtcatttaggatatcatctctggcttcatttatatatactgattagaaataagtgaaggtactagataaagtttcttttaaaatactaggatttgtataaatatctgaagacaccctcctcccctttgttctcatttccagggactgaacccaggtgttctcagatgctgtgtaagtgctctgccgctgagtcacacctccagcctgtcacagaaactttaactgagagtctcacttaaggagactgccagacgcctggctctttagagcacttgttgctcttgcagaggacctgagttcagctcccagcacccatttataactcaagtcccaggagaaccgatgctctctgctgacctctgggggcaccaagcacatgcatacatatagacaaaacacttgtacacacacacaaataataaatcatagaataatcttgagtatcttctcagagagtgcctgttgggtagaccagtcagtgctgggagatactttctcagaaaagttcagtttctgcgaagtgcaaatgattgttaaaacttaacagcgcatgtgcctatccttaggcgtttataggaaggggccagtaccaagtacagcctcattaaatacgtccttttcttttgcagaagaacacagacgtgctgttttcctcgtttcagaaaccgaaacagaaacgacatagatgtcgaaatcctaataaattggatattaacactttgacaggagaagaaagggttcctgttgttaacaaacgaaatgggaagaaggtaaatgctggggaagggatgggcaaggatggcaaatcacacttcttctagaacctgtgtgtgttcctgcggacaccgaaaaagggagctgaggggagtggggagggaaacgtccatgatgttcagttgttcaccggatgcatattcccagatgggtggagccatggcccctccaatgaaggacctgcccaggtggctggaggagaaccctgagtttgctgtcgctccagactggaccgatatagtcaagcagtctgtaagtacacaaaagagatgcacataaaactgtgtgcctaggtgctcagtgtcccattggctagtaattattcagttgtgacttaatcccagcttacagagttgtcataaagcatcattttcttacattatttcagtgtgttgtattttacacacacatcattaattgggaatgagctgattgtcagttctgatttaaaaataccgtgtgagaacacctactcccaaccctcttagaggtggacttactccagggaaaccggtctcacagtgtcttcaagatggaacttgtgctggatgggaacgttaagattattagctgtgatagccagttttaaaatagacatagcaattctgcataaaattttatcattattagtttctttcaagacaaattagtggcatgcttactggttttgtttaaataatacaataaaattgcctctagccatgtgttaggacccagttttgtgaagtggtaccttcctaatcacctatctgaggtccttgtatatatgattccacctttgtagctctgactgctactatctagtctccattcctaatggtgtgtctttcgaaactgggtaaaatggaagtgggaactctgtaacctgagactgtggctttcactgagtgttctccagtcccaggatggagtattatcaggggtctgctgctccttgctgtacagcgtgctagtccatgctcagctaccatgtgtcattccctcacccatggaaagacctctggggtttttcacatttgtgaatttattagtgaaacaactataaatgtttacatgcaggttttagcgtgtagcttctcatggggtgggggtgggggtgggggtgttacacatgtgagtttaacttactcaatttttctacattgttaacaaatttttcttattcttagctatatttgaaatatctagaatgtcttatagtctatgcaactcttttgtgatactgttttatcatttttttcatacaaaaccttttaaaattggcatatttatttggcaattaattgacaaatgaaaggtcatttgcacttgatgcttatgttgtacacgtgcacatcacgtactgattacaccagtcaatcagccactgtctggagtgttgatccttaagttaattatgaatacagctaccttggcatttacttcagtggtggagtaaccttgaacagctttttctgcaactcagcacaattcagcaagcgaaaataatggttaaaaaaaagaaacaaaacaaaacaaaaaaaaccaggacctgtgctttcccaagttcttactttaagcttttagaatggaagcaattgcttgcatagttagaatgttggtgtggagctccaaaaggcccacgttggcagtaagtactctgacccggcctctacagctgttgtctgctttccctgtcgtccagggttttgttcccgagtcaatgtttgaccgtctcctcactggacctgtggtgcggggagaaggagccagcaggagaggacggaggcccaagagcgagatcgcccgagcagccgcggcggctgctgctgtcgcctctacttcagggatcaaccctctgttggtgaacagcctgtttgctgggatggacctgacaagccttcagaatctccagaacctccagtccctccagctggcagggctcatgggcttccctccaggactggccacagctgccaccgccggaggcgatgcgaagagccccgccgcagtgctgcccctgatgctgccagggatggcgggcctgcccaacgtgttcggcttgggcgggctgctgaacaaccctctctcagctgctactggaaacaccactactgcttcaagtcaaggagagccagaggatggcacttccaaagcggaagagaaaggaaacgacaatgaagacgagaaccgagactctgagaaaagcacagacaccgtttcggctgctgactccgcgaacggatctgttggtgctgctactgccccggctgcgttaccctccaacccgctggccttcaaccctttcctcctgtccaccatggccccaggcctcttctacccatccatgtttctacctccaggactggggggattgacactgcctggcttcccagcactggcgggactccaaaacgccgtgggtaccagcgaagaaaaggctgctgacaaggccgagggagggccctgtaaagacggagagaccctggagggcagcgatgccgaggagaacctggacaagactgtagagtcctccatcttggaagacgaggttgcacagggtgaagagctggactccctcgaaggcggggatgagatagaaaacaccggaaacgacgagtaacagcagcagcagttccactgaaagtgttgaaaactgttgacaggtggtagtcctactgtttacactcacagttaatgttcatacctagttttataagctgttctgtaacatagtgtagcaaaaaaagaagagaaaaaaaaaaagaaaagaaagaaaaaaaaaaggaaaaaagtccaagtcatgttatgcaggtgtgtccgaaggtatcttggtcataagtattgtgcagtgcattatttattatccctaggaaggatgaaatttgagaggtgatcatgtctttttaaggaaacttacataatgctctgcttttttctttgggtaccactggtattataataaagagcaatctgtaacagagcggcactagtggaaggaagtgctactcagaggacgtatgaagttatatatttaattttttaattttaattttttttgctgtgaaggtcaagatgaaatttaccatacatatcatcccttgttcattcgtctccctttctgactttatgggggttcccacatttgcatacacacatccatacactctgacaatctccacgttagtgtgaacgcctctgtcccgaggctcagcaataatcaggcagctgttgaatgtgaagggtccctttggaaaactaaccttctgggagggttcttgccagacaactgcagttccattggcttgtggtcttgtgatgcactggtaaaaactaaataaatagaagagtaaatagaagattgagagaagtgagaatcaggtacctttttttttttttaaattaaaggactttgttactttagccacaaagctaaaacagcattacctcagctctgaactagccttgaagtttacagacaggactttgtaaatgtttttctttgttgtgatgtcctttgattttttttttctctgaaaactgctatcatgtaagataaaatgtaaatttctgccaactgtagtaatgatgcttttaataaaagtgacccatgatatgcagagatgtagttatagaatgcagtgtacaggggagctggtgtccactttttttttttttaattcgtaatagctgcaaatacagcattctggcattcggactttgcttaccgtgtcttctcatgctagattagctgttagtaacacacactagttgtctccaagaccagatggacaggaaaaccttgaattaccaccttcatgtaattccacgccagatatctcagcagacacatacacacacacaaacctcttattgctcccctgaaagggcatctgagagtagggctcctgaaaatgtgtgcagcctgtgataatggggcacacagtagacaaaagggcagaagaaaaatgaggctttaataggcacactatctaggtcatttatccttggataatgggaaaaaaacacaatgtcgtagtgtcagcaagggacacaaaggcattctggtgtcctgcagaccagagcttgatatcaagagccagtgtgtggaaaaacccacgtggaactaaaatggacccatttaagtgtgtgtgtgtgtgtgtgcacacgcatgcgtgcacattcacgagcatgaactcacattcacccagtctcaaggactactagattattaaatcctttatttgttttctacaataaggtttaaattataagacctttttctatgtcatttcagcaaaccctatttccatctaagaaaggagtgatatacatggaattgtgcttgtcttttaccttcccataccccctttacacaccagtacataccagtgcacacacaggttatcctctacaggggacaggccagcctatctaaattccttttggacagtgagattccagctgacttgtgtatccaagatgaaaatatgcctatatgactggaagaggagaaacttgaagccacaagagtggcaaaatcttgaaggctaaccagcctgtgctcggttaagcaagtgccttctgaaatggcctcctttgaccatggaagtgaagctagatctgcggggagcagagaccttaaatgtttaacggaaacgcttgagtagggagagctggtttaataaactgcattaccaaagggtctcttcctaaaattctgtttactggaaagttccttgtcagcttctgtgaacagggatgagtgtgactctgtccctgacagcactgagtgtctcgagtgatgctgatcttcaaagcagaggtgtctgttgcttggcagcagtaagaactctgaacttagaaatcagcacccgttttgtattacacgaagtcatttagagttccacattggaaaatacatgttttctttcttccaatggaaagaagtcatgacatcctgaatctatctaaaaaatatttacgattcggcctaatgctaaccagtgtttcccgtgctgtaaatgaggcaccagagcaccagtactgtgtgatgcttaattccacgagggaagccgagaaacggaaagtaagtggctcacactgcattggaggatgtgtgaaccgtggtccaaccggccctcctgaaggactgcattggttttcaaaagaaaaattatatgtgtgtgggggggggtgatccaaagtttttggtgttactgtgttttatatattcctcttcataattgcatagtgtagttgaggctgaaacttgaaagaagtgctttttttttttttttttagtttctttttggggcaaggtctctatgcagcctaggctgaccatatattcactttcctgcctctgcctcccaaatgctgaggtcataggtgttgtgttagaagtgtggcttcagacagaccacaccaggccaaacagttccacgtggtttatggtaggagaaaagggcaaaggtggctgtgaaggagatgggtgggggaggggaagagggagagagaggtcagaggggtctgccttttatttaaatggagacctagtggtgggaagtgagccaaatggattctgggaatatggtggtggttgtcttggcaacaggtgtgtaggtcactgttgcctaggtgtgatgtcactgggtctggagctgaccatgacaccagcataccaccctttttatcatagaagaaaaggggggaggggcaggggaagccaaggaattaaagggtatggggagccagtcctgatcccgtaataggagtgtgttgttacacagggaaggaagcctgtgaaattagatctggaaactggaaattttcagtcccagtttgtgtgtttgaatttgagtttatgatgtgcccccctctcccccccccccccccagtatttctagtgtataaagaaaccaagttctttgaaaagatgaacttggtcctgatagaccctggtgttggaaccaagcttggccggtactctaagcccagacccttaaccgctgtgctaatgaaatcaagactcataagcaagcagtcgttggtgcagacgttagagaaatgaaaacaaaaaccagactgggcctctgctgttgtgcgtcttacctggtagagagctgggggaagaagacttactaaacgagatgagattggggaagacaaaggtctctggggggcccagccaaactcaactacactttgagaaacaggaggcacacgtggctgcaggatctcccgagagaaagaaagaacagtgcaaagaccttaaactgggactgctctggggtagggaggactatcgaacgtctgacagtgctctggggtagggaggactatcgcacatctgaccagaagagttgggaagtggggttatatcctatagagtctggatggttccagtgggaggctgggtttcatctaagcactagagaaagtcattggaaggctacagtgagatttatgcctttaaagagtctatatggcagtagcacaaaaataagggcttgcaaaagggagtaggaggtgttggaccacagcctcaggtttcagcagtgaaagactttagagttaaaactcaatgcgtaatttcaattagccctccaggactattaccacttgaagtataaccagagataaaaccaacagataaagaatattttctgatttttttttctgtaatgccacacaattagtggtttttaaaaagagaagttgaattttttttttacaatacaatgaaagttaattttgagttaactttagaatttaattttgttcattatttatttattcactttacatctgattgaagcccctcctctcctcccagtcctcccctcacatggctcctaccccacccctccctcctgttcacctctgagaaggggaccaacccaccctggcatcgaagtgagaaggtgcgcctttgcaggatgatgtatcggcgacaagtgccttgagagcacagggatattaaactgggaagcagagtgtgataccggtgtcttctgacagcacgtgagggttaggagaggtctcgttcattcgctgcgtctcttgaataagtggatttatgtgttttcttagctcaggcaggatttactacaattctatagacatagtaaactaaattgaaaactacttctggaatttaatcttaacttagactccttctgtatggcacattcaccacgtgggaatattctgtgatgctgaagatggtcgtcagacttctgaattttgtgtgaatgtagtgtcaactctcctaaaggacctgccgtaagatctagcctacaactagctgaattttactttgacctctttcatcatcttactgtgtagtttaaacaacatggaacggagcagcgatagcatcaggtatgctcctctctgacatctttctgtttagagtgatgcatggtttgtctggttcctaagccgattgaggctcccatcacgagagcaaaggaggcagtgttccacgtcagcctgctcctgggcacgccactgacctgtagccaaacctctctgcagcctcagtctcttgtgagcggtcggtcattatcccgccgccttcccagcccagagagcaatctatcatggtgactttggagttgcagcaaagcaacatcttagtgagatttctagtgtggacagcagaagtgcctgttcaaagaaccaggaaggcctccatccaggggacctcctccactgccctttcaccacctccacagtttgatctgaaagcttaatttcaaaattaccgaagaaacgtgagccttctcaccgcctgatgggagccaggtgatgctttgcaactcaaaactgccctcccttctgtcagtgtccattctaaacttccaattgggtgtgggctgggtggctgaaaacgaagcaggctgtgcatttaatggtttggaggaaggcacgtggcatctgacaatggcatgagttcctttcaacatgtcccaccatgcctccctgggaggcagtaagctctgttttgtatctctctctctctctctctctctctctctctctctctctctctctctgttactatgtagtcatgagctcaccacaccagccagttaggcacatgttgttgctactatgccttcgcatgagaagtgaggtcatcccaccagaacagtgtgtcttcctgtctcccacacggctttttctgtgctgttgtagctctgtctccctgtggtttgcacagctgtcgcttcctctgctagggttggaacctccgaggcaactccatgctgttttccctcttactgtgagaggtctggaaaatgagggcagccattgcctgcctcttgccatggacttatttcttccagtttctgatccttcatctttcccaaggggcagcggtatcagctcagagtaacccaagaggttactctgtaaaaccatccttaaaagtcttatgtcctttactctccaaaatcaaaaggtagtttctgtccttttctgtgtcaagccagtgtggtctgagccaccaaactgaggaacactgtcatagcagctcaatgacaaggcagttggcttggactccctgcccttagaccactttgagtaaaggactctatagaacgtaggaatgtgtgcccactagaggaagaatacaatttaagctgagaactgcctttcttccaaaacattccaatcaaaacacttctataaggggagggtaggtgtccgtttttctattaaaatcttggtaaggcccttgggatggttgagtgagtgaagatgctactaagcctggcaactggagttcaagcccccgacacagctggtacaggagagaaccaactcctgcaagttaccctctgagctctgcatatgtcagcatacacacctatactatcgaaattcaatgtatttttaattatgtattttaaagctttgctgaagatcattgttggcattccttctatgctccgcccagcagttacctggcaacagccaggtaggcctggcttgctataaaaggggctgtgggcccctcctcaacctcttactctatctgccttttctctctctgactctctcccctttctatgcgttcctggccagcctccacccactctctcaatctctctcaacctctctctctctcaatctctctctctccctcccttcttctctccctccctctctccatctcttactctctctctgtctgtctgtctgtctttctctgtcttctcaactcctcttcccatgtccctaaataaactctattctacactataccccttcatatggctggtgcctcggaggaaagtgatgtctcagtatgggcctgccgaggcacccctcccccgtcaccgtcaccatacgtcacctctacaaaacatatccttgtctcctttttataaagcacaacagtcatgacccctaacctgagtcacagcaaaaataacttctgttggcgttgtataatcctgctatgctttctgtgttctatgttttgtttttctcagacaatctcaccatgtactctcagttcacctgcctgagtgctggcgtcacaggtgtgttctaccatgcccagctttaaattattttctagtgtgacttagaacaggccaggtgagccataagtgtctttccaaagggattggtgtgggtctcgtgtaggaagaaagctgaccttgctgactcctgctttctacttacatttgcagctcagatgcacccatgaccaaatcccccaccccatccccacccccactcatccctgtaccccagtgccatggagaaaactatgtcaaaagcacatgacctggaagtctcacaaagccatttacaactctaccagctagcttggcacacctaggttgtaaagggtgagaacacatggacaattataacaccaggtgacactggacacacctctgtaaattagaatgctcatgaatgtgacacatttatctagcaatgatgccatgccaaatgtctctctgtgtgtgcccagggagttgctgaagcccagcagaacttgaaggttaggcaaccatactgtcttaaaagctgttacagacacaaatgaccctagctccttcgtcgtcagtcatagctaaatgtattgaattattaacaagttctgagcccagagatctgaggagacctgaggcttcatgatttttgtcttggcttcctataatttgacctcattgagcttgctttaaggcgagcttatctcggctcctcaattagtgggattaaaacaaccactcaggttaaaaaaaaaacaaaccttcagttaagtgacctacacaccaacctatcttgcatttccatggttatatgctactttaaagtgtcagctatggcccaagaatgacaccactggccagttctagaaaaccagacacttgcttggtgaatgaaatgcatccttttagatttctggttttgctttgggccttcatatatttaaggctctttaggaataaaaatcatgaagatttttttctgtatttaatgaggaaactctttttcaaaaagtattcttggccttttgggagtggttgactacaaatttttaccgtgcaactagagttaggaaataggggttgaggaaaaagagtatacaggttagtcacaggggcctcaggctattgttaagctggttaactacccaacccttgtctgcctgctgatagagatttgggggcatgtgtacacacaaacagaaacacacacacacacacacacactgtgtcagctgatagttgcagctttgaaacaggcaagatactcagtactttcaagactaaaaaaattccagggttcagtttttctcaaggttagtggtgggcttgatgcatcacataagctgatcctagaactctaaaccacatacattgtctatcttagaactaagcagggccttctacctaccactcacagcgggaacaggaacttggcctgtctcagagcactctcccgtttgtttaccagggaagaccaagtgaatcgtgttcttgcctttcttgtgacgcagtatggggattagaaacaggactctcaaaggcctatgtctgcactggcactgactaaatgctaacttcaaagccactgctgtgtgtctgatggtgagtttgaaagtggcacaagagaattgtgaggcacaccggggagattgtggtgttcccaaggcatagagctgattcctatcctgaaagaatcagctctgagcctggaggaagggccaacgctgcacagaaggcgttgtcataccacagcacgcgagagggatagctagctggggcctcatgcacattgatagttcgatagaaatgttcttaagcttcataaaatagggcaagactgtagctcagtggcacactatgtgtggtaggagcctctgagctccaggaatcggtcctcagcaccaaacacacataagatgaatgccggctaaaacttaacaaaacatatgcttactcctgctaatacgttcttttctgttaccatcttgtctactttattacagtaaggaagtgtatacatcatacgagtatacactgatgcatgactaatgacgggcatcctgaactttgaaacatctcacagaaaaccaggctttctaccctaagtttaaagtatgtgcctccaaattccctgaccttagaagcacagttgtgtgtttttatatttatggcaaaaggttcgtacatttatctggtcttcaggatgcctattgtgccctctctctgagagcaacaataagagaagatgaggcaggtgtggaggcctgcgcttgtaatcccagcacctaggaggctcagacaggaggactgtgaattccaggtaagcctgtactacatagagagatctgtctcaaagttattgtttattattattatataaattataaatatgctgatgtaaatacatttatgtctatatacataaattacattgtaaatcatgatttataaatttataattaaaattaataattgtaattgttaacaaagtaagctgacaaagggtggagatggtggagactgctttcaaagtcactgtgcaaatggaaaacagaggcaaggtcagtcctggaagaagtaaaaccatgccaagctgtcttctaccccaaatgcttgtcctgtgcatcagtcgccattctattgtgtccctgagccttgagcgcacctcctttctcctgcccaaagtggggggtagaagaagccccctgcatggcagcctgctgccagcactgaatggctcatgcttagatccacttggcacactggcacacagcatacacaatgtccgctgttgtgcctactgtccctgcttggtgacagtaccgcagggaactctgtccccattgtgtctgtccagtgctttgtgagcatgtgtttgtttaggatagaatgaagggtttttcctcactcatgagactgggagaaaatcaggcaatctaataagcctatagtctcttccctgcagcactcagacctgcaagacacaaacaagacctttcttacccgcctggcttctggcagctgccacagaacctgcatggtggccctgccaaactaacacaggttcctagatgcccaaggtgtgcctgctcctgccag

SEQ ID NO: 38 - DNA, 8969 bp, Mus musculus
ggacctatatccagacttcgcccgcccgcctgacactgcagggtccgagagaattaaggaaatctagaatgacacgaagaagattagttaaggattataggttttgaggacaagcaccccagaaaagtgaagcacagacaagctcccaggctgtgttcggaggagccgtgtgttagaagaagatggcggacccagggatgatgagtctttttggcgaggatgggagtctgttcagcgaaggcctcgaaggcctcggggaatgtggctaccccgaaaaccccgtgaaccccatgggtcagcagatgcccatagaccaaggttttccctccttacagccatccctccaccatccttcacctaatcagaatcaaaccaagttgacccattttgatcactatagtcagtatgaacagaagatgcatctgatggatcagcctaaccgaatgatgggcagcgcccccgggaacggattggcgtctccgcactcacagtatcacacccctcccgtcccccaggtgccccacggaggcggtggtggcggtcagatgggagtctatcccggcatccagaacgaaaggcacgggcaatcttttgtggatggcggctccatgtggggcccccgggccgttcaggtaccagaccagatacgagccccctaccagcagcagcagccgcagccggctccttcggggcccccggcacagggccacccccagcacatgcagcagatgggcagctatctggcacgtggggatttctccatgcagcagcacggccagccacagcagaggatgggccagttttcccaaggccaagagggcctcagtcagggaagccctttcattgccacctcaggacccggccacctgtcgcacatgccccagcagagccccagcatggccccttccctgcgccacccagtgcagcagcagttccaccatcaccccgctgctctccacggagaatccgttgcccacagtcccagattctcccccaaccctcctcaacaaggggctgtcaggccacaaacccttaactttagttctcggaaccagacagtcccctcccctactgtaaacaactcagggcagtattctcgatatccttacagtaacctaaatcagggattagttaacagtacagggatgaatcaaaatttaggccttacaaacagtactccaatgaatcagtcggtaccaagataccccaatgccgtgggattcccgtcaaacagtggtcagggactcgtgcaccagcagcctatccactccagtggctcactgaaccaaatgaacacacaaactatgcacccttcacagcctcagggaacgtacgcctctccacctcccatgtcacccatgaaagcaatgagtaacccagcaggcacgccgcctccgcaggtcaggcccggaagtgctgggatgcccatggaagttggcagttatccaaatatgccccaccctcagccatctcaccagccccctggtgccatgggaatcggacagaggaatatgggccccagaaacatgcagcagcctcgttcgtttatgggcatgtcctcggcacccagggagctgaccggacacatgagaccaaatggttgccctggtgtcggccttgcggatccacaagcaatccaggaacgactgatacctggccaacagcaccctggtcagcagccatctttccagcagttgccaacctgtcctccactacagccccacccaggcctgcaccagtcttcacctccacatccccatcaccagccttgggcacaactccacccgtcaccccagaataccccacagaaagtgcctgtgcatcagcattctccatcggagccctttctagagaagccagtgccggatatgacccaggtcagcgcacagaacgctcagctagtgaagagcgacgattacctgccgtcgatagagcagcagccacagcagaagaagaagaaaaagaaaaacaaccacattgctgcaggggattccagtaaaggttttggtaaagatgacttccctggtggggttgaaaaccaagaactgcgcaggaactcactggatgtgtcccaggaagaaaaaaagaaaaagaaaaggccgaaggtcaaaaaagatccgaaggaatcgaaggagccgaaggagaagaaagagcccaagaccccaaaagccccgaagatccccaaagagccaaaggaaaagaaagcaaaaactgtcacgccaaaacccaaatccagcaaaaagtcaagtaataagaaaccggattcagaagcaagtgctttgaagaagaaggtcaacaaaggaaaaacagaaggttctgaaaattcagacttggacaaaacacccccaccgtcccccgctcctgaagaggacgaagacccaggtgtccagaagaggcggtccagcaggcaggtgaagaggaagcgatacactgaagatttggagttcaagatttctgatgaggaggcagatgatgcagatgctgctggaagagactccccatccaacacctcgcagtcagagcagcaggaatctgttgatgcagaaggcccagtggtggagaagattatgagcagccgcctagtgaaaaagcagaaggaatctggcgaggaggtagaagttgaggaattttatgtgaagtacaaaaacttctcctatcttcattgtcagtgggcgtcagtagaagatctggaaaaagacaagagaattcagcaaaagataaaacggtttaagtcaaaacagggccagagcaaattcctctcagagattgaggatgacctttttaatccagactatgtggaagttgaccggataatggactttgcacgtagcacagatgaccggggcgagcctgtgattcactacctggtgaagtggtgctcactcccttatgaagacagcacatgggagctgaagcaggacatagatcaaacaaagatcgaagagtttgaaaaactcatgtccagggagccggaaaccgagcgtgtggagcgacctcctgctgatgactggaagaaatcggagagttccagggagtataaaaacaataacaaactcagggaataccagttggagggagtaaactggctacttttcaattggtacaacatgcgaaactgcattttagcagatgagatgggtttgggaaaaacgatccagtccattacgtttctctatgagatatacttgaaaggaatccatggcccctttttagtaattgccccattgtccacgatccccaactgggaaagggaattccgaacctggacggagttgaacgtggttgtgtaccatgggagccaagccagccgtcggaccattcagttgtatgaaatgtacttcaaagatccccagggtcgagtgataaaggggtcctataagttccacgccatcatcactacattcgagatgattctgacggactgtcctgagctgcgtaatattccttggcgctgtgtggtcatcgatgaagcccacaggctgaagaacagaaactgcaagctgctggaagggctgaagatgatggacttggaacacaaagtcctgctgaccgggaccccgctgcagaacactgtggaagagctcttcagcctgcttcatttcttggagccaagtcgcttcccttcagaaacaacctttatgcaagaatttggtgatctgaaaacggaagagcaggtgcaaaaactacaggctattctaaagccaatgatgttgagacgcctgaaagaggatgtagaaaagaacttggcccccaaagaagagactattattgaagttgagctaacaaacattcagaagaaatattaccgagccatccttgagaagaattttacatttctttccaaaggtggtggacaagctaacgtacctaaccttttaaacactatgatggaactgagaaaatgctgcaatcatccctacctaatcaatggtgctgaagagaaaattttggaagagtttaaagaaacacacaatgcagagtctccagattttcagctccaggcaatgatccaggctgctggcaagctggtgctgattgacaagctgctgccaaagctgaaggctggtggccacagggtgcttatcttctcccagatggtgcgctgcttggacatcctggaagactatctcatccagagacggtacccatacgaaaggattgatggccgggtcagaggcaacctccgccaggcagctattgacagattctccaaacctgattctgataggtttgtgttcctcctgtgcacacgggcaggagggctaggcattaacctcactgctgctgatacctgcatcatctttgattcagactggaatccccagaatgacctccaggctcaagctagatgccacagaatagggcagagcaaatctgtgaaaatctacaggctgattacaaggaactcctatgaaagggagatgtttgacaaggctagtctgaagctgggtctggataaagccgtgttgcagtccatgagtggaagagaaaatgccactaacggggtacaacagctgtccaagaaggaaatagaagacctcctgcgaaagggggcatatggtgcacttatggatgaagaagatgaagggtctaagttttgtgaagaggatattgaccagattctccttcgacgaacccacactatcaccattgagtctgaaggaaaaggctccacatttgctaaggccagctttgttgcgtctggaaataggacagacatttctttggatgacccaaatttctggcagaagtgggctaagaaggctgaattggacatcgatgccttaaacgggaggaacaacctggttattgacactcctcgagtgaggaagcagacccggctatacagcgcagtgaaggaagacgaactgatggagttctccgacctggaaagcgactccgaagaaaagccttgtgcaaagccacggcgcccccaggataagtctcagggctatgcccggagcgagtgcttcagggtagagaagaatctgctggtttacggctggggccgctggacagatatcctgtcccatggacgctacaaacgtcagctgactgagcaagatgtcgaaaccatctgcagagcgatcctggtgtactgtctcaaccactacagaggggacgagaacatcaaaagctttatctgggacctcatcacacccacggcggatggccagactcgggccctgctaaatcattccggtctgtcggcccctgtgccgaggggccggaaggggaagaaggtgaaggcccagagtacgcagccagtagtgcacgatgctcactggctggcaagctgcaacccagacgccctgttccaggaggacagctacaagaagcacctgaagcaccactgcaacaaggtcctgctgcgtgtccgcatgctgtactacctaagacaagaagtgataggagaccaggcagagaagatcctcgagggcgctgactcaagtgaagcagacgtgtggatccctgagccattccatgctgaggttcctacagattggtgggaccgagaagcagacaaatccctcctaattggagtgtttaaacatggctatgagaagtacaattccatgcgagctgaccctgcactgtgcttcctggaacgagtcggaatgcccgatgccaaggccatcgctgccgagcagagagggacagacatgctagcagatggtggcaagcacagcgagagcaatgctgagttaggtcagctctactggccgaacacgtcaaccctgactacgcgtctgcgccggctcattactgcctatcagcgcagctataaaaggcagcaaatgaggcaagaggccctaatgaagacggaccggcgcagacggaggccccgggaggaagtgagagcgctggaggcggaaagggaagctattatatctgagaaaaggcaaaagtggacgagaagagaagaagcggacttttaccgggtggtatccaccttcggggttatttttgacccagtgaaacagcagtttgattggaaccaattccgagcctttgccagactagacaaaaagtctgatgagagcctggggaagtatttcagctgctttgtggccatgtgcagacgggtgtgtcggatgcctgccaagcccgaggacgagccacctgacctcgcctcccttatcgagcccatcacggaggaacgagcatccaggacactgtaccgcattgaactgcttcgcaagatccgagagcaggtccttcatcacccacaactaagtgacaggctgaagctctgccagcccagcctagatctgcccgagtggtgggaatgtggacggcacgacagggacctgctggtgggtgctgctaagcacggggtcagccggacagactatcacatcctcaacgaccctgagttgtccttcttagatgcacacaaaagctttgctcagaaccgtggggccagtaccgtccctcctttgaatactctggccatgggctttggccagactcctccagtcatttcctctgctcacgttcacgaagaaaaggcaatggagcaggctgaaggcaaggcagaggagtgtgaacactcaccggccaaagagaggtcggatgggaaagaggaggaagaagaagcaggcggggccaaggatggcaagcaggaatgtgaggtcgaggccagctctgtgaagggtgaactcaaaggggtggagggcagtgcagaccctgggtccaagtctgtctcagagaagggctcagaagaggacgaagaagagaagctggaggacgatgataagtcggaggagtcgtcgcagccagaaggagccgtctcgagagggaagactttcgatgaagaaagcaatgcttctctgagcactgctagggatgaaacccgagatggattctacatggaggatggagatgcttcggtggctcagctccttcatgaacgaacatttgccttctccttttggcccaaggacagagtaatgataaaccgattagacaacatctgtgaagctgtgttgaaaggcaaatggccagtaaatcggcgccagatgtttgatttccagggccttgtccctgggtacccaccctccgccgtggacagtcccctgcagaagaggagctttgccgagctctctatggtcagccaggccagcatcagtgcgagcgaggacatcaccacgtctcctcagttgtccaagcggcggcggaggagaaggaaagttgaaatcgaggctgaaagagctgccaagaggagaaaccttatggagatggttgcccagcttcgagagtctcaggtggtctcagaaaatggacaagaaaaagttgtggacttatcaaaggcctcgagagaggcaacaagctctacctcaaatttctcatctcttacttcaaagtttatcttgcctaatgtctccacgccagtgtctgatgcctttaagtctcagatggagctgctccaagcaggcctttcacgcacacccacaaggcatatgctcaatggctccctggtggatggagagccccccatgaagaggaggcgaggcaggaggaaaaacgtggagggcctcgacctacttttcatgagccacaaacggacgccgttaagtgcagaggatgctgaggtgaccaaagcttttgaagaagatatagagaccccaccaataagaaacattccttctcctggacagctggaccccgacacccggatccctgtgataaaccttgaagatgggactaggctggtgggagaagacgctcctaaaaacaaggacttggttgactggctgaagctgcaccccacctacactgtcgatatgccgagttatgtaccaaagaacacagacgtgctgttttcctcgtttcagaaaccgaaacagaaacgacatagatgtcgaaatcctaataaattggatattaacactttgacaggagaagaaagggttcctgttgttaacaaacgaaatgggaagaagatgggtggagccatggcccctccaatgaaggacctgcccaggtggctggaggagaaccctgagtttgctgtcgctccagactggaccgatatagtcaagcagtctggttttgttcccgagtcaatgtttgaccgtctcctcactggacctgtggtgcggggagaaggagccagcaggagaggacggaggcccaagagcgagatcgcccgagcagccgcggcggctgctgctgtcgcctctacttcagggatcaaccctctgttggtgaacagcctgtttgctgggatggacctgacaagccttcagaatctccagaacctccagtccctccagctggcagggctcatgggcttccctccaggactggccacagctgccaccgccggaggcgatgcgaagagccccgccgcagtgctgcccctgatgctgccagggatggcgggcctgcccaacgtgttcggcttgggcgggctgctgaacaaccctctctcagctgctactggaaacaccactactgcttcaagtcaaggagagccagaggatggcacttccaaagcggaagagaaaggaaacgacaatgaagacgagaaccgagactctgagaaaagcacagacaccgtttcggctgctgactccgcgaacggatctgttggtgctgctactgccccggctgcgttaccctccaacccgctggccttcaaccctttcctcctgtccaccatggccccaggcctcttctacccatccatgtttctacctccaggactggggggattgacactgcctggcttcccagcactggcgggactccaaaacgccgtgggtaccagcgaagaaaaggctgctgacaaggccgagggagggccctgtaaagacggagagaccctggagggcagcgatgccgaggagaacctggacaagactgtagagtcctccatcttggaagacgaggttgcacagggtgaagagctggactccctcgaaggcggggatgagatagaaaacaccggaaacgacgagtaa

SEQ ID NO: 39 - protein, 2910 aa, Mus musculus
KKMADPGMMSLFGEDGSLFSEGLEGLGECGYPENPVNPMGQQMPIDQGFPSLQPSLHHPSPNQNQTKLTHFDHYSQYEQKMHLMDQPNRMMGSAPGNGLDHSQYHTPPVPQVPHGGGGGGQMGVYPGIQNERHGQSFVDGGSMWGPRAVQVPDQIRAPYQQQQPQPAPSGPPAQGHPQHMQQMGSYLRDFSMQQHGQPQQRMGQFSQGQEGLSQGSPFIATSGPGHLSHMPQQSPSMAPSLRHPVQQQFHHHPAALHGESVAHSPRFSPNPPQQGAVRPQTLNFSSRNQTVPSPTVNNSGQYSRYPYSNLNQGLVNSTGMNQNLGLTNSTPMNQSVPRYPNAVGFPSNSGQGLVHQQPIHSSGSLNQMNTQTMHPSQPQGTYDPPMSPMKAMSNPAGTPPPQVRPGSAGMPMEVGSYPNMPHPQPSHQPPGAMGIGQRNMGPRNMQQPRSFMGMSSAPRELTGHMRPNGCPGVGLADPQAIQERLIPGQQHPGQQPSFQQLPTCPPLQPHPGLHQSSPPHPHHQPWAQLHPSPQNTPQKVPVHQHSPSEPFLEKPVPDMTQVSAQNAQLVKSDDYLPSIEQQPQQKKKKKKNNHIAAGDSSKGFGKDDFPGGVENQELRRNSLDVSQEEKKKKKRPKVKKDPKESKEPKEKKEPKTPKAPKIPKEPKEKKAKTVTPKPKSSKKSSNKKPDSEASALKKKVNKGKTEGSENSDLDKTPPPSPAPEEDEDPGVQKRRSSRQVKRKRYTEDLEFKISDEEADDADAAGRDSPSNTSQSEQQESVDAEGPVVEKIMSSRLVKKQKESGEEVEVEEFYVKYKNFSYLHCQWASVEDLEKDKRIQQKIKRFKSKQGQSKFLSEIEDDLFNPDYVEVDRIMDFARSTDDRGEPVIHYLVKWCSLPYEDSTWELKQDIDQTKIEEFEKLMSREPETERVERPPADDWKKSESSREYKNNNKLREYQLEGVNWLLFNWYNMRNCILADEMGLGKTIQSITFLYEIYLKGIHGPFLVIAPLSTIPNWEREFRTWTELNVVVYHGSQASRRTIQLYEMYFKDPQGRVIKGSYKFHAIITTFEMILTDCPELRNIPWRCVVIDEAHRLKNRNCKLLEGLKMMDLEHKVLLTGTPLQNTVEELFSLLHFLEPSRFPSETTFMQEFGDLKTEEQVQKLQAILKPMMLRRLKEDVEKNLAPKEETIIEVELTNIQKKYYRAIKNFTFLSKGGGQANVPNLLNTMMELRKCCNHPYLINGAEEKIEFKETHNAESPDFQLQAMIQAAGKLVLIDKLLPKLKAGGHRVLIFSQMVRCLDIDYLIQRRYPYERIDGRVRGNLRQAAIDRFSKPDSDRFVFLLCTRAGGLGINLTAADTCIIFDSDWNPQNDLQAQARCHRIGQSKSVKIYRLITRNSYEREMFDKASLKLGLDKAVLQSMSGRENATNGVQQLSKKEIEDLLRKGAYGALMDEEDEGSKFCEEDIDQILLRRTHTITIESEGKGSTFAKASFVASGNRTDISLDDPNFWQKWAKKAELDIDALNGRNNLVIDTPRVRKQTRKAVKEDELMEFSDLESDSEEKPCAKPRRPQDKSQGYARSECFRVEKNLLVYGWGRWTDILSHGRYKRQLTEQDVETICRAILVYCLNHYRGDENIKSFIWDLITPTADGQTRALLNHSGLSAPVPRGRKGKKVKAQSTQPVVHDAHWLASCNPDALFQEDSYKKHLKHHCNKVLLRVRMLYYLRQEVIGDQAEKIGADSSEADVWIPEPFHAEVPTDWWDREADKSLLIGVFKHGYEKYNSMRADPALCFLERVGMPDAKAIAAEQRGTDMLADGGKHSESNAELGQLYWPNTSTLTTRLRRLITAYQRSYKRQQMRQEALMKTDRRRRRPREEVRALEAEREAIISEKRQKWTRREEADFYRVVSTFGVIFDPVKQQFDWNQFRAFARLDKKSDESLGKYFSCFVAMCRRVCRMPAKPEDEPPDLASLIEPITEERASRTLYRIELLRKIREQVLHHPQLSDRLKLCQPSLDLPEWWECGRHDRDLLVGAAKHGVSRTDYHILNDPELSFLDAHKSFAQNRGASTVPPLNTLAMGFGQTPPVISSAHVHEEKAMEQAEGKAEECEHSPAKERSDGKEEEEEAGGAKDGKQECEVEASSVKGELKGVEGSADPGSKSVSEKGSEEDEEEKLEDDDKSEESSQPEGAVSRGKTFDEESNASLSTARDETRDGFYMEDGDASVAQLLHERTFAFSFWPKDRVMINRLDNICEAVLKGKWPVNRRQMFDFQGLVPGYPPSAVDSPLQKRSFAELSMVSQASISASEDITTSPQLSKRRRRRRKVEIEAERAAKRRNLMEMVAQLRESQVVSENGQEKVVDLSKASREATSSTSNFSSLTSKFILPNVSTPVSDAFKSQMELLQAGLSRTPTRHMLNGSLVDGEPPMKRRRGRRKNVEGLDLLFMSHKRTPLSAEDAEVTKAFEEDIETPPIRNIPSPGQLDPDTRIPVINLEDGTRLVGEDAPKNKDLVDWLKLHPTYTVDMPSYVPKNTDVLFSSFQKPKQKRHRCRNPNKLDINTLTGEERVPVVNKRNGKKMGGAMAPPMKDLPRWLEENPEFAVAPDWTDIVKQSGFVPESMFDRLLTGPVVRGEGASRRGRRPKSEIARAAAAAAAVASTSGINPLLVNSLFAGMDLTSLQNLQNLQSLQLAGLMGFPPGLATAATAGGDAKSPAAVLPLMLPGMAGLPNVFGLGGLLNNPLSAATGNTTTASSQGEPEDGTSKAEEKGNDNEDENRDSEKSTDTVSAADSANGSVGAATAPAALPSNPLAFNPFLLSTMAPGLFYPSMFLPPGLGGLTLPGFPAGLQNAVGTSEEKAADKAEGGPCKDGETLEGSDAEENLDKTVESSIDEVAQGEELDSLEGGDEIENTGNDE

SEQ ID NO: 40 - DNA, 85272 bp, Homo sapiens
  misc_feature (1)...(85272): n = A,T,C or G
caggagggatggcctgctttttggtcattatcagtagtgatgtgagataatggtcacaaaagaggtttgtgagtatggaggcaaggtatgtagatggtattcttttctgttggttttttaaaaaatgctaggtttcactctatttttttgaactttagcccgattttactgagctttataggcgtttcatcaaggttgacgctatgtgggggtttcttatatgagttaatgagaaaaatatttagagtagtgcctggtacatacccagggctatgtatgtttctgctgttgttattgctattacttgtactgttgtaactagaccagttaacaattataagtaacctaccagagtaggctctagaaatgtaaacgtaataagacacagtttcttctctgcttgagcttacatgatagttggagaaagacacacatatagtgctttgattttaatacattgcagtaatgttaccaccaacttttgtgtattttatatatcccttgtatggggtacatcatgtgacatgtgggtggagtgaggagatcatgtctgatctagaccatggtgattagaaaatgcttacttggaatgagtggtgtccgcgcagggtcttgcagatgagtaggttgggataaaagtgtaagtagaagagatacatgtgtgttttggggaatagttctgtatgcctggaagcataagaggcaaaggttctggtacacccatatggagaatctcagacattatatgtagaggtttgaaacagaggaatgccccagtcagatttgccttccagctggttactctggtgacttgagatgagttttcaggtgatgttttggtggcattaccatgatgctgaggtgggaaatacaggagacagagcaggtttaggagaggaatgagggcagacatgatttcttcagtgctggtgccattcagggctggaatttacaggtgttccctgcacatggcctagttattcttccaactcacaggctgccatgtggctgtcggcttgagctaggcccatgagtagccatcactgcagctgttagaggagtcttgtggttctgtatctgcgtcaagcagctcagtggccttatcttcaatattgcaatgttggtttaaggaatgttacttcttaaagacattctcatccccctgacctagaacagtggcccttttcatacattccagcttctgttgtaatttggaagaggaatatatgtctgtgttttgagtttgacattataaaagactagttttgacccttacggatataaatgataactatgcatgtggactctatgtcctttctccaccggtctgatgttgtatagccctgcatgtggggtgtgagggtgatgaggcagtggggagctgttgtgattaatagcctgggcgggaaatgatatgtgtctgaactaaagcagtggtcatgggcatggggaggagtgcactgtgggtctgtttgcttgcttattcttttagctagtgcttaggaatgtcgatgaaggctcttccttctatgtatgttgcttggatgaagtcatcctcagtgaagggggtcctgtctgtaagtctctgcagttgaatcggcccaaatgggtctgagccatgaccagagaatactttccagactcagctgcttgtttttcacatgggtgtggatgttaactatctgtgccattttctcatttaaacctcataataaatcttggaagactgtataaaatattaacgttattttacagatgaggaaactgaggctcagacaaattaagtaacttatccatggtcccagcctataaatgacagttcgaactggaactaaggtttgtcttgactcatatcagtgctcatatccaccattctagattacctttgtttgttaaaagaaaaatcttgacttggatatttttgggcaaagcagttttaatacaacacttagttgaaaaatctcaattagcttattgcagaatagtagcaaaggcaatttaatttacataacttaattttgtccttgatggaaatgttggagggtggacactgaagattttgttgctttttttttgacttcctagggtgttctttgatttgtatattgatggatggaaatgcttagctgtccgttaacaacatgaatagtgaaaggtctgatgagtttagaaatctttccatactcagatctgggataagtgcttcccttatctacaggctttttgtctaaacatttggagagggactgtctgactttcagctatcttggaggttccatacagttcattcttgggaagggcagatggaaaatcattagcacttctctccttcagcaaattgatgtttcctcaaacctgggctctggtcggtttccagatagtaagccttttactcctgtaggaccacgcatgcagggcccggcagccctctaaattaaaccgtgtacatcgctctggtatagagaggtcactgtgaaaagcgcgagctgccaactcactttacctggcagtggttcaactctttgacaggcctacctctgatttaaacaaatttgagaaatatgtaaagttttggaagcagttttgcactgatttgataaaagaaaccacaaaacactgcagcgcaggtgttgagaatgtttgaaagctgattgagggaagcagatggctttagtcagtggcatccagccaaaagagcaggtgctggtcatgtgaccgctggttaccagggtaatctgattgctcttggcgtgcagatgaaaggaaaggggcccagtgttcagctgtagtattgtataatttgtggcagttagagcggaaataaatgctggaaatggaacctcatagtaggggagacttctgtccatgtgtagcgtaaacactaggacagttggatgaggaacggttgtatggatttttttttttaattttaaaaatattatgctttctgtggatctttcggagacagtttttagagcacggccttttttcttttcttttaaataaaaataactttttaaacctaactgccatttgctataatcttgaattgttattttcttatgtagctatttactatgctaaaatgttaacaaaataaaactctgagtattaagaataactagtttaagatgatcaaatattttatttagttgaaaaaatacattttaggtgtgtgatgggtagtttattaacaatacttttgaaatattttacatgacatatgctttattctaaaagcctatagatatcttggcttcttccttttgtagtagctgagggtaaaaacatgctgtttaatgcattctgtcagcacattttcctgagaacttacaaacttcaataaataaaatttttgaaggtttttgaaatacagcttttgtttttcacaatttattggaatttgaggctccctagaaatattttttaaaaaatcattactgaggttggattattttcagtgttggataacaaatagtaattggtgttagaaaatttgcaactgatggccgggcacagtgactcaatgcctgaaatctcagcactttgggaggccgaggcaggtggatcacctgaggtcaggagttcaagaccagcatgaccaacatggtgaaagcccgtctctactaaaaatacaaaattagctgggcatggtggtgcatccctgtaatcccagccacttgagaggctgaggcaggagaatcgcttggacccgggaggcggaggttgcagtgagccaagatcacgccgttgcattctagcctgggcaacaagagtgaaactgtgtctcaaaaaataaaaaaaaaactggagctgatttggaaatagaaatggaaggtagcgctaaatgtacataaagtcaggtaaaggttctagaggtaatggcaaatgtaaaacatttttttcttgaagtttatgtcttttgtcttatataatattcaaattctaataacatttgtcagcaacatactatgaaacatgcactttattagggttgctttactgtatttttatatttcagagaactgtctttcaaaaaaagggctaattgtgattatctcaaaaaacacgtagcaccaaaataaagcttatatttaattaagaacacagtacctactaaaattatgtacaacaggaaattgctatgtatttttattacattctaaaagattataagttgaacaaaaatgtaactggatggtataaaagaggataccttctagtactggtcaaaagaatacttaagtatgtaaaactatccacaaaaggcacaaagagaagatcatgatatcgtttttcatgacaattaaaaaaaagtgttctgtaccttaaaaattcgatagcaaaactacttcttaatctgattttttattatggcttgatatactggcaggcattttgcacaaatgtactatgtgtggtattagtttttgcatgcagtttatttttaattaggtcatatatttgctaaaagtcattaatatggagttttgccaggaaaacttaattgggagttgcatttaactgtaaatagccaatatgtatggatttatcagttgtcattgatacttttgggatattaatgtgggaaatataagagacatgcagaaacacattaaaagtgaacactaagcgatccactttgaattctagtaataagaaacctgactcagaagcaagtgctttgaagaaaaaggtcaacaagggaaaaacagaaggttctgaaaattnnnnnnnnnnnnnnnnnnnnnnnnnnnnnnnnnnnnnnnnnnnnnnnnnnnnnnnnnnnnnnnnnnnnnnnnnnnnnnnnnnnnnnnnnnnnnnnnnnnnnnnnnnnnnnnnnnnnnnnnnnnnnnnnnnnnnnnnnnnnnnnnnnnnnnnnnnnnnnnnnnnnnnnnnnnnnnnnnnnnnnnnnnnnnnnnnnnnnnnnnnnnnnnnnnnnnnnnnnnnnnnnnnnnnnnnnnnnnnnnnnnnnnnnnnnnnnnnnnnnnnnnnnnnnnnnnnnnnnnnnnnnnnnnnnnnnnnnnnnnnnnnnnnnnnnnnnnnnnnnnnnnnnnnnnnnnnnnnnnnnnnnnnnnnnnnnnnnnnnnnnnnnnnnnnnnnnnnnnnnnnnnnnnnnnnnnnnnnnnnnnnnnnnnnnnnnnnnnnnnnnnnnnnnnnnnnnnnnnnnnnnnnnnnnnnnnnnnnnnnnnnnnnnnnnnnnnnnnnnnnnnnnnnnnnnnnnnnnnnnnnnnnnnnnnnnnnnnnnnnnnnnnnnnnnnnnnnnnnnnnnnnnnnnnnnnnnnnnnnnnnnnnnnnnnnnnnnnnnnnnnnnnnnnnnnnnnnnnnnnnnnnnnnnnnnnnnnnnnnnnnnnnnnnnnnnnnnnnnnnnnnnnnnnnnnnnnnnnnnnnnnnnnnnnnnnnnnnnnnnnnnnnnnnnnnnnnnnnnnnnnnnnnnnnnnnnnnnnnnnnnnnnnnnnnnnnnnnnnnnnnnnnnnnnnnnnnnnnnnnnnnnnnnnnnnnnnnnnnnnnnnnnnnnnnnnnnnnnnnnnnnnnnnnnnnnnnnnnnnnnnnnnnnnnnnnnnnnnnnnnnnnnnnnnnnnnnnnnnnnnnnnnnnnnnnnnnnnnnnnnnnnnnnnnnnnnnnnnnnnnnnnnnnnnnnnnnnnnnnnnnnnnnnnnnnnnnnnnnnnnnnnnnnnnnnnnnnnnnnnnnnnnnnnnnnnnnnnnnnnnnnnnnnnnnnnnnnnnnnnnnnnnnnnnnnnnnnnnnnnnnnnnnnnnnnnnnnnnnnnnnnnnnnnnnnnnnnnnnnnnnnnnnnnnnnnnnnnnnnnnnnnnnnnnnnnnnnnnnnnnnnnnnnnnnnnnnnnnnnnnnnnnnnnnnnnnnnnnnnnnnnnnnnnnnnnnnnnnnnnnnnnnnnnnnnnnnnnnnnnnnnnnnnnnnnnnnnnnnnnnnnnnnnnnnnnnnnnnnnnnnnnnnnnnnnnnnnnnnnnnnnnnnnnnnnnnnnnnnnnnnnnnnnnnnnnnnnnnnnnnnnnnnnnnnnnnnnnnnnnnnnnnnnnnnnnnnnnnnnnnnnnnnnnnnnnnnnnnnnnnnnnnnnnnnnnnnnnnnnnnnnnnnnnnnnnnnnnnnnnnnnnnnnnnnnnnnnnnnnnnnnnnnnnnnnnnnnnnnnnnnnnnnnnnnnnnnnnnnnnnnnnnnnnnnnnnnnnnnnnnnnnnnnnnnnnnnnnnnnnnnnnnnnnnnnnnnnnnnnnnnnnnnnnnnnnnnnnnnnnnnnnnnnnnnnnnnnnnnnnnnnnnnnnnnnnnnnnnnnnnnnnnnnnnnnnnnnnnnnnnnnnnnnnnnnnnnnnnnnnnnnnnnnnnnnnnnnnnnnnnnnnnnnnnnnnnnnnnnnnnnnnnnnnnnnnnnnnnnnnnnnnnnnnnnnnnnnnnnnnnnnnnnnnnnnnnnnnnnnnnnnnnnnnnnnnnnnnnnnnnnnnnnnnnnnnnnnnnnnnnnnnnnnnnnnnnnnnnnnnnnnnnnnnnnnnnnnnnnnnnnnnnnnnnnnnnnnnnnnnnnnnnnnnnnnnnnnnnnnnnnnnnnnnnnnnnnnnnnnnnnnnnnnnnnnnnnnnnnnnnnnnnnnnnnnnnnnnnnnnnnnnnnnnnnnnnnnnnnnnnnnnnnnnnnnnnnnnnnnnnnnnnnnnnnnnnnnnnnnnnnnnnnnnnnnnnnnnnnnnnnnnnnnnnnnnnnnnnnnnnnnnnnnnnnnnnnnnnnnnnnnnnnnnnnnnnnnnnnnnnnnnnnnnnnnnnnnnnnnnnnnnnnnnnnnnnnnnnnnnnnnnnnnnnnnnnnnnnnnnnnnnnnnnnnnnnnnnnnnnnnnnnnnnnnnnnnnnnnnnnnnnnnnnnnnnnnnnnnnnnnnnnnnnnnnnnnnnnnnnnnnnnnnnnnnnnnnnnnnnnnnnnnnnnnnnnnnnnnnnnnnnnnnnnnnnnnnnnnnnnnnnnnnnnnnnnnnnnnnnnnnnnnnnnnnnnnnnnnnnnnnnnnnnnnnnnnnnnnnnnnnnnnnnnnnnnnnnnnnnnnnnnnnnnnnnnnnnnnnnnnnnnnnnnnnnnnnnnnnnnnnnnnnnnnnnnnnnnnnnnnnnnnnnnnnnnnnnnnnnnnnnnnnnnnnnnnnnnnnnnnnnnnnnnnnnnnnnnnnnnnnnnnnnnnnnnnnnnnnnnnnnnnnnnnnnnnnnnnnnnnnnnnnnnnnnnnnnnnnnnnnnnnnnnnnnnnnnnnnnnnnnnnnnnnnnnnnnnnnnnnnnnnnnnnnnnnnnnnnnnnnnnnnnnnnnnnnnnnnnnnnnnnnnnnnnnnnnnnnnnnnnnnnnnnnnnnnnnnnnnnnnnnnnnnnnnnnnnnnnnnnnnnnnnnnnnnnnnnnnnnnnnnnnnnnnnnnnnnnnnnnnnnnnnnnnnnnnnnnnnnnnnnnnnnnnnnnnnnnnnnnnnnnnnnnnnnnnnnnnnnnnnnnnnnnnnnnnnnnnnnnnnnnnnnnnnnnnnnnnnnnnnnnnnnnnnnnnnnnnnnnnnnnnnnnnnnnnnnnnnnnnnnnnnnnnnnnnnnnnnnnnnnnnnnnnnnnnnnnnnnnnnnnnnnnnnnnnnnnnnnnnnnnnnnnnnnnnnnnnnnnnnnnnnnnnnnnnnnnnnnnnnnnnnnnnnnnnnnnnnncattctacagaccaggagtccaaggtccacaaaattacttgtccaaggtcacatgataagagtcggggcaagttcaaacaagagcacttagctctaggacttacaaggtcaaattgccacctgggatgtgggaaagtattgcagatggcagaatactctgctggaatctctgtttcctccacctgggattgatctgggcagtgccaaagctttgtcctgtagaggagggtcccaggaggaacctctggcccatgtcactactccctccatgtaagccacaaggaagtctcttaataaactttttctagaatggtctcacatcagaaaagtactttgcacctctgtggccacagctgtgtgtggcttggagctaacaatatctaactatctatttgatggtcatattataccgagtttgtatcgtgaactgtctcaaatccctttttaagagcagggagaacataaacttaagattaaaatcaatcagtcccactctttggggaaaagtactgggattgtgttcatcctgacttgagaaatggtagtgcctgtcttgccttaggtgcacacaatgaatgttttgcctctctctgccttactttctcaactttaacattcttgagactctttaaaaagtgttatttcataattcttagaaaaaattttgtgtcaaaattttcctcaatatttttatttcttctttgtgctttgcaaactcattccataggttgtaatattcttgaattcattagcagcttaaaactttacatgtgtcattttcaaatttagatttgacatacatatatgaataaaaaggttatttctccttattaattagcttccaaaatgaattctttgacaaaacagttaaataatatagaattattctgaacagagttcagaacctcttgttctgttccatttgcttctctccccatctttatagctattaataatctgttgtctgtcttttcacattccttatttaaagccatgtacatatacattcatcttttagcaaatactcattgaggcatagagaagtaaacaagatatacagtctttttgtcttaagaagttaatatatcgatgaactgcacgtctaaatagatacacaacattttttatttatcttaaatagaatcttaagctacttcttgttatgtggcttgtttttcttcttattttacaattagtcttgcagatattcccaaacttcctggaagtgaaagtagtgagtcaaaggtctgcatgtttaagttttgatagataggaccacattgtcctgcaaggactgtgtgggttgcattttgaccacaggattgtgagaatacccagtttgccagtgatcctgctaatactggctattaccaatctttttaattttaaccactatggtaaaaacattatattttaaaaagtaaaattactgtccatagtcattcattatgaattttgccatttaacccttcatctcttcagaaattttcagagtatttcttttaggatcaagattaaaatacaaaaaccttttatttaaaatggcctgaaatatctggggcaccttggttagtattataacaatatttgtatagaactttgtaatttacagattattttctaaagcactgattttttttggactttttatatgggaaaaatgttaaaatgtacaaaggtagagagagtagtataatgaacccctatagattcattagccagctccagtattgctgccacttttgatggacatactgactgactgaggaaccagatttgttatttccattttcccagttgaaggacatgtagctgggagtggcagggctacagctgtcccaggcatctgactccagatttccacccatttctattgtatttgttagcactgtgatcttttcacatcatatataggattagcattatcaccttttccttaagattaatttaaaaaaattcatccttccactctgcgccattataaagaacatttttctttttttttttttaagacgcagtcttgctctgtcgtccagactgcagtgcagtggcgaaatctcggctcactgcaagctccacctcgtgggttcgcgccattctcctgcctcagcctcccaagtagctgggactacaggcacccgccaccacgcccggctaattttttttgtatttttagtagagacggtgtttcaccatgttagccaggatggtctcgatctcctgaccttgtgatccgcccgcctcggcctcccaaagtgctgggattacaggcgtgagccactgcgctcggccacatttttctttttaatcattaatttcaaggccactgtcttgggtttttgttttagaagagacggtccagcagacaggtgaagagaaagcgctacactgaagacctggagttcaagatttctgatgaggaggcagatgatgcagatgctgctgggagggattccccctccaacacctcccagtcagaacagcaggttagtaccagatctgtgggatttatggatgcattttaaagatggacttggactagaaatttcattgctgcaatctgagaagtgcagtggaagcattggactttcagcaggggaacatccacctaatgttggataatgtgctatgggaaattcgttgtttagcaatatcttttaaaaagccctgttcactgcaatttatttttatataagactgtgatatgtaatttgacacaattttggagaattaatgttctatgctgaggaagagtcagagttggaatataaggaggctgaatatacctctgagaattcagtgctgtggcttctgggactttaataaaccactcaagcttgtctcctgctgttaggcactgtgagaacccctttatgaaattactgccttgtagtacccagcagggtgtactttattctctgtgcaatgtaaatgatggataaaacagtttgtataaaatatgggtagtgtaggattgattattgtaaagatcttttctaaaaaaataatgcttttttcttattgaaaagtatattaaatgcatctttgcattttatttggtaatttgttctatgttaagttgttacataatgttttatgtgacctccatagataaaagatgcctactatagcagaatgatgagtatatttaccccatgggtatagatgaagaaaagttatatttttgactgctaacgtgcagagattattttgtcttggtggctagaatttctgattgctctctagctttagggacctaggctggtccacgtaattaaaccatataatcatgaagtaatattaagcacagatctcctttttgcctttcagtagagtgagatttttgttcctttcaatcgtgtttctcactgataactttgtacccagtgacttaaaaggtgtggaggtggtagcaaaggggaatgatttcttgctcttatagcttaggatgagatgttttctatttggattgatgcacatgcctttttttttaggaatctgttgatgcagaaggcccagtggtagaaaaaattatgagcagtcgttcagtaaaaaagcaggtgagtgccattggagccattaaaatctgtgaggtgtatgtgactcttacaggattgttggctttgtaattttcttttaaaattctaatattgtaaaataaaacttccagtaatatttctaatcctgtctaatttattaacccaatatgaatctttgggatatttgaccccagatgaaattaaaatatatcaagcagtcagtgctttattacaccattcagagtggactagaaactcacaagtctccaaataaatgtatgggactttcagagttgtagactgcctttttcataaatattattcataaaaatcaaaacatgaatttacttctaatctctctcaggaaggttcccccctctttcatgttaggatggaaattctgtttgtcattttagcaagtaggtgttttctcatgtgttttgtaacattttctcatatacaattgaattattcattagtgtctttcttgccagtgcaaaggtgaaatacaggtctattttcagtgtaattttaagaaatagttttgacttaatacttcagagttattcaaagtttctgttcatctgcaaaggtgagctctaagtatctgtcactagcctgctagctttgtcactgaggtactcatatgctctttaacaaaaaaatgccagtgacataccgtgttttcttttcctgatgaaaattccctgttttagctaactcccttcttacagcccactttgagaaaatgctttgcttagtttgaataattacataaacctgcaggtgcattaggtattacaacatgcagtttttcgtgtctctaggaagtagtctcctttagacataggtgtctgtgtcgcagcttcagtcattatcaattccacacagttcttttgtttttatttgctttcaagaaggatggaactacaagttcatgtttcagcatgtaaaacaaactttaaaaaataatatataataaagacatggtctagctgcgaactcctgggctcaaacatttctcctgccttgggctcccaaactgctgggattacaggtgtgagccatcctgcctaaagttgtttatttttagcaaaatgtatacaaagtatctcccagtaagagagttgaggaatggaggatttacaggactcagtgagagtcctataataaagtgagatcccaggcttatcaaataggaaaccattactattcaaatactgctattgagtgatccttgaacatgttattgcaccagcagtaaacttctctttactttcatttcattagtttgttttgctattgtgtgattcaaggtatgaatttttatcggaatatacatctctagtttataagaaaataatttagagcagtatgtcaaggtgttttccagttgagtataggggatacggggtatggagtgactggccatcttggtgactctttgaatgtgaagatttcctgatgaattaaatttcccacctgctcaagtaggaaacaagcactatttaactcattagaaggttgcatttttgtcctactaatgactcctagaactgctaatttatgaattgtagatatacagtaaaatttaaatacttgacatgctttgaagaacaatccccttcactgaattgaagtgacttgtttgagtaaatagcatgtcgtttagatgggatatattaattttcattcaattggtagtgcttcagcaggcatactcagcaggtttaggggttgcaaattataattagctctattattcagagctatttagactatatattatgtagaacattgctttttctttctgttttgcccactttagggtttttgtcttcttttcctctttagctaccttttaaaaataggtacccatggtttaggaatagatactgttaaccatttaccgatgactgggtttgtcttatcataggagattaaaaatcactgtacaggagggtggacatttgttgagttgatgaatttgaagctggagaaaattaatggaaaaaattcttctggaagggagatatgctttgaggtatgatttaaaataaagaagagatgtggagctcatggaattgcttgtcagttactggtatttcttaaagggcaataaaaaaatccattagaaggtactaaacattaacaggtgctaactttttaaactgctaatattctcaaagtagatactttagttatcacctttaataacattggaagaaagtgttgcaaatagaaacaaaaggaaatttgagattttttgtggattcaatctatgcctgctggtctgtttcttattaccatgaataatttaataattggcagtgagaaggtgtctttatctctgccaggcagcactgtagaaactggctatgagctctcagagcctgtccctgcatggtgttgacccagagtggagactccatgtttttcaaagtcagttgacctcatcactgtggcctgagaagcatcatgatccattatgatggagttgtgcaaacataaaactcacctggcagaggcaccgtaagtcagcacctcatgttaaataggggtggctcaagcatttatgttgttctaaacccaggttaatgtctgtgatacctagttgcatgaaatagttggtgcctatttgaattttgaggtagatatatgagtagatacttggattgtataaagcctaattattttgttttccttgtttagtcagcttgtagctgtttctgctttgagccattcatctttggaggataattcaaatccttttttttttgtatcagaaggccaaaagtagttttaaaagtgaattgtgactgtattccctaaaattctttatttttctttaagttaactacaggacgtattttcagagtgtgtgttttaagtatgtagctgagcctcctagagtgtaaagaaggcaaaactcttaatctcatccattgtcatgtccttattttttccctaagtgaactgtgatttggtgtctctagtaaagtatacagtagatagggccaaaagtgaaaagggattcatacccacgccttattgataactttattgaggtgctttttcattcttttgtgtattatttgacagagtgttctgtttttttgctctgtattttagtttcttgactgtgactacttaatttagtagtaggatgcataggaaaggcctaagttaggcctagacttctgggtggctatttagaatccaggtggctggagaactcatttattgccttctcaaagtttctggtttgtttgaacagtgggacaagtatggcttaatatgtttgaaactttaagtgtcatatgaataataaggatttccctagactaattttggatctaatgaaaagatatatacatttctcagaaaaattctatttaattcataatattactgggttctcaaatttaaaggtagctgctcaagaaataaatctgagtgttgtgtgtatgtatgggaatagttctttgacttagttattcattgcctatgcctgttgtagaatggcttctgaaaatagggcttagaggtgagaggttttagggtaggggctgtttgaagctgtcaacagaggctggtcaaactgcctcccatttagtaaataattgaaatgatgtttctgagggcttatgaattcacacacttttgttcaattgttttactgttcagtaaaagaaaagaggtcagcatgatcatatttatatgaaaggaacggtgaaaaacagctctatttatagttttaggggcaagaaggtggtgatccaatatgtgtggtccattaaacagaaccaagtgttgtattctgaaacatccaaaagataacaggccctgggacacttctgtaccagctccaggtgctgctaaatgaagtttcagaacctggttggttcctcctaggcagccctagactctcttgtcaggcatcttcacagcaggttcccagaggaatagctgatcatgacaagaaaatgggtagtaatgagagttggggacagatggctgtaagagtcagagctttctgggaacagacttgagacaaaataaaaagtgtctttactgttcaagatttgatcctgtatgtgttggtgcccacttagaattatgggatgatgagaccatttagaatgagaagaaaagggacagtatgggagaaaagatcagacagaagaatcaggagaaataatacgagcatagacatgataaatcttgtttatgatttataacatatatatcagttatataaatgatacatttgatacatttgaaggcattgaaaatgccttcaaaattgaaaaaatataattattatcagaagggcaaaagctcagacatttgagttccattcttgatttgaatttcatgataatgctgtgtgaagaatcaaaggatctagtttcatccttgcttctctttttccctgatcatctaccatctttttgtctttctgctggaagtctggttctatataaagataatatatcttaaaatgggaggctgggcgcagtggttcaagcctgtaatcccagtactttgggaagccgaggtgggcagatgatgaggtcaggagatcgagaccatcctgtctaacacggtgaaaccccgtctctactaaaaatacaaaaaaaattagccgggcatggtggcggggcctgtagtcccagctactcaggaggctgagacaggagaatggcatgaacctgcgaggcagagcttgcagtgagccgagattgcgccactgcactccagcctggatgacagagcaagactccgtctcaaaaaaaaagggagtagaatggggaaatattaaggctagagagaaaaaggtagggtgggtcttggatggatggccacttgaacttggtagtatttatttataaattaattccatgttccatttatgttgctggttcttgaagccatccaacaaacatttctttttattttggataactaaaagtttatgacatagaaggtgttctgatacattggtttaaaatagtgctttatagttattacgtttcatagatccattatggcacaaccagatattaatagatattgaccactcctgcatatccagactccttcttgatgatttctagacaggccaaaactgtttaaaatataggtttagctcggtgtggtggctcatgcctgtaatcccatcactttgggaggctgagacggggggattgcttgagcctaagagtttgagaccagcctgggcaacatggtgtaaaacccagcctacggaaaatacagaattagctgagcatggtgatgtgtgcccgtagtcccagctacttggggaggtggtagggaggggcaggggttgctgaggcaggaggattgcttgagcctgggaggttgaggttgcagtgagccatgtttgcaccactccactcaagcctgggtgacaaagcaaatcctatctcagaaaagaaagaaaaaaaattaggtttaactgttataagtgagagtttcaaagaaaagtttaagttcacaatctttgaaaatggtttgaaggttggagattgaggggactagtacctttgaacagatctgtgccagtctgttatccagtagaagcctttgcttttttgtttgttctttgccatgttcctacttgccttgattttcttcgaagcatttcggaggtggctgaacagccatacatgaccctcaaggcaggcttggggtctcttgtaagagtgtaaaagcaatccccaaacatctgtaagtggtgtttatattttagatccctgatttatctgatcaaatgttccagaaggaaattacatattatgacttgtttaagagnnnnnnnnnnnnnnnnnnnnnnnnnnnnnnnnnnnnnnnnnnnnnnnnnnnnnnnnnnnnnnnnnnnnnnnnnnnnnnnnnnnnnnnnnnnnnnnnnnnnnnnnnnnnnnnnnnnnnnnnnnnnnnnnnnnnnnnnnnnnnnnnnnnnnnnnnnnnnnnnnnnnnnnnnnnnnnnnnnnnnnnnnnnnnnnnnnnnnnnnnnnnnnnnnnnnnnnnnnnnnnnnnnnnnnnnnnnnnnnnnnnnnnnnnnnnnnnnnnnnnnnnnnnnnnnnnnnnnnnnnnnnnnnnnnnnnnnnnnnnnnnnnnnnnnnnnnnnnnnnnnnnnnnnnnnnnnnnnnnnnnnnnnnnnnnnnnnnnnnnnnnnnnnnnnnnnnnnnnnnnnnnnnnnnnnnnnnnnnnnnnnnnnnnnnnnnnnnnnnnnnnnnnnnnnnnnnnnnnnnnnnnnnnnnnnnnnnnnnnnnnnnnnnnnnnnnnnnnnnnnnnnnnnnnnnnnnnnnnnnnnnnnnnnnnnnnntcttcgtggccctggcccctcccagcacacggtgtgctcatcttacgtgaaggtcctttgctgctcttttcagtcctattttgtgctcatatgggagtaaatcattacttttaaaatattctagtagatggttttaaatacatgcctgaaattttcttttgttgcagaaggaatctggagaggaggtagaaattgaggaattctatgtgaaatacaaaaacttgtaagtaaattgtgattctgtttttaatggggggctatattttccaagtagtaaacgaccatttttttttaaagttgggaaattaagaaactttggtatgatttctttagtcatcatggcctgggaggccattttttaaccaacttttgtatgtttgatattttatgaatttttctggaaaatgtgtaattggtgtaaaagttgactaacttctgtgtataaccaataagtatttttttagagaggataaaaacttctacaataatagaaaaatgaataaagcagtatttccctgtcctctgatcatgaattctaccctgtggggctacacttcgtcccttcacctgtgcatagtgtgcgaggccctagagacaagaactctcctgtggaatgaaagctctagagaaccatgacatcactcaggttctaaaatgcagtgagctatagctttatctgtttttgtttgtttctgatatttatttagtagatttgaattcataacttaaaaatctgaattgaaaaacacggtgagttgttgtccttgtagattctgttgtaagcagtacacctggcccagacagatattgtgatgagctaggatgttttcagagtcagtaatcattctgctgaagaagactgaggccattttgtaacctaaataacaatcatagaacaaggacaaaaatgttcattgataatgtaaacattaaatttcttttttaccccttttaaggcaaagaactaaaccaccatattaatacattcttagggctttaaagagaggcttttgtgagttgctgtgcgaacagcctcagaaaatttaccccaccctagaaaatgaaagcatcaggtgccatgggttttctgtcattctctcttgttgtagttggcactgttaataaattgatgcacttctgaagaagttgtgagtaaaaccttttatcaagtaaaaagataaagaagtctctatcagttttatcatgagagttcaatgaaatacagtctgacaattttaaaaatgctcggaaaatgttaactgtcatcattcttttgtcctcagagcatgtcagtttacacatgtggaaattatgcctacaacacgatttcctatggtaaggaggaggtaaactaagtaaaccagagggagagagttcccttgtagatttaccaaattgaaacaagagcaaaggagttcaaatatcaatcaccaaaataatggcactaccagagagacctccagatcagtgtgtgacagtgaggcctgagctgcctccttccagtcagcctgttagtgaccccagagatgggctccgagttcctgaccaggtgccagtgccagaccaggagactctagccctcctcaaaagtcatttgaggtgaggtaaagggagttttgaaaaaaaaaaaaaaaaaagaaaaaaaaggttttctgactgtcattattgagagctaagagaaattaagatttccataaaactaagagtttttgttagccttatatttggatacaatttcacatttatagaaaaattgtaaaaaatagtacaaagaatttctgtttttctttttgtagttaatgtgtatcttccggaaagatactttaagacttaaatatggttgtggttgctaaggggtgatttactaattccatcatttcttctacattgattggttgggtttttaccgtaaggaagagctttaccctcttgtctgtttgttaatttatagctgagcggacttgtggcttctcattttattcaagggattataactctttactgttgtagtatttactttgcccacattatcccagatttggtcagtgggagccccttcagactggctcttctgtctttttgccttgtccccatttttctttgaacattttcttgctttctggcaccagaggatgttccaggctcatctcgtaacttccctgttttagttatggagtcagttacttctccaagaaggcttggttgttttcagtgaaggggggggcattgagaaaccaagattggggctttaggtgtgctcctcgttgctgaggaattgttgcttctagtccctctcagtggataggactgggagagagagagagtgtgtgtgtgtgtgtgtgtgtgtgtgtgtatcgagttacacacacacttatctgtttattatatacacacacatatttacctacctctccaacacaacagcaaaaacaatgtgtatatattgatacttccagtattattccagcagcccagggttcattctctcctttcccctttaatattagtaattcccttcttcaaccagaataaacctggctctcttattttttatgtttgctttttttcagtcctaacatatataggaagtgatttcagagttactagcccatatttctgtgacaaagaagcctatatttggttagctttttgtctttagtttgagggcatagggactaaaactttatccaaaatgtccttgggttggttattctcttttcctaccccaccagtgtggtttgttatttatttcaggggtccccagtccccaggccatggatcagtactggtcagtgtcctgttaggaacctggccgcacagcaggaggtgagcggcaggcgactgagcattaccacctgagctctgcctcttgtcagatcagcgtaacattagtttctcataggaacgtgaactctggttgtgaactgtgcatgcgaaggatctaggttttgtgctccttatgagaatctaactaatgcctgatctgaggtgcaaccgtttcattccaaactgccctccaccaaggacccgccccagtccgtggaaaaattgtcttccacgaaactggtccttggtgccaaaaaggttggggcctcatgatttatttgatacacagtatgtttctttagttttggtttgtatttgtattcccttttagccctcgcttgttgatttttattgtttttcaagtttgtgaaatattaatatgttacaaaagtcagaactatacacaaaagaagtgtagtcctccctttccaccccattcctgcttacttccttactaatcccaggtttatcctttctgtaatttttggcatgagcatgcaggtataatttcctcttcgttcttacaaaaaaagaaattggtatactgttagtacatttttgtgctttgctttttttcacactacatcctggaaatcactctacatctgttcataggggtcctcctcattctttgtttcagctgtataatattccattgcatgactgccgtaaccattcaaccagcctcctgtgtatgtgggtgtgtaagtggcttctgatgttttccaattacggataatgctacaatatatattctcatacatatctatatattttcaaattattggaggcatggcttccaggtgaattcccggaagtgagtttactagatacaaaaggcaaacatgtatgtatttttaagagatattgccaaattcccttccttcatgttgtatgaatttatgttcctgtcaacaaagtatgcaaacacctgtttccccacaacctttctaatatagtgtgctgttttactttttaatttttgtaagaaattgtatttcagttgaggttttaattagcattttctcttattgtgaataagaacaccttttcataagattaatggccactttttacatcttgctttgtcagttgtctgtgtcttttgctcattttctgtcatgctcaacttttaagagctctttatatataagggatattagttctttatcttgggttatatgttgcaactatcttatctcagtttcgattgtcttttgacttcatggtgtttattgcattgcccattaaaattttttgtacggtcagatttatcaattttttcttttattgtttctagctttagtgtcatagctagaaagcctttccctatatccagattacagaggaatttgtccatgctttccttgtggtttcattttatctatttaggtgcctgatccatttggtgtttattcttgtgtattgtgtaagtcatggctctaatttaattctttttcaattgttgttctagcaccattattaaagagtcaatttttggccaggcacagtggctcatgcctgtaatcccagcactttgggaggctgaggcaggctgatcacgaggtcaggagcttgagaccagcctggccaacatagtgaaaccccatctctactaaaaatacaaaaaattagctgagcatggtggcgggtgcctgtaatcccagctactcgggaggctgaggcaggagaatcgcttgaacccgggaggcagaggtggcagtgagccgagattgcgccattgcactccagctgggcgacagtgtgagactacatctcaaaaaaaaaaaaaaaaagagtccatttttgactcagtgatttgagatccaaactttattttgtcctaaagtttttatttatttattttatttatttttttatttttctttatctgtactttatgcctttgaactgcttgtctatttataagccagtaccacactgcttagggaggctttatagtgtattttaatatctggtagatctatttccctagtagcttttctgttttattgttttccgggatattcttgcatgtttatttttatatataaaatgtaatactgtttagccccatataaatgcctgtttgcattttatttatttacattgtgttaaatttacaaatgtatgatgttgagttacacagtgtgacaatgatgtcttttcagttggtccagttctacttttgtgtcttgtaagagttttaaatattttcttatacaaattgtacacatttttaattaaatttattgctaagtattttatctttgttggtattgtgaaagaggttttctctaacatatccccttattggtaattgttgttgtgaatgaagacaatttgttggcttctgtatgctaattttatattctgctacattgctggattattttattatatgaattagttttctaattgattctctagggttctccaggtacctgatcatataatctgcaaacagagatagctttacttattattttctaattattatgtctcttattgttttgacttgtcagttacattggctaataacctcaaatacaatattgaataacagtggagatagtaggtatccatgctttctgatttttgtggaaaactgtggtgtttcttcatttagtaagatcctgtctttagaaccaaaatcttcaaatatgtgttaacaaaatacctatcaattcctatcttcctaagctttaaaaaatccattatgggtgttaaagtttgtcaaatgtttttgcagtgtcaatagaaataattgtgtgatttttctccttagatatattaatattgtgtatttttagtgaatttcctaatgttgaaccaaccttgcattcctgaaataagtaactacttggtcatgacatattattgtcttaatgtgatgtggagttgtgtttgttaatattttacttatatttacttataactataaatatttataagtattataaatataaatatttactactttgcactgatatgggtaagggatatgctctttcttttttaactgtcaagattaggtataaatatatacctgtttcataaagagtagttacatttttaaatgaaattttgttttccaaagtgaccatacactgtattatctgtagggcctagttcagattatttcttattagcttcataatatttttcttacattgacttcttcataacttttaaaaaatattttagttctagtccagttaggacgttttcttgccttaattatctattcagacaaagcagtcgtatttttgaccctttattcttccttcctcttcttcctaagcctccagaatgggttatcatcagagtctagaaagcagagtcacactgaaaatttcatcccagtttatagcagataaagcagggctggagccacttgcttatatgcttgtgtccagttcaaggctacacaggtggtgctttgaaggcttttgcacctcagccaaggcaagaatactaactgactgactgcacatgtgcctttttctgtcaaataatttggagaccagagcagattatttttataatatgtgtttctttttgtgtgtgtgtggcagggggaagagggtctccctctgtcacccaggcttgaatgcagtggcgtgatctcagctcactgcaacctccacctctggggttcaagcaattctcccgcctcagcctcctgagtagctgggattacaggcacatgccaccacggcctagctgatttttgtatttttaatagagttgggttttcaccatattggtcaggctggtctcgaactactggcctcaggtgatctgcctgcctcgtataatatgtgtttctgattatgacagtattgcatattatttattggaaatttggaaactacaagttgaaagtagaaaataaaatacttgcagtcctagcacccagaaataataaatacaggttgagtatcccttatctggaatggttgagatcagaagtgttttggattttggattttttcaaattcagaatatttgcattatgctttaatggttaagcatcccaaatctgaaatccaaaatgctccattgagcatttccttcaagttcatgttggtgctcaaaaagtttcgagttttagagcattttgaatttcagattttcagatgtggaacctgtattagcattttgatgcaatttcatctagtctgttttctgtgtgtgtatgtacagcatttatatcagttcatagctatgtaagtcatatgtatttaaaatccttttttccctcaattatagaaggactaaatgagtcctatctttgcaaatcatattagacatgattatcagttatgtgctacttaatatcataagcatttcctatatcatgaatcatttttgaaaaatttttaatggttgtataatttttgtttttactttttcttgttttaaacttctgacttctgtgaactaaagcacaatttctaagagtactagtatgttgattctgaaaggggtatatatattcaagatataatttctttttaatattgtcatcagaaagagaaataagaggctctcaaggctgtttgaggggcagggagagggtgatgggacaaaagaatattgaagaactaagcaaaagaatgtcagagttgccataaaacattaactgtgtacctgtgagtgttggagaagaaaagggaagtgcatatgtattccagttcaggtgagggaagacaccatgcatactcagaggaggggatggggagtcttgaggggagggggttttgcccagtgcaggtatagatgatagcaagggaaacattcacaggggaccaaggaatatcattgcagaaatcctggaggaacacagtctgggagaccaggaactgataagaagctggtgaggggcatggcccagtgttccaggagcagacagtggttctttcctcctagatttttctagaaggaccaggttaggtttccctttgggaccagtatgataggccttgggtgactctagggcaccctacacctcttatctccaaagaaactgctattttaaatttgaattattttaacttgataaaaacctatttctcaatgataagaggttcaaagtataaattcagaattaaggcctccctgtagtgctaattttatattgaagtataatccattcacttatggaaatagcttgttattaggccattctctctcttctctgtctcttttgtctgtctgtctgtctgtctctctctctctctctctctctctctctctctctctctctgtaacaggtaagagagctggaggcttaggacagaaggcaaattttaggcactaatattgattttctcttcttattctaaacagtggtgggtatattaaatgttgctcagcagccttaatgggtaattaagcaggttattttaattatctgtgtagttgacttttttgaataagacataataaaggattaattatattctacatatttcaaggatattgttttgttctttcagctcttatcttcattgtcagtgggcatctatagaagatctggaaaaagataagagaattcagcaaaaaattaaacgatttaaggcaaagcagggccagaacaagttcctttcagaggtacgacatacctgcttacttttccaaagtatttactttgttaaaatgttctaaatttaaaattttagttccatgaattaagaaaaactagttagtctcatttggtgctgtcaacttgcatattggtaactggttcttgctaacaaatttgtaaacaggaaatttctcattcttcctgttgcttaggctagaagatatgggtccttatgatagtatgtggaaatagcggtgatggtatgataaaaatcgtgtaatgaaagtacagttagcagatgatgaaattaagtaagtggacagaagttctattgagatttagcaggttaagaaatctacaatgttaagtacaagttctaagatacaaaagcttgacttctgttggggaaagtatgtggcaaatttcttttgttgaagtcaatgcctaattacagagagttcactaaactcattttcgcaaatgctgtgctgtagtgtagaaactggtaataatatctttgcctgtgtccctttatcccaggtatcagtatagaagtacagcaatacctagggcagagaagaacatctgcatttactagaagtgccagttctgccctctgcctcctcagtatagtcaattacattttttaaaaagtgctttcacaagctgcttactagggtctctggacttaggatcgccaatttggtttcacttacagcctcaagtagataaaagaaaaaccctaacattgaaagataagacttgctgatttattagttcctcttttcctaaaagagttgacagaatgtagactttatgtaaaagaagcgtacaatttgatgcaaaatagtatctgtttaacaacctactttgtactgccacccctttttggagatgaaggaaagtgggacagaagagcacttagtacttttatgtcataaaattcttatactatcaggtagcaagtctgtgttcttctgggatctgatttccatggtcccaactggcctatggtaaagtccgcattcaatgggagatcatgtggttgttcttttactggacacatgtctgcatcactacccctggcactctgagtgtgcagcatttttggcagtgcagtggttaggaccgagtggaatggagttactcgaatgtgactcaattcatagatcttggagaatattaagaagattcttcagaagaacttggaggaaaattcttttgaagaaagaatcttaatatttgattttgaggacaatgctgtgagattctatttttcatgcccttcttaatgaaaccagagttaaatttttatgacattggatgagctgaaatcattagcctccttttagaaagagacaccctgtgttctgctgaccttttctgtgggccagggggagggagacaggcaaaagcgcaatggtagctttccccccatccctaaatcctggtcctgtttattaagtttatttgtattctctctcctgtagtcacactgtctttaggaaattgtgcctagccctagctacacataccaaggttgaatgtacattatttacctggtaacttggcagctagaaatcttagtttctgtcctgagtgggagttagcagagaaggatagcaatccccttcctccctctcttttatacatgaaagtgcacacgcccccgtttgtttcatcccatacatgatcatggcttcaggtgttccatggctgtactgctttgagattttcagtttcagctgcttttacattctttgtttctccttaggctgccttacaagcctgctgcaactaaaaatgtctattcaaaaacatcatttagactggaaatttcgtcacatgtgtgatgccgcagattactcacttaaagggtagaaatgtgtaggaaaagttaaggattttaattcagcactgactgtgaaagcttatgtttaagaacaagttttcctaaagagagtttttgccatccaaacctagttttgggaaagtttaagtgtttctgctgtacatggataacacgtgtgtttacctaagtctagaagcttttgaaaagccagtgcattaatacactaatactttatattaattgaacatttcaatggatttttttttgccttactaatctacctctgtgtaaaagcctgagatacttgagacatatgtttgtgtttctgctttttgtttcataattcatggttcaaagcttcccaactgggtattttaagagggccgaatagccagggaaagtttgttgttcttgagcagatgatgactgaactgcttatcttttccacctgcaattcaagggataagaatggtgtctaagtgacttctagtttaccttttgcaaaatattttaatgcagttatgttattgataagttaattgagaggtgcacataataaaatgtgtcttttgttttctaacatctgaaacttgtctgaccctaacttcttttgggtatggcttagtctataactctttttttgagacggagtgtcgccctctgtcacctgggctggagtgcagtggtgcgatctcggctcactgcaacctccgcctcccgggttcaggcgattctcctgcctcagcctaccgagtagctgagattacaggcacctgccatcatgcccagcttattttttgtatttttagtagagacggggtttcaccatgttggccaggctggtcttgaactcctgacctcgtgatccgcctgccttggcctcccaaagtgctgagattacaggcgtgagtcactgtgcccagcctataacttttttttgagtcatattctagtgttttatatgagatacctttgcaggcagcagtattactttacttttgtaaagattgtttaatatattggttaaatgagccaattatttaggcttcatttcgttatccttaatacttttgcctaaacacactatattcaatgtaaatcattagaaaacagattaatgatgagactgtgattctaaatgaggtactaatattggttgacaaatactaccaaacattataaactctgatcatgctaaaatatgaaattagctgcttgcagtgtatttggcttttgaataacattttgtagatatgctataaggcatcggacaactccaggagttacaatattccaagtaacactttgcatgactctgattcttcattgcaaactgtagtttcgagaatgctaaatgcatcgcatgccataagccttttggattgctcattagtgaattgtaatttcacacttcatttaaaatattcttaaacattctctcacagtaaaaggtttcacacggtaattaaaagacccagttaacgaagtctgagaagtctgatttcctcatggggagtgcttttgctaaattgtagcatttcaattaatataatagaatttgccaaatgtaagttttatattgctgtgacccaaaatattattgcttggtgaaaagtggaatagtatttcatcttgggaaataagtaaacctttaacttttttttttccctttggtgtagattgaggatgagctttttaatccagattatgtggaggttgaccggataatggactttgcacgtagcacagatgaccggggagaggtaacaggagatcatttgtattacaaagtggtgattcaggcaacccatacatgtttatagagaagatggtagaatcctagacctggtcttggtcagagccttggactgtgacacacttggtctaaatttaactgaaacttaatgatttattattagttttatgacttaataatagtgctaaatatgttttatgtttagtctgagaacttttttaaaaaattgattttcatatgaaagaaatacattgacattttgcacaattccacaatatgataaagaattcagtacattttggtataaatctggcatgtagcacaaagtatccttatataatnnnnnnnnnnnnnnnnnnnnnnnnnnnnnnnnnnnnnnnnnnnnnnnnnnnnnnnnnnnnnnnnnnnnnnnnnnnnnnnnnnnnnnnnnnnnggatatttgatagggaagtaagaatgaagacaagtgtagtgacttctgaagtattgtgtcttgataatgatgtgcccacccaccatgaattgtgtccttcctggcttctccatgtaaattgaattttatatatacagtgtttggatcttgcttttctagggagggtctgcaaagaactctcattttcttccaaactctgtgtcatgacactctatgatgtttccaagaccatatctgtaacatgatctttacttttctaattttccttagttatacttcaaaaaattgtttcatagcatatttacattgtacaggaaatatttttcacatcacaactaggtcagtgttccttggtcctgaaatgaaggtcaacaaacccaagtgttttctagaggaaagacaaaggaaatcctgttgatctgcattacctgaaatattttgccctccacccttataaagctcaaatatgttattttaatgtgattggacacaaacagtatcactctttttaaggaaaaggtagagatcctaataaatttaagcgtatgtctcattttttaagaaaccagccaattatgtaaacattgaaatatgctaagatgatttaccatgtaagtctgaatcaaactcctgatgaaagatttgtacagataaaaaaaatctcaaattcagctttgctatttgctagctatttctttatactttttggctttcgaacatcacttaccaatgattttgataaaaggctaatttgttctgataatgcccaataatactgtttccagtttagacttgagactcttaactaggaacagctgtttatggccatagtttttaaatttctgtcaattcagacttactcatgctgggataatgtctattgataaatgaagtagagcatgcttttccttaatgtgtatgtaaatatacatgtatatgtatatatgtatatatataagcatgtatatacacctatgtgtatgtataagcatatatacacacatacatatgtataaacatatatatacatatgtatatgtataaacatatatatacacatacatatatatgtataaacatatatatacacacatacatatctatatgtataaacatatatatacacatatatatgtatatgtatgtatgtggtcaaatgaatccaattctgatttatttaaatctggtccagcctgtgactcactatctggtgaagtggtgttcacttccttatgaagacagcacgtgggagcggaggcaggacatagatcaagcaaagatcgaggagtttgagaaactaatgtccagggagccggaaacagagcgtgtggtaagaattggctgatggtagagaatttaatttgaaaatagcatagtggtgtggtctttgggaaaccactaatgggatttactatatttgaaacaggagcgacctcctgctgatgattggaagaaatcggagagttccagggagtataaaaacaataacaaactcagggaataccagttggagggagtaaactggctacttttcaattggtacaacatgtatgtaaaacaagtttttcttcacttttaaatatatctgtagttcctttcctttagttattgaaaataataaaaaagaacttaatgttttaactctaataagagctttttcaaaaaacaagcattgaaaatatatgtaatatttaataaatattaatacagagattgatataagtgtgtaaaaataatttttattctttgagaattttgtttgaaaatatattttgttgaatctaagagaacatctaaagcctttgggtatgcatttgtgggtacaatggtatatattttgtgaaatgacagcagtgtgtcatatccatactcattaaacttttgtacttcattttcctcctaaaggcgaaactgcattttagcagatgaaatgggtttgggaaaaactatccagtccattacatttctctatgagatatatttgaaaggaatccatggcccttttttagtaattgccccattgtccacaatccccaactgggaaagggaattccgaacctggacagagttgaacgtggttgtgtatcatgggagtcaagctagtcgtcggaccattcagttgtatgaaatgtacttcaaagatccccaggtaaaccttcacaggttgtattctttgtacttactctgtgcattttaaggtgttaaaaaaaaatcaaagtcttggtgacttgggaaggtctaaattttgccaaattgagaaatttgctttagatatctgactcaatttacatttgtattatctttctgtgtctatgaaaacagctcttcatttttatagctttggtttttctgattattagattagaaggaatgaaattttttgccttggatgatcactgaaatccatttaatgctttgatatgttaattagttttattttgcaagcctaagagaaaactaaacaaaaattggtaatattaaatgtgaatagaaagaatattttattatgctattgctagaagtgaaaaatagtaagcatgtaaaaagtccttgaaatatatgacacattgaatgaaacacatcccaagggaggaatttatgctttggctgttagtagcaattgctttaatttttttcttactctagttacctgtatgccattagtgtgtatcaacagtgaagtgttataaatgacatgataaggaagaataatatgtactaaaatagttttatgttatgggtagtaaatggaagtcctgtaaataggatctttgctatatatatgtttttgctatatatagatagatagatagatagatagatagatagatagatagatgtgtgtgtgcatgttctaagtataaaatctgacctacaattaaataactaaaggagaaaaaatattgaaatctgtgtttatctttagatttgggaaattattataaattctgtcctacgtgaatgtgtgactagaatgggtacgcttagtggtaattgatgcatgtgctctgttaggaaattagatccaaaatttactgacagttttctcatttgttttccaattctgttttaccatatcgtttaaaactgccaaaataacttgaaaacagaatgtatgtcacctaaaataaagagatctccaaagggataaatacgtatgttttatgctatttattcatccttaaagttatttatgtaaccattaatgcttaataataattcagagttgttcttatagggtcgagtgataaaggggtcctataagtttcatgccatcatcactacatttgagatgattttgactgattgtcctgagctgcggaatattccatggcgctgtgtagtcattgatgaagcccacaggctgaagaacaggaactgcaagctgttggagggactcaagatgatggacttggtcagtgaccatattggtgattgcactgaacctgaatagaattgttgctgacttgatagtcccgttgctcagaatttgatgcctgtaaacagtatttgaaaagcttgtcaaatattgtgatatattctctggcactttcagttattcaaaagttgttgccttttggattcttacattgttggctagtgtctgttaaacagttgtattatagcagagtgtaatcatgatagtttcactaaagtgagtttcaagtatttgttttaccctttgttcataaatacaggttgatcataccaaatacaaaaatcccagaatccaaaacgttttgagtacccacataatgctaaaaggaaatgctcattggagcattttggattttggattttctcatttgggatgttcaacccgtaagtataaatgcagatattccaaaatctaaaaatatctgaaatctgaaacactctggtcccaagaattttggataagggatacttaacctgtactgccatttcattaactgttgggccaagctttacttcagtgatgatagtccagttatttttcagtgctcataggttttgccatactgtggccagcaggacttgtagatgcaagttctcaatgagttgggtaggatatctggggttggtttagttcgcacagatgcttagaagtttggggcattacagtgcctcagatttgatctggagttttacaccacacttatcccatagtcttccagcttcccaagagatgatcaggtcttcctgattagattttctagatttttttttcagcaggagcatcatggaataacatatcgtaggagtagaaggatttgatttattttctgtctgatactgctgtgtgtgatttcctagtgggaattgcaacatgacctgtcatcctcaggcttcttttcactccatagtttatatagtggttatgatcacttatattttatttttaatgtacatttggaaagcaaagctcctgtcatttagcatgccttggatgatttgatgagtttcacggaagtacaaaaagggtttcaaagtatttttaatgctaatttctgcaggctaatttgatcttttgttaactgagagtttgagatgagaaggagtgttctgtatattcatggccatatgtttttagctgaagactggtattaccaaaaaacacctaaaagctttttgttgcagctgattctctgaaagagcagcttattttattcttaaagagattagaattgccagctatgcttttagtttaaaacaaacaaaatctagttttgcttaaaggaaaaagtctgactgaattatcctatttagggtgggatttcccatttttcttcctaatgaattattattaaagcgatcctaagatctgtctcaaagcagttgactattatttggtggccaatacacaaaacaagtgagagcgcttagaaacagtgaatagtctcaggggaccttggtaagcatatggaaaagagaaactctgtgtttgtatttgttcactccaggtgatacttaagcattaaaatgaagtaaacttgtatttgcaggtaaacactaatgcttgtgatataacctaaatatatattctcagtagggatccaccttcatagttttctactaagagacagttatgtcaccatttcctgaaggcttaaacagtcatctgactgaacttatctgagttgtgttctattattagttcatgtgttcccagatagtaaattcttactgtaaaacattatttcattggtgagtacacattaatttaactccatcaagatcaaacaatctgattgtcattgggctatttttttttttaatttaagttctagggtacatatgcagaatgtgcaggtttgttacataggtatacatgtgccatgttggtttgctgcacccatcaacttatcatttacattaggtatttctcctaatgctatccctcccccagccccccacaatctttgggctatttcaaagagttttctattatttatactaacatttgataaatggattagaatctgttatccaaataattttcctattacatattgcagtgttcttaagctttttcacataatggcacgtatagaaaatgatagtagttgaatgccacactcaggtaaaaagagaaggctgcccactgccacgggacaccaccagtcctgggtgtcctgaccttccccaaggacttataacctgtactcatccttgactcaccaactgggaagctctgattagcacatgaacaaaatatttatttttctaatgatgaagaatttttatttgagaagaaatgttttcaagatggaacacattattgttcagaatataattatgtttgtccaattctgaacagctcgttgtctggtctttaaatccttacttaaaataagcatcttgagaacttagccactttctactttttattctttcctagaataagtcacagtcaaaatagtggttagtaactatatccaactacggcacaggccatagggaactgctgttacctgcactagactcagttgcgatgaaaatgcgcttgatggggattatctccaagtgcattcccagaaaggacgaccaatgagtgtcttcagctctgcagacaccaaggaaatgtttgtgaagatgatacattgaggggcagtcaccatcttcacagtcctccacaggagctctgggaaagcaaccatctcgttgtcccccatccacgaggaggggatgctgtggagatcatggtagttcttcattgattctagtatctctttcattgtcaggaaacctaacacaaaagagtctgcttaaaatgaaattaaatggacatcacttcatcagagctaaaaagaatggtaacgttgtcaaggcaaaagcacatctgctagcataggtggaggtgataagctccatcgcctgagtttcttacctgatgttttgtgagactgtgcatagtaatcgtgtattttttaattgttacccactttcaaattgatacctagttttattccactatttgtaggtaactgtatgaaaggattttgtgtataatcatttggtgtaactaattgaagggaagctgcataagaaaggagttcctaatgctagatgacgagttagtgggtgcagcgcaccagcatggcacatgtatacatatgtaactaacctgcacaatgtacacatgtaccctaaaacttaaagtataataaaaaaaaaaaagaaaggagttctttccttttttcgaataagtttattttgaaattaataagttaaaaaggctttaacttttaaaatatttggttaagcagtcaagatttaatttaatgtcgtaataaaggatatgaaaaaactgggagacacgatatcaatacagctcaactactgcagtaactctttcctgaatatgtgatgggacttaaaaaaaaaagttcttgcatacagtaatccaggacttgggtatgtcagcgattgtggcccaggctatccacaagtgtggtgatactttagaaaaaaattgattgattgatccttactgtttatgaatttactgagtctgaagatgatggtcgtccatgaaacttcctcagagactttattcaaagggaagagaaggaggaatacaagcatattgaactccttcacctactttcaaagagcttcattaacagatatgacttggtagatattaagaaaattagcatgttcttacctcattcatctagtatttactgagcgtatactctgcttggcaaccgagacttgtcagattccaaattaagtcagaatattgctttctcaactactgggatgtataattactttctgaaatagttttgttagctgtgctgtgtaccaaatggccaaagtagaaaataatagggttcttaagattaatatctcactattgttaagactggccattgtaaaacagctcttctgtattgcatatatgaaaataggaagacagggtataactgcatgaggaaagctggggaaagagttcgtaaacaggaagaattaattaaagaaatacctaacttggttcaaagagacaaatttataaatagcatctgattaaaaaaaagtgattgtggtatttacaaccaagctgacctctttgctagttggaaatttttgcagaacaaaatagtttttcatatgctgttgcatgtagaacttcttttgtctctatgaagtgagtcatgcaggaagcagatggagagatgagagcactgttgatgtagagagcagaaagaagcatgcatgtttcatctgcgtctagggattctaggaaaaaaacttaactggtggggataaaagcattgagacttgggggacttaaaaagccgtgatactaaaatactgacctataaccccaggaagaaacaaaatggcaagacacatttaaggaccctgtagagttctggagaggactgtccatggatctgtctacctgacacagaaatcgtgttctaatacctctgttttcatgcctgattcctatactttgcatagggtagatgagtaggagtagaacaatgggtgtctagtgagaggctctggttttaagaaagtgtttttgttacaatttggttagtggctttccttgtgttacctcaggaacacaaagtgctgctgacgggaaccccactccagaacactgtggaagaactcttcagcttgcttcatttcttggaaccaagtcgcttcccttcagaaaccacatttatgcaagaatttggtgatctaaaaacagaagagcaggtatttatcagctccactttgtatttcagttataaaattgaagattagcccatgaaatggcaaagtattaagttattttaaagtgtgattatattacagtttttcccacctagtacacagaaccttagataccctttccttggactttccaggtcatcatcataaaggttttcttctttatttgtttgtctttttgctcttgtgaagggctgttgagatttatagagaggttacatacctgttgatgtaattttcagagatagctgtgctgtgcaggttggtagttttgctaggtatgtgtaattttggggatgatgtcagacgccactgacgttggtagacctgtttgcctgctgcagttttgagtctctgttctttgtgaagcatctgtactcagccacaccgcttacttcttcaagcctacatattttcactttagaaacttagggcataaccactgcacagtatttctgtgagaagtaaatgaagcattgtgtataaaaagtgctcgggccaggcgcggtggcttacgcctgtaatcccagcactttgagaggctgaggcaggcggatcacgaggtcaggagtttgagaccagcctggccaatatggtgaaaacccatctctactaaaaaaaatacaaaaattagccgggcgtggtggaacacgcctgtagccccagctactctggacgctgaggcaggagaatcacttgaacccgggaggcagaggttgcagtgagccaagattgcaccactgcactccagcctgggtgacacagtgagacttcatctcaaaaaaaaggaaaagaaaagaaaagtgcttggctattttatatgctgtaagagttatgtgggcattagttataatttgtgtgctgtatttgaaataaataacggagatagacttgaaatcttggtttttacgtgccccctccgctgacttactgtctaaaacctgttagctcagttcagggtaaggtctgttttgtttttcttttctaaaataaaaactgtatggattactcagttctattgccaatcaatagaaaagagaaccagggagagacgtctctgctggctccttagtgcagggactagattgctcctggctcacttcctctcattctttagctctccctagaaaggaagagaatagaaacagagcattgccatgacattgtcttgtccctcttctctatcttccctatggcttaggacaaacagaagggaaagctacatgaatcagttggatttctcctgctgggtacttttcaagccttctggctgttcagggctcctggatgggtgaaatagttcatttgacataaaattatgcaaccttcatgcactgctcttatgaaagctgagagatgagctccttcatactctcactgggctttgaaaaatgaaaatggatgtttaatgaatgagataatcctgatgtttcatgttaaaatatgttttaacttgcaagcaaatcatgacactagtatttacttaaggtccttttttaggtgcaaaaacttcaagctattctaaagccaatgatgttgagacgtctcaaagaggatgtagaaaagaacttggcccccaaagaagaaactattattgaagttgagctaacaaacattcagaagaaatattaccgagccatccttgagaagaatttcacatttctttccaaaggcggtggtcaagctaacgtacctaacctattaaacactatgatggaattgcggaagtgctgcaatcatccgtaccttatcaatggtaaggctgccctgctcgcgaacttgcttaagtgacgattgaagcaccagaaatccctttctgcccccagactggggatttcatggtgtatagtcattcctgtctcctgtccactcagcatgggtttcaccagcttcccactttctgtgatgcctccttctgtggttgctgaaggtgagtgaccattgccccagcaatccctgaagtggaatctcaccttgcctttctcctgacctccctgtgcttgaaaagaggcgttagtgttccagggctagaagtcatctgaagtgctaacagccaaagagaaatgagcccctaatggaggttttcttggggtgtgtgtatttaaatcagagatgttaaagaggaacttaggtgtgagcagacagctatcagctgtctcaagcctttgatagcaaatgtcctcatcttcctctcagtccagagtcatctagcacctctatcctctgagaacaaaaaaattaacttaaagctttgataatttatggccctcctcttttcttaactaaattcatagtgttatgtaactcatggcttaaaacctttattatgtatttttggaaatcattaaggtaataaatatttcatgcttatgttgtataagatactctggagaatgcaaaggtaaataagaagggagcattcgccacaagcagtcttcagttagctgagggattgagattgggggagtctttagaaggagatggtctttttaggcaagtctgcaggggtagaaaggattttgcgaggcagagttagaaaaagaaaagatgtttaggctgaagtaacgatacaagcaaagagagggggtcaggaaaacaatgaggaactttcccaaagtaaaaggcacacataagaaatgcaccttagacatgcttggatcctgctgcagaattccttaaaggctagtgcatggaacctccactctactctgcaggcagtgaagaaccatgactagtgtttgagctgagcattgattagaaatatgattcagggtgatgcgtcaggcaacactgcataaaaaggatgggaggaggaaagacagacaagcagaagaaccagctcagaggctattgtattctgggtagaagttaatgtgggttannnnnnnnnnnnnnnnnnnnnnnnnnnnnnnnnnnnnnnnnnnnnnnnnnnnnnnnnnnnnnnnnnnnnnnnnnnnnnnnnnnnnnnnnnnnnnnnnnnnnnnnnnnnnnnnnnnnnnnnnnnnnnnnnnnnnnnnnnnnnnnnnnnnnnnnnnnnnnnnntccactcctggaagatagtcttagagtgttgcacctgggatcattggtgtgatgcgacgaatcagtgaatttcttttttatatatatatacacagtttttttttcttgagataggttctcactctggcgcccaggctgtagtgcggtggcacgatctcggctcactgcagcctcgacctcccaggctcaagcatccctcccacctcagcctcctgagtagctgggactacaggcatgcgccacaacgcccagctaattttttttgtattttttgtagagacggggtttctccatgttgcccaggctggtatcgaactcctgagctcaagtgatctgcctacctcagcctcccaaagtgctgggattacaggtgtgagccactgcacctggccagtgaatttctttttgtgcttttagttttgtcttctaaagagagtatcatgtgtgatgattatgtatctgatactgccaatctgctaatcacagtatgtttagaagcttgtgcagccgttacggtgagtgttaactagccaggtcttgagttggcgagacagagcttagggcaactgatggagcgagatgaggacacgtgtgtgcatgcactgtgcacatacatgtgtttgcatttaatagctggtacaaaagaaaataaataatagcctccaaggggaaagaaaagaaaaggagatacaaaagggtttgaatgctaccagcaggatgtgtgtgaaaggggagatctcagcaatggtagttagattgacacccccagttccatcaagtttaccctgtttggtcatatgttaattatatgcattgaacattgtgggttgttttcccccaaaacacagctggtgtgtctcttcctttgatgattgctttccagggtcatcctgtatagcatatttgttcgcgaggagcctcttaggactccctaaggcttggcagatgtggcagttgtcctaattggtcacaccttgaggtcagcttttctgtcctgacaagaagtgtctgttaagcaggtgtctttgtccctaaatttggggaagttatagtgaaaaagtgtagataacatacaaactaagcgcacgcagctgcccagataacttacgcagacattgtattgtgtagaggttgctccagggccagtactgttcattctcatccacagtctggagtaaaaacatatatccagcatttaaaaggaaattctttaatttgggagattacattgaaatttgaattggttgtggcagagtaaagaagcctcaatcaacattcaacaaaacacatttccaggattatgaaaaatagaagcaattttatatgtatgagttgaaagcttatgtatgagttattagctcaagctttatttcaatggaatttccaatttttaggttttgcaatgtgaagttaagaataatgttgaaaacatgtccaaggtaccctgctggttagagctgacttaagagttgttgctggttattgtttgaggcaggaggcgtgtagaggaagagtgggcaaaaagaaaacacgaatgaggcttacgtgatggagtgaatttcagagagaaaatagtaactttttttttctggtaatcgtcaagaacaaaatattttcttgtttgttcgtggcttttatatagctagaggacattgcagttactgtcccgacagtgaccatctgttgaagtgaaaagacttcaagctgtaagtgaatgcacacttgtttcaagttgtctttgatatacacactttccagtgtagtgccagccatacattaatttaggacggaaccaacaaagtgttttgggttggcatgacctatttccagttaatttttggattgatgtttacaaattgggtatcaaacattaatttgtaatcttgaaaatttagctgtgatatcacaagggagcagttgctttcctccctaacactcttcccaccctctttccttcaatgttgccacaataaaatgtcaagacaatcatataggaaaggtgtttgctgatactgtttttaaatgaaatattattagtacaaactggctgccagttgtaagaacctgaattcataacagagagctgaattaattaattcagaagtagcttttgtcaggtaagaaagaatgcattttttttctgactattctttttgatagtataaaaaaggcaaaaattatttttttaatctctgaataaatttaaaattaaaattctctgcaaatttgactgaattatttgttaaaaaaatttaactgaaacccaaatatctgatgtttattttgtcgaaatgattatttgctttttgaaaaatattcgttggccattaatttgttttaaatggctaaaatactatattttatattgtggattttaacttagtatggacaaaaaataattaaccaaatgtcataagagtaaaacttattctgaatttcagagcttatgatgtattgtacaacaagaatacacttgaaagatacctaatgtaacgtgcacttaaatctgtttcccctgtctcttgaggggcttgtcctgaatctagaagctgggtttctaaatttcatgttttaaaaaatatttaactttattcaagaacattcttgctagtgcccttaaacagcattttgctctttactcttgcatttattttccatacttaaagaaacattctgaatattagcttttcattcacttggaaaaaggagtgagggccagtctgccttcataagaagtcagtgtattttgtggaaggccttagtgcttgggaagacattaactgactttaatctgttctcagtaaattatttgttgattaataattaataggctgtatttctgcatttgaccatgtcataaggtaatttctacatgcagccttaaagtacagataggattgcacttttgttacatctgtgcttgttgcagcagtaccatgtgagaggctgtggttgtctgtcccactgacccaacctttaaagcctctttgaggtttatgtatccccatcttgtgtatagttagttcacatgttaaaaaccagtggtaggaaggtagttttaagtttctggcacagttaaagtctaggaaacaatcccattaagatgaatgtgtgtgtttgtattttctgaagaatagttgagcacatcctccaccttcagggaaaagagctaaacacaacagctatgtcctgattaaccccagaggcaggaggaggtcagaccaatgctgcgtaattctagttaagccacctaagcagttgaaggaagcttagcctgctgcttcctaaataagcgtgtgtcaggcagggatgtcatgggccatctttccttaggaagatgtcatcttcttgaggcctctttccaatgtacccaagtctttggaccagcaaaaatccatgtgggggaaaagaagggtttaagcatagaagtcttatgtcaaacacttaaaggtttgtttgtttttaattttaaaagatttggatagttcaagatagaatttttgtatcttaggaaaaattaccagatgggaatgaatgtggagggagatttagagattacaatagttgtatgcttaggtcccccacaaatattccaggaaattgtcctggaaataaattcctctttttgtagttcctttgcctatattaatatgcaattatagacccaaactactattgctcttacgctgtaattgttaggactctattcctttgttttttcatttcggaacagattttgttgtttgtgtttatgttcagctagtaaacatttcttcatttctttagcaatttaggttccaaattttctgtaggtatctggcccttggcttgtttctgccacttctggcttgacagtctgttgttgaaattccgtttttacagacagcaaacatttgtttgttgaaaaatgtggttttccccctaaatgcctcaatgtgttgtgcttaaaacttttaccccttttgtacatccacagttttgtatagacccaactatgagtaagtggatggattcttgttcataagcaggagtttggtgttctggttcctacagtttgcaatgggttttgaaagcaagtgcattgtttttagtaataaaaaccttttacagtattcacgttatgctgtccaatctctgcaggtgctgaagagaaaattttggaagagtttaaagaaacacacaatgcagagtctccagattttcagctccaggcaatgatccaggctgctggcaagctagtgctgattgacaagctgctgccaaaactgaaggctggtggccacagggtgcttatcttttcccagatggtgcgctgcttggacatactggaagactacctcattcaaagacggtgaggaccaccatatcagaataataaaaaggaaatctaaaattaccttcacaggggtccaagcagtccacctaaaagtggaatctatgataaaggggctagaatgggggaagtgcatcacatgtcatttttaaaactatagatgtacatgatgattattttatatgatgactacaggaggacactgcatacttttttaggcaattttatttccccattgcctttatttgagtaggggagaatagttcttacttaaaattgaaattatttgttatcttactgttataggtgtcagctgtttttagaatttaactatttccctggagaggaagtaaaataaaatttaatctttggtcattcaatcaattatataaaaaacgccaataaaccctatttgctctgagattagttctgttaagtcatattagtctttttaatatatattccatattgtaataattaaaaattaaaaaaaggagcaagtatgttgtcgctatgcgtcaggcctccttgttcacactgatgttttctaggtacccatatgaaaggatcgacggccgagtaagaggcaacctccgccaggcagctatcgacagattctccaaacctgattctgataggtttgttttcctcctgtgtacaagggcaggaggtttaggcattaacctcactgctgctgatacctgcatcatctttgattcagactggaatccccaaaatgacctccaggtaaatgcacaagaaagtcctgatgcctttaaaaaggaagtcattctgcttactatgacagagagtaccagtcagacccataaattaatgttgcgtcgtcactcaggctgtgtcctatgattcagagcaaataaccaactagtaatctgttgattaataatgtgagaagaaattttttagttttaaccttcttctaaactgcacctctatttattggcacatagatagggtcttagaactggcagatgagtcttgtcattctttggtagccgtcttagctcaggtctccttaacaaaataccataaattgggtggcttaaacaacagacatttatttctcacagttctggaggttggaagtccaaaatcagagtgccagcagagtcaggttcttggtgagggccctcttcctggtttatggacagttatcgtcttgctgtgtcctcacccagcttaaagagagccagctctctcgcctctttatatgagcagtaatcctgttcgtgaggactccaccttcatgacctaattacttccctaaggcgccacctccaaataccatcacattggaatgagggtttcagcatatgaatttggtggggagacagaaacattaggttcattgcagtaactattaatttcatttttcttccaggctcaggctagatgtcatagaataggacagagcaaatctgtgaaaatctacaggctgattacaagaaattcctatgaaagggaaatgttcgacaaggctagtttgaaactgggcctggataaagctgtgctacagtctatgagtggaagagaaaatgctaccaatggggtaaaaccacccttgcccaaaccatttatttattctggcactttcctttatttaactaatagtaagaaattactcagcctttgattatttttcgacctcaatattttaagtgtattttgtaacactttcctttgttataatttaggtttactctctttgagaaaaatgcagcatttgtttagtctgcaaacctcttaattttaaattattttgagtattttaaatatttctctaaaacaggtacaacagctttccaagaaagaaatagaggatcttctacgaaaaggggcctatggtgcactcatggatgaggaggatgaagggtctaaattctgtgaagaagatattgatcagatcctcctacgtcgaacccacaccattaccattgagtcagaagggaaaggttccacatttgctaaggtgtgaatcgatctaaagaggccaggttttccatagaagcatgacggagttcatgtgaaaagtaccttgtaaaagtgcttacaagatgcattgggaattaatcaaattaatcattaactccctgtggaacccctggcacatgaagctttctttatgctttggtttatcttctgtgtacctgccactggtatttgccctcaccttgtcatccttgtatctgcttcccagctcctgaggctaatcgctcacttgtgttcttgactctattgtctccacttctgagatcctgctccgttggcatcttccttctctccccagatcctggtttttgaaacagcctataagaatgatcaagtcactcctttaaaaacacctcttctctattttcttctttagctaaatctccatacataaactcttcagagctaaaatccacacaaacgtaatctactgcagcctctactgtctccctttctacttatttttcagctttttcagcttccagcttgcacctgttccctgcctctctatcagagctgctctggccagggtcaccactgagtacaccagatggttccacctgagagccccttctgaggtttcacctgcattttgttctagccatctcagtgaggcccactctgtacttttatttttaatgactttattgaaatgtaattaactgaccatacaattaacctgtctttcgtgtacaattcaatgcctttaccatattacagacttgagcaaatattgccacaatctaagtttgtaacatttccatataccccagaaaggtcctcatgctcattagcaatcattccccattcctatccataccagtctgccatatctggaaagcatgaatctactttctttttctacagatttgccttctctggacagtggacagttcatataaatggaatcatatgatgtatgatcttttgtgtctgacttcattcacttagtataatgtttttgaggttcatccatgttgtagcatggatcagtagttcactcctttttattgctgaacaatattccattgtatgggtataccacatttacttgttgataatggacatctgggttgtttttactattggctattatgaagaatgttgttatggatatttgtgtacaaggttttgtatggacttgttttcatttctcttgggtatataccaggagtggaattgctgggtcctatgttaacttcatgtttgactctttgaggaactgccagactgttttgtaaagtgactgtactagtttccttccaagtcagatagtaagaagtatagatgaggatatggaggaaatggaactccatatcctccccaatactttttattatctgagtttttagttttagccatcctaatgggtgtgaggtcatatcccactctggtttttatttgcatttctctgatgatattgagcatcttttcatgtgcttattggccagatgtagatcatctttggaaaaaattctattcaagttctttgttcattttttgagtttctttttattaatgtttcagacttaaaatatgttctgtatgaaggttctgtattaatatgattgcagatattttctcctactctcttcttaatagcatataattttaatgaagcccagtttaccaaatttattttatcgcttgtgtttttagtgcattgtcaaacccaagctcacaaagatttatgttttctacagatttgcctactctggacggtgggcagttcatataaatggaatcatatgttatatgatcttttgtgtctggcttcattcagttagcataatgttattcactagtgtaacttagattccaagatttatagtttttaactcttacattttggtctgtgatcccatttggatagagttttgtgtatggtgtgaggtaggggtccaacgttcgttttgcatgtggctatccagttgtcctagccgctccaatctggaaaggctcttctcctgtgggttttgagacccacatcttctcctttacatctttcagccttgtgtcagattattttctcagagctcacaggcactgtgtattcaatatgtgcacagccaaacttatcacccctgtctctcctcctgcccctatctctgtttgtccacctgactgacatcattcagatgcctgagatggatgctgaggtttttctggcttccgcttctttcatatttcacttgtacccagattctgactccattgattttgccttttgttttattttatttttgggatgatatctcactatgttgcccaggccagacttgaacacatggctcaagtgaccttccaccttcagcttcccaataattttaccttttaaagaatatgtttctttttttttttttgacagagtcttgctctgttgcccaggttggagtgtagtggcgcaatctcggctcactgcaacctccgcctcctgggttcaagcaattctcttgcctcagcttcccgagtagctgggattacaggtgtgcaccaccatgcctggctaatttttgcattttttgtagagacagggtttcaccatgttagccaggctggtctcaaactcctgacctcaagccatctacccacctcggcctcccaaagtgctgggattacaggtgtgagccaccatgcctggcctaaagaatatgtttctaaaccaccttcttttctccattttgttatttcttctgtaaattattacagtggcttcttctgctgtgttctgacctccatgctccaagcattggtatgacctttccaacttgtgactctggttatgattgtgtccataatgagattattcctattttcaaatagttcctggttccttcgggatagagttcaaactctgttaactctgttaacatatacagacactgcttgacctggcttctctctccctcaccagctcgacctctggctcttcttccctgactacccttatcccctttactctctgtgccttggcacatgctctgctgtgaacatttccacatgctttcctgttttataaatgttttagaatggttcaggcatcattttatggaagagacttttcttttcggtttccagcaacaccctgcctgaaccaggttaggggcccctcctctgtatatcacttgcactggtctatacacttgctccctatcatttatcactctgcagtgtaattcttggtttggtctcaggccctggtcagtgagctgcctgagggccagtctgtcattctagtcccatctactgtagtgtctggcataagtggaggaatgcacaatatcggagcaaatacataaacaaaagctgctttacattctgcttctgagaaaggcctctcaaagtaatgcgtttcttttttctctttaggccagttttgttgcatctggaaataggacagatatttccttggatgatccaaatttctggcaaaagtgggctaagaaggctgaattggatattgatgccttaaatgggagggtgagtaagaagtcccattcgaacacctatctgatctaaaccaagagccactctttgagaaatgtcaaatgtatctcctcttttattattagaacaacctggttattgatactccaagagtgagaaagcagaccaggctctacagtgcagtgaaggaagatgagctgatggagttctcagacttggaaagtgattctgaagaaaagccctgtgcaaagccacggcgtccccaggataagtcacagggctatgcaaggagtgaatgtttcagggtggagaagaatctgcttgtctatgggtaagtaggactcactacgtaagatagaattttattgtaacagtagttagaattcccaactggtagagaaaaactatatttgtgtttgaatttgtgtgacacccctttgcacagtcaaatgaatgcttctgcagtaactttacagggctttgaagccatttggttaacataatctaagttgttcagatgcttctggttcagaggtcacctgaagttaaggtgcttgtgtataccttaaggaattatgccagatctagagttacatgttgattattaataattaagaacaaagtgtcaaaattatgtaatcttttctcactttacaagctttgcataaaatttatgactgtcgtaagcttttaatatttctcttataaaaaattgtcaaaggcagtaatctcacttgttaaattcttccttgcaactcatatgaaacatgaatggtcatttgaactttgtgaaagtgttgtatttttcctgctggactataagtttctgaaagggaggatccatgtccaatttatctctgaatcactgtgatgcccaaagtggtactttgaatggcagggtgctcagtaaatatctgaattggtcaataagagttctctagcagattgtgggactacaggcaactcctgttaaaaaaaaaactgcagctagagtaacctttctacagatctgatgacgtcctgtcttggatgatttcttccaatgaattaccattagtttcagagtaaacacaaacatatgctgacatggcatccagagctcttctgggaccttgtcttctgttggttctttcccatgggtagtccaagcttctgttaggacagacggcttcatctccttcagtgcgccacgctccatctcatctgtgtctttgcacaagctcttcccactgcctagaggaccccccacttgcacctccgctgggaggtgacctacctcccttctgctctccgtgggtgtccgacgcaggcatcagcttgtgctctgcaactgagtctggcctgcacttcccatcacactcatcatgttgtttacaatttttgagtcgcctccctctttcagtttgcagctccttgaggatggaagctccttcattgtgccctcagtgtgtagtgcagtgtgagcagacacacagtgctgataaatgcttgttcaacagaagtccatcattatctgtgaagctggacatcctctcttgtctcttcttacatggggcagagactcaccccctgcgtcccaaaagcccttccccgcaaaagccctttgctacccatgcctgctgccatgtttcagcacaatcatcagatttgagagttctgtgggtaactttaggaatggaacacatgaataactcctacagctaagaagtgtgcttagcgcagattgtctttcagtcgagcccttccctcttcccatagttgtcactatgtactgaacacctatgtgctgggcactgtctaggatcctctcagtcactaggggtggagctctgagcaagacagtcatggctcaggcaggcaggtgagcaagtagaagtggtgcagactgtgacaatactgtgacagggaagcactctgctgtggagcatagagcctgtcagctcactgttaagacacagctccagtgttgtctccccacttctggggttaggaggaatgaaaggaggaattccacaaaaggtggcatgtacagcttgtgacttggtggatatcacaaatcagccagggtaagagggagtgctggggtttgggtagggaagggaagtgaggtaccggcagatagagcagtgtgttccaaggcctagcagtgagagctagccctgtggttggagaaacttgaagaagttcacaggagccagagaggaccagggagtgacaagagaccaagtgagaggcagggcctgagggaggatgtgcgctgctctctgctccaaacacaactctcagtctgcagcagaggggctgttcataccatgagcactgccttggtggctcagtctgctgtcgcctgggagaagacatggctcacatagcacctgctgctgcctgcccccgtacctatttgttgtgtggtcttactccatagctcccagatgagacagcacagcactgtttagcctgggattataacacaaaacaggcagtcagtccccatggtgtgttgtctgtttgcttctgtcttctgtccatagtcgtttctcccactcatttctcatgaggacctgagggttggcagaatatcttgcctgtgatggttcttatgcttggggttattactccgtttcaaaaggaacctcagagctttccagaacctttcaccagtgactgtggcatccccttagaggtgggttgatgcggccatactgctcagcatcgcatccttgattttggggtagtcacaccttttatcttgagttgccttttgtctcagatggttggtcaacatcaaaatgtactaatcatgacagtgtgaagcaaagtccatgatttccaggccctcggatgcactcatgtcctgaaaattgctgctacagccttcatgtacctggaaaggccagggttagctttgtgggtgttattcttgtggcagttcaactcatgcgcttagaagcagtgaactgaggggcagcttactgtataaaggagtgtttttaactcttgcaccctggatttctttcctatcacccagtgtgaattgttgctagttttgacccaggatttcccaacgctggtacctgacttaaagtaaagccataaatcaaaactcacaggcacctctgcatgctggatatttgctttgcagttggggacggtggacagacattctttcccacggacgctataaacgccaactcactgagcaagatgtagaaaccatctgcagaaccatcctggtgtactgtcttaatcattacaaaggggatgagaatatcaaaagcttcatctgggatctgatcacacccacagcggatggccagactcgagccttggtcaaccattccggtaggtctccaccatgctgtttgtgctacagggtcacaaagccaccaggaacttttgtgacacactgttgataaagagatgtgacataaaccccatatttccctgcctcgtgcattaagctctctgccattgacactataattggaatgtaaaaggcttctattattattatgatggtgattctaggtttgtcagctcctgtgccaaggggaaggaagggaaagaaggtgaaagcccagagcacacagccggtggtgcaggatgccgactggctggccagctgcaacccagatgccctgttccaggaggacagctacaagaaacacctgaagcatcactgtaacaagtatgttattagagggtggacctggagagcttaattccctttttattctttaaaaaatacatgcagccggcccttcacgtctgcagatgcagaactcgcagatttggagggtcaactgagggacctgagcatctgcggatcttggtgtctgaggggggtcctggaaccatactcccgcggatatggagggacagctctgttattaagacttttaaatggtatagttattgcctttgcacagccttatcatttttcttgaaatgtggtgtcaagttgcaggagagcatacctttaggtgactgattattttttaacatggtaagatacacaacacaacgtttaccatttttaccatttataagtgaacaattcattggcattaattacactcacaatgctgtatactcactatctgtacctgaaatgtttccatcttcccaaatataaacactgtatcaattaaacagtaacttgcctggcccctggcaatcaccattctactttctgtttctattagtttgtctattctgtgtatctcctaggggaatcacagattatttgtccttctgtgcctggcttacttctcttaatattttcaaggttcatttgtgttacggtgtcagaatttcattcctgtttatggctgaatagtattccattgtgtgtatatgccacgttttgtttgtcccagtcatctgttgacggacacttgggctagttatcatggctgttgtgaataatggtgctatgaacattgtagaggactggtttttaaccagtatcggttagagaatagtagtcagcattatatgatcccactttcaactaactgcgtacagtggagggaagactggggagttcatgtattattttttgcttaatattacctcagttgctgggtccattttttctgcctgtgagcttggaatcatatttcttacctttatttccaaaaactgattatagataattgaagaatattgaaactaaatttatttcattgcttggggttctgttaacagttcctattaaactaacatctgcatatgttgtttccttattctgaatatgcatttttccgtatcactagttcaggcaacaatgctactgatcagctctatgtcctagcttcgtgtgaccttgagcaagttattcagcctcttgaggactcactttgctggtgagtccagtagacctcggcagcaagatctcaactggataaggcaggatgtaaataagtatgcatttctctttgtaaaagtagcagcaacaaagtctgagcacataatactggcagcatgccaagcgctttgtatggattatctgtttgaattgtctaagattagtatgatttttatccccatttaactgacaagaaaactgagactaaagttgagtaacctcctcaaggaccctcagccagttagggggcagaaccaggtttgaacccgagtagatgagggcagcctcagcttggaagtcttccctgctccttggggctgtggtgaggctctgaggtgtcttcagaaccattacctccaacccttttggtatctcagaaacttggtggttactgctgtggcataagagtgctccctaaaatccgaccccacttacactcttagaaaatatctggtcagtatggtacagtcaatgtttaatctcatgagttaacaagagaaaaaaatctaaagaaatagaaatgagttatccaaagtgagtctcttcagggatttataagctcacacttggcctatccagaacccatgctggccgtgagtaggctcgtggttgggggagggcctgttgaggagcatctgttgatgtgtgattgggagttgtctgttctggtgaatcctagttgttattttgaagttttagggacagtttccataccctgagaacagcatggtgtagtagagcctgaagacctagttccagttgtgccatgtgcaaggtaactctggccttagatttgtcacttatcttctgctaccatcagttttcccatttgaaaacggaaattataacttgccctgcttcatcatagggttatcgtgaagatcaaaagggctagtataagtgtgagacattgattgtaaagtgctgtacaagtacatgatgggattattcagctggggaaatagcatttgtattaccatgtactcatggccaagaaggctgcgattcacgtatcagtcctgaatgcacaccagggctgtccagcaggggatgctagctttggtagacactggcttttgggacttaccaggtggactttattgaaagaattatgttttcgccattgagaaactccatgcaggactgaaaatctagttcctagaattccaagggttttaaaaaatcgatttcttgagaatgattaagaatgtcagtgaattggacacattttaattttctaatgtttaatttttttttcaagctactacagcttaggttcccaggtacagtaaactagaaggaataaaaatgtctaacatagtatttcatacaggagaagagcaaggacacacctttctaccccaccctgtcgccatcttcctttctcggaagcaaagttgtataatctgaaaaacctgacattccatattgagggtttattgtaaggtagtaaaaccagattttatatctcatttattcctacaacttctgatgtgcttccaaaaatggtattaaggcagcagctgaggaaattttatgagataatgaagcagaacagttactgaaagccatctgctcagttgtttacaaacttgcttcaatacttcagaggcaatggtagggtacgtgtctaaacttcacaagctgcactaggtagaactaaatgaagtgcgcctgggctgggctgagctcgggccctctctgtgcagtgtgagcggttgccaggcaggcctgttggaagccagcagaaagcaccacacagaggtgattatgtgccaccatctgtcacgcttcaagcctaccatacagcatggctaatcagccttggcaggatgatggatgaacagcagcagctgccaaaagccactgttggcaaacagtcctgaagttaagaactttttcccccctctgtcttcctctccagggtcctgctgcgtgtccgcatgctgtactacctaagacaagaagtgataggagaccaggcggataagatcttagagggtgctgactcaaggttagtgcgagctcacatttgttctcaacctcagtgagataatctgggtagccggaaaacatcatggattgtgtttcagaaccttcataaaccactagtaacccatctccttttttgcatcttgaatgcagtatttgtccttcgtgcttggggatgtgatgagaatcaggaaaaggctgtttgcatttatgtttgtagtgtaaagagatgtgaactaaagcactggtgttctgagatgacccttaaaatgggataccatgtgataaagttcatttctggtcatggcagagggctactgactcatgccctttcttttaaccttgctgatacctccccaccatgctcagatgtttatcgtgggagagagggcatgtgagctatgtatcacattcattacttggaattcttttttaatactaatatttcttataaatgttgtctttcagtgaagccgatgtgtggatccctgaacctttccatgctgaagttcctgcagattggtgggataaggaagcagacaaatccctcttaattggagtgttcaaacatggtaagtgacgtttctgtttgaatacatctcaactgtatggcttggtctttatttagaactctttacatactcttttccaaagtcataatattaatgaggatagttccaaaggactcttggcgtctaccatttttctgtactaaaaatctaatatgaactgtaaatatcagatgctgtttttgaatgtttgttgagcatttgagaagaaaacatttctttcttggctgtaaataaaacccaaaccatatttgttttaataatagccaagttgtactatagctctccctaaactttgcttccagcgcggcttcccttgctaactctgccaaccagtgtcaaagtggacggtgggcttaacctctgctattaatctgtacaagtgcctcctgggctttgttccaagcaatatttcacaaatgtcagtgctgagaactcgcggctcccctgagtgggatgcagccttgttaactttgaaaggctggggatgcagaactggcatgatatatacagtgagcgattcctgattataatcccaattctctggaggtcgcggaggtattctcagcagcccagcctgactaaaggggagaatgatggcttataaaacctttcatgattacagtttggcttgcggctctacagcagttaggagcggtgtgttgtagtacacatcctaattgaattgtgctgttctgcctatgtactgcagccacattttgtgagctcagcctcaaaatcattttcccgcagtgcactgttgggatctgccattttccatctagtcaacttgggcagtcaaaaagcaaattgcagtttgaaaaccatagagggaaccgtgtcatcttactgacatgcatcatcctaaacctaataagacaggttcgctggccttatgtatatggggatttttcagccagccatgcgagttcctgcaggactgatgctattcacagagtggatgggggtggactcagtgcacccctgcagaggtcataaaggaacattgcgaatccttctaaatgtcaagcaaaattagatctggggaaaaatagggtcagaaatcctcccaggcatcttgcagttattctgaacctgtttttctattagtgtttgtggtaattctgataatatccctgaagtgtaacttggctcccagtagcttccctagaaggagcgttccatagaatgatctactaaaacaaggtccacttggattcaacagagatgctaaccttgactgaaaaacaaacttgtgttgtggcagtgctgtgattttgccagtgatggggcctttctttgtttctgtgtgttttctgtgcacggatgggcacggcacaggctatgagaagtacaactccatgcgagctgaccccgcgctgtgctttctggaacgagtcggtatgcctgatgccaaggccatagctgccgagcaaagaggaacagacatgctagcagatggtggtgacgggtaagaaggacattttaaaatttgaataaactttatgtcagtttcacatctattggcagggttcagttcttaccctgcagtacacactgtattgtgtctgatttgaagttcaggagatgtttaccagtctactctatttgtatgtcgtaatgactgtttaaacaatatacattatcttgataatctgaaacttgtttttcttttccaaatgtcatttcccgcaatctccccagaccccctccaccacactgccatggctgcatgttttaaatactgatagagttgcttttgatgtcaaacccataattaaaagtagcactgggcagattattactctttcctacccaccccccttccttcttttgcttatcagtatgattcaaataatttttgtgtttgttttacataggggagaatttgatagagaagatgaagacccagaatataaaccaaccagaacaccgttcaaagatgaaatagatgtatgaacttgagtatattggcttttatagctccattaaaatattatatgcccacataagacttgttaaactttatagataatgaccttttctttaaaagacaaagaaaaatgagaccccaaattaaagtaattctgtttcttgctttgctttcaaggaatttgcaaattctccttcagaggataaggaagaatccatggaaatacatgccacaggtaaggtcccagaaaagcttgtgtagccgagcagacgtgcactgagcagtcattgttcacgtggtagggactgtcctgcttcatgacagcagtgtcttaacaccttatttcttctacactgacctgttttgtgaatcattttaattcttgttaatggctgtgttttcatgacattgaatttcttagataggataactgtttctttgatgataattagctgatttatattttacactaattagtgaaaaattttaagcatctaaactatagctcttgggaatagagcatagagcatttgctaagtattcacctaaaatattttcagtttatttagaatattgaccttttaccgaatataaaatcattacacaacaattatgcagttattttttatactcaagatgattattgcacatacattagaggagagtaccttataagaagtttatgctgtaaagtgtgtttctttatgtaggactaataaataatgttttcatcccctctaaggagttaaaaaagaaataagtgtatatattccaagtgaatgttattacttatttatattttaaaaatgagggcactgagatgccctttcccacactgtcatttgaatcttaatgagtcatcctgttttgttggaatactctgtattgcaagattgcagctacacatttcaaaaatgtttttccacttccccaggcaagcacagtgagagtaatgctgagttaggccaactttactggcctaacacttcaaccctgactacacgtctgcgccggctcattactgcctatcagcgcagctataaaaggcaacagatgaggcaagaggccctaatgaagactgaccggcgcagacggcggcctcgagaggaagtgagagctctggaagcggaaagggaagctattatatctgagaagcggcaaaagtgagtttcttcaaggtttccactcagctcccggtacatgcccctctgccctgctcctgtagacccacaagagacaggactcatatcaaaggtagtgaccaccaaagaaaggctcgctccaacaaagcagtctgtttccccacccccaaataactaccatgtataaagtctggggggaagaagaaaagaaacagtaaatattaagtcttttcctgaagtatgatgcaagctaatataatctttctaacaggtggacaagaagagaagaggctgatttttaccgtgtggtatccacctttggggttatttttgaccctgtgaaacagcaatttgactggaaccaatttagagcctttgccaggcttgacaaaaaatctgatgagagtttggagaaatacttcagttgttttgtggccatgtgtaggcgagtatgtcgaatgcccgtcaagccagatgatggtaggtacatttagcaacaaagttctatacaaaaagacgagtaaagtgaaaaataagaaagtgtacaatgtagaatgcccttgaattctccccaagtaaatatgagcccttctgtgttacagaaccgcccgacctctcctccataattgagccgatcacagaggagcgagcctctcgaactctgtaccgcattgagctgctacggaagatccgcgagcaggttctccatcacccccagctgggagagaggcttaagctctgccagccaagcttggatctgccagagtggtgggagtgtggacggcatgaccgagacttgctggttggtgctgctaaacacggggtcagtcggacggattatcacatcctcaatgaccctgagttatccttcttggatgcacataaaaactttgctcaaaacagaggggcaggtaatacatcttccttgaacccactggcagttggatttgtccagactcctccagtcatctcatctgctcatattcaagatgagagggtactggaacaagccgaaggcaaagtggaggagcctgaaaacccagctgccaaggagaaatgtgagggcaaagaagaggaagaagaaaccgatggcagcgggaaggagagcaagcaggaatgtgaggcagaggccagctctgtgaaaaatgaactgaaaggtgttgaggtcggcgcagacactgggtccaaatctatttcagagaaaggttccgaagaggatgaagaggaaaagctggaggatgacgataagtcggaagagtcttcccagcccgaaggtaaggccttaccactggcccctctcctgaccctgcagcagctggttgtgagatgcgttgctttctggcagcacggcacctgctctttttcacgagtacttagtgtacattttcttctgtgaagggataatttcaagttatgcttatatctgtgttttgctctcgcaccttatagcacctaaccatggtattttgaagaacataaactctaagaagggttgcatggacacattagcaatttctggtttaaggatggaagttaacttgtagtgagtgacagtgtattaagaattctatgtgattttaattttgacaaatatgagggaaggtggtcattcactgagtaaatattgttaatcattttgaaacaattggtgcttgttatgttttgattcagaagtaaagagtgggaatagaatctaaaaataaccaattttttaagtcacagtacggttgctgaaactggcccagaataaaaatagagcacgtactgtgctgtagctggaaccttcaacttttgacagaaggtcagcccttttttctgtgtggaagaacatagactcttgagtcaatgacttggttggctatcagcctcttgtaaggtttacttgcacggtgctaggtggctagtgactaacctctctaagcctctgtgtcatcatctgcaagatggaaataacaccatctatgttaaagggctgttgtaagctttagacaacagtgcccaataccattctagccatgtagtaggtactcaataaaatggagctgattagtattcacatttttaatcatgtcctttctaaacttcagtttccctgatactgtggttgtgagtaatgcacattaactcatttctcagcaggagctgtctctagagggaagaattttgatgaagaaagcaatgcttccatgagcactgctagagatgaaacccgagatggattctacatggaggacggagatccttcagtagctcagctccttcatgaaagaacatttgccttctcgttttggcctaaggttggcaggtttttgttgctgttgttttgctgaccaaaaaggattagggtagaggaaatctttctagcttgatttttcaagtaattttaaggtaaacttttgacacagtatatgaagactatagatttttcttatacttttaaagaatgatctgaaaaagcccaaagaaaaaaattgtagaacacttttctaataggatgggaaatgtgatgtgaaagaaagataataagaaatagaagtgtgtatatggattgatctttggctccatgtggcttttaggttacttacccccgttgtctagcataatctatggattatcactgtgttttaaaatttttttgtgaaataaagccttcagatttaagacaactttatagttttggaaacctaccagcttcttgacttggaagagggtgtactgttgacccatttgcttttgacgcattatgagataattccaaatgtagttatctgtaaccaaaagcaaaatggaaattacttttttggctaaatagtataattttataataattccctgtgtaatttaggtctgtttttcagggtgaggaaataatcatcctaatcaccataacagggctgtctggtttaaaacaacacaaaaaatgagcttcagtcagcctaccccccaggctcgtctttcccagtattattgtgtaagaaacaaggtgaaaattttgaccaaagaatgtactgtcaaagacattttgtttcctctctctatccctttagttcccctgttatgctaacctcctttattgagtgtaggagggagtttcccagatcagtcaaaggttatagtagcagacacttttaatctatggaaactcagtctaaagctgtaattagaaatttttaatgtacacgcttcaatgaaatttgaagtgataataggtagggaatgcaaattgacattcattaggtgttcctaggttggtgcccacttcataatgctgaactttattaatagtgacgctaatgatgtcctacttcctgggactgcaatccagcctgtagatctgaagggccagggcggcaagaagctaatgcagggtttccattgtcatctactgacatccaccagcagagctctatggagcttgtacaagagttactttttaaatatgaagatattttgaaggtggtgattatgtagtacatttttctgttttatgtagttcagtgttcgtaattaaaaatagcatgttttctgtgttgaagccacctaggaccttctgccagagcaatgccattataggagattttgtttatttactttcttgtttgatttcttgccttgttttcttttactttttgtcctccagttgacttttaaacattttatgctcttttgcatcttgatggatgtatttatctagtaattttaaccagggctttgttaaaatttcttgtgacttttcttctccctccaggatagagtaatgataaaccgcttagacaacatctgtgaagcagtgttgaaaggcaaatggccagtaaataggcgccagatgtttgatttccaaggcctcatcccaggttacacacccaccacagtggacagccccttgcagaagaggagctttgctgagctctccatggtcggccaagccagcattagtgggagtgaggacatcactacgtctcctcagttgtcaaaggtgaattagaatggcttgtttctgcagcttaaaagggagctctctaagccttaactgagtttgcgagcttatatttcactggccttgcttagaaataagatagctgctgtttcctcagctctgtgcaccagtcatgaatgcttaattccttaagcttcttgttccttatttctaaaagccagcccatatagcagtactgttttggctcactgcaactctgttctgttggaatttttcaataggaagatgccctcaacctctctgtccctcgccagcggaggaggaggaggagaaaaatcgaaattgaggccgaaagagctgccaagaggcgaaatctcatggagatggttgcccagcttcgagagtctcaggtggtctcagaaaatggacaagaaaaagttgtagatttatcaaaggcctcaagagaggcaacaagctctacctcaaatttttcatctctttcttcaaagtttatcttgcctaatgtctcaacaccagtgtctgatgcctttaagactcaaatggaactgctccaagcaggcctttcgcgcacacccacaaggcatctccttaatggctccctagtggatggagagcctcccatgaagaggaggcggggaaggaggaaaaatgtggagggacttgatctgcttttcatgagccacaaacggacgtcattgagtgcagtaagttggggagcttgcctgcatggcgattgcacgtgttgacagctgagggtcctgtgatgctcacgatgctgggctgtgtttctctcagcagcattgtatgaaagccagcttcctccactaaagaaatagttttacaataaacagtcatgattctgatcattgatacagatcacttggcctgaacgaagtgtagcttgaggatgtattcttcccaagttctgatgtgttgattgctctcagaagaacagccaaacctagaaacatgttcttctgaatctagaattgttatctctgaattcttgaggtggaacaagtttcattgatatgttttaggcctggcatttattaaaattagtataaatgtttcattttggacctaagatttgggttaacataaaaagctagtgactgcaaattctcctatctccttaagtagatattttaaaaatttgagctgtgcttttgctagaataggtttgaatagaatgtgtgaaccaatggattttgacttttcctttctcagttcagaggaaataaattaatgcagtataatcaaaatgattttctttcttaatctgcttcaactacatctcacccaaaaatgtggtgcctgactcactgatgaccagaattttatcccaaagagcacaattacatgtgcttttttaaaaaatggtttagcactatatatcttgaacctattgaccagaagccccagtcaccatagtggctggaactccttgtctgtgttgtgaggagtgggtgctccaggaagccttccaggtactgggccatcctggacccttcttcaagcagtgggacacagtttgggaaactgaaatttgagattgagggaagacagttgtctgtttcaacatgtttttacttacaccatccctattattatttgcccattttctatttcttgaactcagagaaagcttaataagatggcaggaaaagacatggttgagttaaagttcagaaatgaaaaataacatccactgaaatttctttgccctctggtggggtctaattaaaacagaagcattcaggtggctaagagtaaattttcaaaattgggccgggcatggtggctcacgcctgtaatcccagcactctgggaggccaaggcaggtggatcacttgaggtcagcagttcaagaccagcctggccaacatggcaaaaccttttctctactacaattataaaaattagcctggtctggtagcacgtgtctgtgatcccagctactcaggatgctgaggcaggagaattgcttgaacccaggaggcggaggttgcagtgaatcgagattgcatcactgcactccagcctgggtgacagagtgagactctgtctcaaaaaaataaagaaaatttttttcaaaattgattaccaatgcagtgatcatcataatggtcatatttgttgatggtatgattgttttcagaatcctgtaaaagtacactttgtaatggactagctgtgacttacatgttttctgtaagtcaaaatgccatttctaggggtatggccctcagacagagttgtagcactagtaaatagccttcctgtttgaaactacttctttgatagattttgttgactgataaattctttctccataaactttaacaaattgggaagtttctgcagctgacacttctttttgtttattatcatgttcaatatttgtaggtttttttgtttttgaaacagggtttgtttttgagacagggtctcactctttcgcccaggctggagcacaatggcgcagtctcggctcagtgcagcctccaacttctgggctcaattgattctcccacctcagcctccctagtagatgggactacaggcgtgcaccaccatacctggctaattgttttgtatttttggtggggacggggtttcaccatgttgcccaggctggtctcaaacttctgggctcaagtaatccacccacctcagcctcctgaagtactgggattacaggcaatcatgttcagtatttggatcacgacacagctttgtctctggatcaggtgttaggaattaataatgcaacacacgtgcttttttcctattgcaagtacacattctattttaaatctgagactgattttattcatttcactattttaagccgttgttaagaatttgttgatatttttctttttctaaagtcccatttagaaagcctgagagaattcctaattgaagttagagaatgtatttttaaaactttttttttttaactgtcacattttgaaatgtagggattcctcatttggtgttgtcgggggtgatgtgcatgcacataaaatacaaggaaagcactgctcgatctgtaaataaaccaagtaggaaaagatgtaaaggcgagcagtgttacctggatgaaagaggacagatcctagaatttagtattttgtcagcactctaactgtgctgccatgaaaaagtaagagtgcattcagcaacagtggacaagctggcactattccctgtgccagcactgagagtcaaaaaatacagtcctgacaagtgcttgcactggagaatgcagtgtttaggatggggtagcacataaatcataatgtgtcctggttgttcatgtgtgccacgaccaagggatgtctagggtactttgtgagcccaaaggaagcctgggagtggagggaagaggatatggggagaaacagatgaagaagtttccctatggatggctgtacttcaattaagttttgaagatcatgtagtagttggtcattttaaaagggttggcagagaacatgtgtaagaggagagagcctcttgggtttgaagaactgaggaatttgctgaggaagtgagcttcagcagagatgagcttgcagagaaggcaggatgcaaatcatggagggccttgatgccattcggaagaacttggattttgtcctggaggtaatagggatgcaattattgaaaaaaataggagagtgatgtgacataattttttgaactgggaagggctgcattttagaaaactgactccagcgtagtggtgtggaggttggattgaagataggtgggattagaatcagggagaccatttaggaatattgcaataacctgggtgggaagtgacaaaagcctgggccatggtagagctgtggggaaggagaaatgggtgtctggaggttgaaataactgtagacttcagttagtggtggtctttccaatgttgccacacatgtctgagacaaagtgtcccactaccaacaaaattatattgtgcacagagtgcccataagttacatatagactggcttttagaaattcctttagtataaattatctttaatatcattatccggggatctccaagagagactgagaggccgcctttcatgcatatcagctcagactataccccccatgttgtattcccagtggctggcttaggatttcagagcatggaaccttagtggactataaattttttacctaattactagttctacagtgtgaagaatgatataaaagtttcgtcttcttctttttatttttatttttttgagacgaagtctcactctgttgcctaggctggagtgcagtggcacagtctctgctcactgcaacctctacctcctgatttcaagtgattctcctgccccagcctcccaggtagctgggattacaggcaagtgccaccatgcctggctaatttttgtattttttgtaaagatggggtttcaccatgttggccaggctggtcttgaactcctgacctcaggtgatccgcccacctcggcctcccagagtgctgggattacaggcgtgagccaccgcgcccagcctcattttctgacttttaatagctgttcccaaacaactagacattgtttctagtaactattttctctttttgataaaagatccattctaggatagcgttttcttgaaataggacattgtcagaggctctctcttcgtgtgagaattcataccattgtgaactttctgcaggaggatgctgaggtgaccaaagcttttgaagaagatatagagaccccaccaacaagaaacattccttctcccggacagctggacccagacacacggatccctgttatcaatcttgaagatgggactaggctggtgggggaagatgctcctaaaaataaggatttagttgaatggctgaagctgcaccctacttacactgttgatatgccaagttatgtaccagtgagtattgcagagtttagagttggaaggaatcttgcaggccggtccacttcattcccttacaacatagaaatccctgacagctggtccctctgccttttccttgaatgtttcctggtctcaaacatttcccaggtctttgttgttgaatcttcttcattacagatactagcttcaggtctgtcttactgaaggcagccttacagttatttgaagatgcgcgttatgcatttccttactgtttgcttctcccatcaaactcatgtgacttcttcagttattctttccatggcatcgtttccaggcagtcttagtattggggtaacactgttgaatgcactttctccagtctccagacgaggccccgccatcccagagtgctatgaagccaattacttccagagatttgaccagttagtgcagcccaagattgtattagctgcttttatggcaactaatcctggtgccttatattaaacgttagacagttcatatctccaaatggtttgtcacacgaactgtttgctagctagcaatgcaagtcttttgctttctgtatttatgtgattgattttttaaaacttaaatgtagagttttacattttattttgttgggttcagcctagagttcttgccactcagaaagtacccccaccccctacaagatctgtctgtttgttggttagttctcattacagacagtctcatgttgttgatggggtatcatctctgtgttcattggagccactaactagaaattagtaaaagtactacagaaagcctcctttaaaagtatcatgacttggttaaacatttaaagaaaaactttaagtgaggttattgatagataaaaggaaaagccaattctcacttatgtattccttaatggacgggtaaaataggagttttttctttcaaagagaaaaatatggtttctaatattaataattaaaatgattcttgaaacttccataataattgaagatgatctgacagttctctttggcatttatatagagaagaataagtactaaataccaattttactaaatatgttttttcttttgcagaagaatgcagatgtgctgttttcctcatttcagaaaccgaaacagaaacgacatagatgtcgaaaccctaataaattggatataaacactttgacaggagaagaaagggtgcctgttgtcaataaacgaaatgggaagaaggtaaacgctgggaaagggaattgatcactatgcgatttcttagcccagaaggaagtgttttatcctgccttcttctataggggaaaagaatcctgtctgcccgaatgcgtgtgtgcgtgtatgtgtgtattatagaagggggagggagtagattaacagaaaggggagggaagactgtgtttttaatcatttgtcaaatgcctctacccagatgggtggagctatggcgcctccaatgaaggatctacccaggtggctggaagaaaatcctgaatttgcagttgctccagactggactgatatagttaagcagtctgtaagtacaaactgcatttctatcaagaaaggtagctatacaaaactgttttccttagtctttcttattttctgttggccattaattattcagttgtaacttagcttaaaagaattgacataatacatcattttcatacatcatttcatacatcattaatacatcaatcattaatccaaagtgaattcatttatcagctccaatttaaaaggtttgtatggaaacatacattcacaatcttagaggtagacttctccaggggggattgccccagctaagcctacttaacagctcacctgtggaataggatgtatggtggttgagatcattaagattaactgtgatttctgatttaaaaacaaaacaaaacaaaacaaaacaaaaatacaacagttctgcctaaaagatttgttaccattagctttttaaaaattcgttcatgacatgctggttctttgttttaattatacattaaaaatgtctttcggtgtaacattctgttgatcttaacacacgtgtgagtttgtgaactgacaccgtagtcagaatagggttccatcccccacccccaccaccccgagttccctcacaccgtcctttccccgaccccagcccctggctgccgctgacctgttgtccatccctgtctttttgagaatgtcctgaaatggaagcatgaaggacataagtcttgaagcagtttctttcgctcatcatatggaaggtcatcgatggtcacatgtgtcacagttatctcctttctgttgccaagtagctgtctccattgcatagatgtgacactggacggcttagccctcacacactgaaggacatctgggttatttcctgatttttgaaactatgattagagctgctataagcaattgtgtacaggttttggtgtgaacataagttttcatttttctagggtagatactaaaatataattacattttccatatttcaaaaatacttttacatatatttgaaatatccaaaataacacattatagagggcataaaacatcctgggtttatattatgttatactattttataatttttctcccatacaatatctttttttttcttttttttttttttttttgagacaaggtgtttgtcacccaggctggagtgcagtggtgaaatcacagctcactacagcctcattctcctaggctcaagcaatcctcccacctcagcctcccaagcagctggcactacaggcacacatcaccaagcttggctagtttttgtattttttgtagagaaggcattttgccacgttgcccaggctggtctcaaactcacctcaagcaatctgcctgccctgacctcccaaagtgctgagattacaggtgtgagccactgtgcccagccaaaatttttttttaattgacagatatttaattgacaaaaattaattgatgaatcaaatatatatgcaaggtgtacagcacagtgtttttttcttttaagagacagggtcttgctgtgtcacccaggctggagtgcaatggtgcaatcatagctcactgcagcctcaaactcctgggctcaagcagtcctcccacctcagcctcctgattagccaagtagctgggatgacaagcatatgccaccacacctggataatttttttttattttgtagagatagggtcttgctatgtgccccaggctggtctcagactcctgggctcaagaaatcctctagtcttggcctcccaaagtgttgggattacaagcatgaaccacggcacctggcttcaaagtgatgatttgatataattatacattatgtactttcctttttaaaaatttgttatgggtacatagtaggtgtatatatagggtacatgagatattttgtacaagcacacagtgcataatgatcatgttgggtagatgaggtatgcatcacctcaagcatttaccctttgtattacaaacaatgtgattatactcttttagttattttaaaatatacagtaaattattgttgactgtgtagtcaccctgttgtgttatcaaaaactagatcttactcatcctgtctaactctatttttgtaccccataatgtactttctgatgtatgatttcttgagttagttatggatgcagctaacttgacatttacctcactgatgagtagccttgagcaatttttctgcagttcagcaagctaacataataataaaaacaagttttgctgtcattaagttttatcattgagctgttaggagggaagaactacttaggtatttccatttggaatggcaggttcaccacagaggctcacattgagatcaagttgtcttcgacagcctttatagccactgtttgcctcccctgtactccagggttttgttcctgagtcgatgtttgaccgccttctcactgggcctgtagtgcggggagagggagcgagcagaagaggaagaaggcccaaaagtgagatcgccagagcagccgcggccgccgctgctgtggcctccacgtcagggatcaaccctttgctggtgaacagcctgtttgctggaatggacctgacgagccttcagaatctccagaatctccagtcgctccagctggcaggcctcatgggcttccctccaggactggcaacagctgccaccgccggaggcgatgcgaagaaccctgctgctgtgctgcccctgatgctgccaggaatggcgggcctgcccaacgtgtttggcttgggcgggctgttgaataaccctctgtcagctgctactggaaacaccactactgcttctagtcaaggagaaccggaagacagcacttcaaaaggagaggagaaaggaaatgagaatgaagacgagaacaaagactctgagaaaagcacagatgctgtttcggctgctgactctgcgaatggatctgttggtgctgctactgccccggctggattgccctcaaacccgctagccttcaaccctttcctcctgtccacaatggccccgggcctcttctacccatccatgtttctacctccaggactggggggattgacgctgcctgggttcccagcattggcaggacttcagaatgccgtgggctccagcgaagaaaaggctgctgacaaggctgagggaggaccctttaaagatggagagacccttgaaggcagcgatgccgaggagagcctggataagactgcagagtcctccctcttagaagacgaaatagcacagggtgaagagctagactcacttgatgggggggatgaaatagaaaacaatgaaaatgatgaataaccagtaccagttccagttcaagtgtttaaaacttttgacaagtggtagtcctactgtttacactcacagttaatgttcatacctagttttataagctgttctgtaacatagtgtagcaaaaaaaaaagttcaagtcatgttatacaggtgtgtcaaaaggtatcttggtcattaagtattgtgcagtgcattatttattatccctaggagagatgaaatttgagaggtgatcatgtctttttaaggaaacttacataatgctctgctttttttttttctcttggtaccattggtattataataaagagcaatttgtaactgagtggcactaatggaagaaagtgctgctcaaaggaagtatgaagttatatatttaattttttaattttaatttttaatttttttgctgtgaaggtcaagctgaaatttaccatacatatcatacttgctcatttgtttccctttttgactgtatgggggttcccacactcgtgcatacacacacatccatacactctgacaatctccacgctagtgtgaacgcctctgtcccgaggcgcagcaataataaggcagctgttgaatgtgaagggtccctttggaaaattaacctactgggagggttcttgccagacagaactacagttccattgtctcgtggtcttgtaatgcactggtaaaaacaaaataaatagatgaataaataaagagtgagagaagagagaatcaggtaccttttttaaattaaaggactttgttactttagccacaaagctaaaacagcattacctcagctctaaactagccttgaagtttacagacatgactttgtaaatgtattgtttttctttgttgtgatgtccttttatttttttctttgaaaactgctatcatgtaagataaaatgtaaattgctgccaactgtagtaatgatgcttttaataaaagtgacccatgatatgcagagaatgtaattatagaatgtagtatatagggaaactggtgttcactctatttatttattgtattcgcaacttgatgcaaatacagcattttggcttttggacagtttcttgaaaaatcctctaaactagattagcttttgtaatacactcaactgttttgaagactagacagtaaggaaaaccttgaattactctcacataattccactccagatatctcaacagcaatgcatacaaaaagctcctattactccctcaaaagggcatctgagaccgagaatacttagaaatgtgtgcagcgtgtgataatgtggtacactgaagaacaaaagggcaaaagaaaaatgaggctttaacaggcacaatatctaggtcatttatccttggttaatgggtagaaaaacacaatgcggtagtgtcagcaagggacacaaaggcactctggtgtcctgcagaccagcgctcgatgccagaaaccagggtgtggaaaaacccatgtggaattgaaacagacccacttaagcacgcacgcgcgcacgcacggtctcaggagctactgatttgtggacccctttttgacctttggtatttaaagtaaaatataatttgagatctactgttttcacctttttatgtcacctgaaccaacacaaagccatatttccatccagttaaaaagcaggggaagggatgtggacgagagtgtttcgtgtgtgttgccttcctccacacccttcccccaggacgtccgcacacagtccacccccagccagtgtgctgccagacaggtggtctaaattcctcccagactgtgagattcagttcgtttatgccccaagatgaaaatatgccccttaatgattctgggaaagaaacaacctgaaccctccaccttacagatcctgtgattgcttttatttatcatcgtcgttgtctgctgaaagtgaatgggccgtgcacactggaggaaagtgccttgaagagaatattttttgaaagggaattatttgaacacgggaaagtgaaactaggtctgcatgaagtataggaaatttaagtatttaagtaacaaagatgttagcagggagaatttgcttaataaaatgagtcattaaagggtgttttttttaaagttctttgtagtattggaaattttcctatgagcctctgtaaatagagaatataatgtgacactgttaggataaaattctaagagcaatgatgatcttcaaagcaaagccatcagttgctcgtggccagaggacccctgagttgttggggctcactggcttgttatgtgcatcatccggtactcatctgttgacgtggctttaatgtcattcacattttcatattgaaaaatgcattttttttcttccagtgaaattcattcttggtagtagatcttgaatctacctaagtattttattttctttctttctttctttcttttttttttttgttgttgttgttgagacggagtctcgctgtctcccaggctggagtgtagtggcacaatctcagctcactgcaagccccgcctcccactttcacgccattctcctgcctcagcttccttagtagctgggactacaggcgcctgccaccacgcccagctaattttttttgtatttttagtagagacggggtttcatcgtgttagccaggatggtcttgatctcctgatgcttgtgatccacctgcctctgcctctgcctcccaaaatgctgggattacaggcgtgagtaaagtattttcaattcagtcagatactaatgggtatgatcgtgtgcctagcatggaggaagcactgaggtgccaagggttctcctggcattgctccctgatggaagttctgttcttccctgaggaggctgaggcccgggagttggcatcatccccagcagtaagtgcaggaacaggacttgaactcaggtggtctgactgcagaagtctgtgtatgtgctcctaaaatactgtgcttttaggtctctgaaagaaaattatgacataaggataactgaaatttcgctgtttattccccttcataacatcttaagtttgaggttgggaattaagagaaagtcttgaattagagacttagctctggctaaggaaatgaatcccacctacctcatttaaatttggatttattttgccccacaagtatttctattttataaagaaatcaagtctttaaaaagaatttgtccaaataagttacagagagagtaaattgccagcctggtatttgaaccccaattgatgtaactccaaagcccaggctcctaaccactatgctagtgtaattaacattcatcagcaacattgggtgctgtgtgctagaggctgtgctgggaatatagaaatgaaagcaaacagactagtcccctgctgtcatgcagcttacatcctagtacgaagagatgcataatagaatacaaataaaatgtttgcagggcaaggaagactcttaaataaggtgataggatggccaggaaaaagctctctatggaggagacagctcacacctgagtgatgagaagcagtaggcagactatattctagttggagaattgtccagacaaaaggaatgacaaacgcaaagaccttgagctggtaatgagcttggaataaggagtggagaggccatctgccttgaaaagttgggaggcatggtcagattacatagggcctggatggctctggtggaggatttgggtttcatgctgagtgctgtagaaagtcttctgaaggttttatgcagaaaaatggtcattttcatgtttttaaaggatcattatgtctgcagttcaaaaaactcccttgtaaaggggagtcagcaattccagctgggagatggctgtagcaaccttgggtcaagtttagtgggcagtaatggagaaggaaagccatggatggacttgggatatgttttgaagaggtagaccctccaatttaaatgaacttttcagtgaataatttgtattaattcttcaggactactactaaaaactaacagataaagaatgttcaccatgctaatttttttaaataagaatgttgtgattagtgttagaagaagatactgggaaaataaatttttccatcatgtacattataaaattttctttttagttcaatgaaaattgttaattgtctgtgggaagagttttagacattaatcctgaccggtagaggaggtgagagtgagcattgttgaagcaatgtgtgttacagcaaacatctctgtgtctctagggccatcaataaatttaaattaggaagcaaaacaatgtaaatgacttctactaacaagcacttaaaagaatacatcttattcattcaacttggctctctaatgagcaattttatattttcttaagcacaggtaagatttaccacagttttacagacatagtaaaataagctatatttggcaaaatagatgaataaattaccttcgggaatactttacctaatgtaagactcttaagcatttcattattgagatttttggtaggggagtcacttaatttgaagattttctggtaagggttaggatgatcgttttctaagtattctggactatttaagttattttatgcagtgcaacatagcgccaccctcccaataggtctatttgtttataaaccttgttttggatctacagatgtagatttgaattttaatttggatctccttaatcaaatgtgtactatgtaatttaaatgaaattaaataataagctagtgataaaatttgaaatattttgacatctaatatctttaccttccgaacgatttactctttttttttgagatggagtctcactttgtcacccaggctggagtgcagtggcacaacctcggctcactgcaacctttgccttccaggttcaagattctcctgcttcagcttcctgagtagctgggcccatagacatctgccaccatgcccggctaatttttgtatgtttagtagagatgggatttcaccatgttggccagactggtctcgaactcctgacctcaagtgatctgcctgcctcggcctcccaaagtgctgggattacaggcatgagccaccgtgcctggcagaatgatttactcttaaaatttgtttagctcctaagcaggttgacattttcttcacttgaacaaagatggcagaatcccatttcacatgttggcaggcatgctatttaagtgtgctggtgcctctccacagtaggatcctgctgtgagccttcccttctcatgaggtccttcctgggctcccagataaatgtcatgataaatttggagttgtagctaaagggcagcctaatagatttctaatatataataaatagtagcactaggtcaaaatactgcttaggaatcactttatactccaggtggcttcctccattgtcccctcgccgcctctgcattttgatctgaaagctcgatttcaagattacaaatgagagaaacctgattctcttctgtgacaggagccaggtactgcaatggtttgcaatccaaaacctcataattgtcagcctcagttcaagagacttcaactgggatataggctggatgactgaaacctaagcaggctgtaaagttaatagttttggggagtgcgcatgacagtttggaaaactcatcctgtttaacatgtttcaccatgtttccctaggagtcgggaagctcaacatttcagaattcagcatttgtgtttgttaataggcactggtgagttaatccacaccacaccctggtaagttaggccagtcttgttgccaccagccctttaccaggtgaggcagggtcatttgcccaaggccaagtagtacacaagtgtggtggccagaactagaatttggacttttccagcggacgtgatggctagctgtgggccatctgtcttaggataaacccaccatcaatgttaattcaggtctaggatcttaaacaaaaacctaaaatagatcaagctacaagatattttaataaccgatggtgtgatctgaagagcaaatcagaaagttccagaatctcatgctgcattacagaagtgattattgaagaatggctgaaagatgttcaagtaaaaaaaaaaaaagcaattaacaagtaggctttatatccatgctgagttaatgatatgatctatgcaactgacagtctaaatatttctgcatgttactgaggatattcactaggatttctggatagtgaatattgccctttcttctaccttgtatctgaatggccctaaaagccagccccagcttgtagaaatcgagatgacaaagtctggaacctatggctcctacaaggatggaaaatagccccagcagaacagtgttgcttcatctgtccccacccacagggctttcctaggctattgtagctctcatagcggatttgcatatctgtagctgcagagctaatgttctctctctaggctcagggggccctgcaaggcagctccatggtcctttccattttattgtaagagttggtggaaaatgagaggcggccattgtgtctgactgcggaggcattgttcttccccagacgaggctggcctctttctcagctcccggtttctgctcctccagccatggctagcttctgaggagcagctggactaactcagaattgccccaagggttacttaaaaccatgaaaagaaattttactctccaaaatgtaaagttacaaactgccccccaaacaccttttcttggcagtcccagtttgtacagaacctgtgtgttctgatagtaacgcagccgtggcaactcaacaacaaagtgctggctcgaacctcagcccccagcccctagcccactttgtgaaaagaatttcattgaccatcagaatatgtggtggtggcagtgggggataaaattgaagcagaaaatgtccctttacatttcaaccataaaaccatctgttgctgaggactgtgcaggtatcaattgtttatgatcattaaaatcttgctgttgaggatagttactacaaaaacctgaatattgtttatgatgtcgatgtcggggaaaccaaagctttttgtatttatgttgctttcttatgtggtttgggggtaggccaaatgagcaaaacaacagtggccttccaaggtgcataggcctaggagaacatgctgtaaaatatatgcaagaagaaaagcaactttgagaatcacttggtgtttcttgtatttggagctcaaatgactaaatggccaaaatgtcatctccagctgacatgcttccagcatgtctgttctggtcagaaagcttacccaaaatagtttacaattttattttgtactacgatatacctgctactggacacgcatctgcagattttaggtgcatgctgatctggcacatttattctcatggattgtatgtacggggcattacgtgctccctgccttcaaggagatgctgaaatccacaacaacttgaagggttagacaaacttactgttttaatagctgttataggtacaaattatcctagccacttgattgtcagttgtggctaaatatgttgaataaggaggaagctactgagcccagagaccctgggagaggacatgtggatttgatcggttgtccttgctccttgtaattttagcttcctgcacctgatcactttatccagagcaggaacagctttaaactaatcttgttttgctttaaatgtaaaccatctaggcttctgaattagtgcaaaaaagaaaaaagtttagtaacttcagttaaatctctaagactcacatctctcctgcatcagcatgatcatgatattccccttctcttagaggtgccaccaacggtgacctaaaaacggaggcagcaatgccctgaggatggcatcctgttgctggtgtccacaaggtgatttccttctggatctggacattcttgcttgatggactaaatgcagccatgttttgctttcggcctttccacattaagtctctgctctcttagggacaaatgttatggagtctttttgtgtattaaggacactttcttttgaaagccatgccaggggttatgctaaacaaagggcataataggcatcattcttgtccttaagtagcaaccaattgggaagtatttaatgggcaattggagggtgtgttggagggtaggggtgagagaaaaagcatatagtcagggttcttccagtgcctaagagtgttgctgaggtaggtaatataaacaacagatctgcccgtgctttgcagatttcagggcatttatccatgcattgtctcaatggatacaacttagaaataggccagttgtgactttagagattaaagaaattaaggttctgtgaggcaaggttagcaagtggtttcgttgaatcttgcaggcaggtctttggactccaaatcacatagtgtggtttctctaccacataatgacagcaaccaggtaactcctgccacacacacacagtggcagccctgtagagcaagttcatctctgagcctcaccttcctcatttgtaaatttggaagcataataatgataatgccttccttctagtgttgtgtgaggattcgaaatcctgaatatggccgggcacagtggttcacacctgtaatcctaacactttgggaggctgagccagatggatcacctgaggccaggagttcgagaccagcttagccaacatggcgaaaccccgtctctactaaaaatacaaaaaattagccaggcatggtggcgggcacttgtaatcctaactacttgggaggctaaggtggaagaattgcttgaacccgggcggtggaggttgcagtgagctgagattgtgccactgcgctccagcctgagcaatagagcaagactgtcttgaaaaagtgaaaaaagaaaagaaatcctgaatatgcaaagttcttagcgtctggcactgaactggcactcaacaaatgatcatttaaaaacttcacatcgtttgacaaattctaaagaagtggtacaggagaatgaagcctaaaaacactgagcaaatggccagggtggttttggcctataaggagtgttctatagaaatgaggcttctgcctgtcctgaaacacaggcagttcttggctgaagacagcagtgcagacttgagcttggagtaggtgggaggaggtaaggcttctagaaagtcggttctcaaacaccagtgagcaatacaagtagccctggggccttgtacacttccagatttggatgaaaattgtttttaaagcttcacaatactcttattccaatacattctaatattttctgttgtattctatttcattagaataaataaataagagatcattcccctctaaactgacttagtgatgcagtagtggttggtggcctgcactttgaaaaatcctgctgtacaacaagggttcttaacctggggccatggatgggctttgtgggaggggatgtgggtggccctaagtcccttgaatttggatgcatagttatgtgtgcatgtatttttctagagagaggatccctaaatttcgtttggacctcaaagcacctgtgacttcctctctgagagggtaataagagagccagaaaagcagctttgagtgattggggattacttttaatgccacttcagaaatggaaaactgatgaaaaaccagtccctgaagaggaaaaatcacagcaagtggaacattccccccaaaatgcctcctgcccagggtactctcctcccgcttgtgtgacagccagcagttgggacagcctcctttttctcctgcaccaagtggggacggtaataccaccttccatgcaggccagttttgaagactgaatgagataatgcctgtagaactacttagactggtacaaaataaacacattcacaatgtcaactattgtgcgtgctgtccctgcgtggtgacagtaccacagagagtgttgtccccattgtatctgtccagtgctttgtgagtgtgtgtttgtttttagtggaatgaattcttttcctcattcatgagcat

SEQ ID NO: 41 - DNA, 6753 bp, Homo sapiens
aagagacggtccagcagacaggtgaagagaaagcgctacactgaagacctggagttcaagatttctgatgaggaggcagatgatgcagatgctgctgggagggattccccctccaacacctcccagtcagaacagcaggaatctgttgatgcagaaggcccagtggtagaaaaaattatgagcagtcgttcagtaaaaaagcagaaggaatctggagaggaggtagaaattgaggaattctatgtgaaatacaaaaacttctcttatcttcattgtcagtgggcatctatagaagatctggaaaaagataagagaattcagcaaaaaattaaacgatttaaggcaaagcagggccagaacaagttcctttcagagattgaggatgagctttttaatccagattatgtggaggttgaccggataatggactttgcacgtagcacagatgaccggggagagcctgtgactcactatctggtgaagtggtgttcacttccttatgaagacagcacgtgggagcggaggcaggacatagatcaagcaaagatcgaggagtttgagaaactaatgtccagggagccggaaacagagcgtgtggagcgacctcctgctgatgattggaagaaatcggagagttccagggagtataaaaacaataacaaactcagggaataccagttggagggagtaaactggctacttttcaattggtacaacatgcgaaactgcattttagcagatgaaatgggtttgggaaaaactatccagtccattacatttctctatgagatatatttgaaaggaatccatggcccttttttagtaattgccccattgtccacaatccccaactgggaaagggaattccgaacctggacagagttgaacgtggttgtgtatcatgggagtcaagctagtcgtcggaccattcagttgtatgaaatgtacttcaaagatccccagggtcgagtgataaaggggtcctataagtttcatgccatcatcactacatttgagatgattttgactgattgtcctgagctgcggaatattccatggcgctgtgtagtcattgatgaagcccacaggctgaagaacaggaactgcaagctgttggagggactcaagatgatggacttggaacacaaagtgctgctgacgggaaccccactccagaacactgtggaagaactcttcagcttgcttcatttcttggaaccaagtcgcttcccttcagaaaccacatttatgcaagaatttggtgatctaaaaacagaagagcaggtgcaaaaacttcaagctattctaaagccaatgatgttgagacgtctcaaagaggatgtagaaaagaacttggcccccaaagaagaaactattattgaagttgagctaacaaacattcagaagaaatattaccgagccatccttgagaagaatttcacatttctttccaaaggcggtggtcaagctaacgtacctaacctattaaacactatgatggaattgcggaagtgctgcaatcatccgtaccttatcaatggtgctgaagagaaaattttggaagagtttaaagaaacacacaatgcagagtctccagattttcagctccaggcaatgatccaggctgctggcaagctagtgctgattgacaagctgctgccaaaactgaaggctggtggccacagggtgcttatcttttcccagatggtgcgctgcttggacatactggaagactacctcattcaaagacggtacccatatgaaaggatcgacggccgagtaagaggcaacctccgccaggcagctatcgacagattctccaaacctgattctgataggtttgttttcctcctgtgtacaagggcaggaggtttaggcattaacctcactgctgctgatacctgcatcatctttgattcagactggaatccccaaaatgacctccaggctcaggctagatgtcatagaataggacagagcaaatctgtgaaaatctacaggctgattacaagaaattcctatgaaagggaaatgttcgacaaggctagtttgaaactgggcctggataaagctgtgctacagtctatgagtggaagagaaaatgctaccaatggggtacaacagctttccaagaaagaaatagaggatcttctacgaaaaggggcctatggtgcactcatggatgaggaggatgaagggtctaaattctgtgaagaagatattgatcagatcctcctacgtcgaacccacaccattaccattgagtcagaagggaaaggttccacatttgctaaggccagttttgttgcatctggaaataggacagatatttccttggatgatccaaatttctggcaaaagtgggctaagaaggctgaattggatattgatgccttaaatgggaggaacaacctggttattgatactccaagagtgagaaagcagaccaggctctacagtgcagtgaaggaagatgagctgatggagttctcagacttggaaagtgattctgaagaaaagccctgtgcaaagccacggcgtccccaggataagtcacagggctatgcaaggagtgaatgtttcagggtggagaagaatctgcttgtctatggttggggacggtggacagacattctttcccacggacgctataaacgccaactcactgagcaagatgtagaaaccatctgcagaaccatcctggtgtactgtcttaatcattacaaaggggatgagaatatcaaaagcttcatctgggatctgatcacacccacagcggatggccagactcgagccttggtcaaccattccggtttgtcagctcctgtgccaaggggaaggaagggaaagaaggtgaaagcccagagcacacagccggtggtgcaggatgccgactggctggccagctgcaacccagatgccctgttccaggaggacagctacaagaaacacctgaagcatcactgtaacaaggtcctgctgcgtgtccgcatgctgtactacctaagacaagaagtgataggagaccaggcggataagatcttagagggtgctgactcaagtgaagccgatgtgtggatccctgaacctttccatgctgaagttcctgcagattggtgggataaggaagcagacaaatccctcttaattggagtgttcaaacatggctatgagaagtacaactccatgcgagctgaccccgcgctgtgctttctggaacgagtcggtatgcctgatgccaaggccatagctgccgagcaaagaggaacagacatgctagcagatggtggtgacgggggagaatttgatagagaagatgaagacccagaatataaaccaaccagaacaccgttcaaagatgaaatagatgaatttgcaaattctccttcagaggataaggaagaatccatggaaatacatgccacaggcaagcacagtgagagtaatgctgagttaggccaactttactggcctaacacttcaaccctgactacacgtctgcgccggctcattactgcctatcagcgcagctataaaaggcaacagatgaggcaagaggccctaatgaagactgaccggcgcagacggcggcctcgagaggaagtgagagctctggaagcggaaagggaagctattatatctgagaagcggcaaaagtggacaagaagagaagaggctgatttttaccgtgtggtatccacctttggggttatttttgaccctgtgaaacagcaatttgactggaaccaatttagagcctttgccaggcttgacaaaaaatctgatgagagtttggagaaatacttcagttgttttgtggccatgtgtaggcgagtatgtcgaatgcccgtcaagccagatgatgaaccgcccgacctctcctccataattgagccgatcacagaggagcgagcctctcgaactctgtaccgcattgagctgctacggaagatccgcgagcaggttctccatcacccccagctgggagagaggcttaagctctgccagccaagcttggatctgccagagtggtgggagtgtggacggcatgaccgagacttgctggttggtgctgctaaacacggggtcagtcggacggattatcacatcctcaatgaccctgagttatccttcttggatgcacataaaaactttgctcaaaacagaggggcaggtaatacatcttccttgaacccactggcagttggatttgtccagactcctccagtcatctcatctgctcatattcaagatgagagggtactggaacaagccgaaggcaaagtggaggagcctgaaaacccagctgccaaggagaaatgtgagggcaaagaagaggaagaagaaaccgatggcagcgggaaggagagcaagcaggaatgtgaggcagaggccagctctgtgaaaaatgaactgaaaggtgttgaggtcggcgcagacactgggtccaaatctatttcagagaaaggttccgaagaggatgaagaggaaaagctggaggatgacgataagtcggaagagtcttcccagcccgaaggagctgtctctagagggaagaattttgatgaagaaagcaatgcttccatgagcactgctagagatgaaacccgagatggattctacatggaggacggagatccttcagtagctcagctccttcatgaaagaacatttgccttctcgttttggcctaaggatagagtaatgataaaccgcttagacaacatctgtgaagcagtgttgaaaggcaaatggccagtaaataggcgccagatgtttgatttccaaggcctcatcccaggttacacacccaccacagtggacagccccttgcagaagaggagctttgctgagctctccatggtcggccaagccagcattagtgggagtgaggacatcactacgtctcctcagttgtcaaaggaagatgccctcaacctctctgtccctcgccagcggaggaggaggaggagaaaaatcgaaattgaggccgaaagagctgccaagaggcgaaatctcatggagatggttgcccagcttcgagagtctcaggtggtctcagaaaatggacaagaaaaagttgtagatttatcaaaggcctcaagagaggcaacaagctctacctcaaatttttcatctctttcttcaaagtttatcttgcctaatgtctcaacaccagtgtctgatgcctttaagactcaaatggaactgctccaagcaggcctttcgcgcacacccacaaggcatctccttaatggctccctagtggatggagagcctcccatgaagaggaggcggggaaggaggaaaaatgtggagggacttgatctgcttttcatgagccacaaacggacgtcattgagtgcagaggatgctgaggtgaccaaagcttttgaagaagatatagagaccccaccaacaagaaacattccttctcccggacagctggacccagacacacggatccctgttatcaatcttgaagatgggactaggctggtgggggaagatgctcctaaaaataaggatttagttgaatggctgaagctgcaccctacttacactgttgatatgccaagttatgtaccaaagaatgcagatgtgctgttttcctcatttcagaaaccgaaacagaaacgacatagatgtcgaaaccctaataaattggatataaacactttgacaggagaagaaagggtgcctgttgtcaataaacgaaatgggaagaagatgggtggagctatggcgcctccaatgaaggatctacccaggtggctggaagaaaatcctgaatttgcagttgctccagactggactgatatagttaagcagtctggttttgttcctgagtcgatgtttgaccgccttctcactgggcctgtagtgcggggagagggagcgagcagaagaggaagaaggcccaaaagtgagatcgccagagcagccgcggccgccgctgctgtggcctccacgtcagggatcaaccctttgctggtgaacagcctgtttgctggaatggacctgacgagccttcagaatctccagaatctccagtcgctccagctggcaggcctcatgggcttccctccaggactggcaacagctgccaccgccggaggcgatgcgaagaaccctgctgctgtgctgcccctgatgctgccaggaatggcgggcctgcccaacgtgtttggcttgggcgggctgttgaataaccctctgtcagctgctactggaaacaccactactgcttctagtcaaggagaaccggaagacagcacttcaaaaggagaggagaaaggaaatgagaatgaagacgagaacaaagactctgagaaaagcacagatgctgtttcggctgctgactctgcgaatggatctgttggtgctgctactgccccggctggattgccctcaaacccgctagccttcaaccctttcctcctgtccacaatggccccgggcctcttctacccatccatgtttctacctccaggactggggggattgacgctgcctgggttcccagcattggcaggacttcagaatgccgtgggctccagcgaagaaaaggctgctgacaaggctgagggaggaccctttaaagatggagagacccttgaaggcagcgatgccgaggagagcctggataagactgcagagtcctccctcttagaagacgaaatagcacagggtgaagagctagactcacttgatgggggggatgaaatagaaaacaatgaaaatgatgaataa

SEQ ID NO: 42 - protein, 2238 aa, Homo sapiens
KRRSSRQVKRKRYTEDLEFKISDEEADDADAAGRDSPSNTSQSEQQESVDAEGPVVEKIMSSRSVKKQKESGEEVEIEEFYVKYKNFSYLHCQWASIEDLEKDKRIQQKIKRFKAKQGQNKFLSEIEDELFNPDYVEVDRIMDFARSTDDRGEPVTHYLVKWCSLPYEDSTWERRQDIDQAKIEEFEKLMSREPETERVERPPADDWKKSESSREYKNNNKLREYQLEGVNWLLFNWYNMRNCILADEMGLGKTIQSITFLYEIYLKGIHGPFLVIAPLSTIPNWEREFRTWTELNVVVYHGSQASRRTIQLYEMYFKDPQGRVIKGSYKFHAIITTFEMILTDCPELRNIPWRCVVIDEAHRLKNRNCKLLEGLKMMDLEHKVLLTGTPLQNTVEELFSLLHFLEPSRFPSETTFMQEFGDLKTEEQVQKLQAILKPMMLRRLKEDVEKNLAPKEETIIEVELTNIQKKYYRAIKNFTFLSKGGGQANVPNLLNTMMELRKCCNHPYLINGAEEKIEFKETHNAESPDFQLQAMIQAAGKLVLIDKLLPKLKAGGHRVLIFSQMVRCLDIDYLIQRRYPYERIDGRVRGNLRQAAIDRFSKPDSDRFVFLLCTRAGGLGINLTAADTCIIFDSDWNPQNDLQAQARCHRIGQSKSVKIYRLITRNSYEREMFDKASLKLGLDKAVLQSMSGRENATNGVQQLSKKEIEDLLRKGAYGALMDEEDEGSKFCEEDIDQILLRRTHTITIESEGKGSTFAKASFVASGNRTDISLDDPNFWQKWAKKAELDIDALNGRNNLVIDTPRVRKQTRKAVKEDELMEFSDLESDSEEKPCAKPRRPQDKSQGYARSECFRVEKNLLVYGWGRWTDILSHGRYKRQLTEQDVETICRTILVYCLNHYKGDENIKSFIWDLITPTADGQTRALVNHSGLSAPVPRGRKGKKVKAQSTQPVVQDADWLASCNPDALFQEDSYKKHLKHHCNKVLLRVRMLYYLRQEVIGDQADKIGADSSEADVWIPEPFHAEVPADWWDKEADKSLLIGVFKHGYEKYNSMRADPALCFLERVGMPDAKAIAAEQRGTDMLADGGDGGEFDREDEDPEYKPTRTPFKDEIDEFANSPSEDKEESMEIHATGKHSESNAELGQLYWPNTSTLTTRLRRLITAYQRSYKRQQMRQEALMKTDRRRRRPREEVRALEAEREAIISEKRQKWTRREEADFYRVVSTFGVIFDPVKQQFDWNQFRAFARLDKKSDESLEKYFSCFVAMCRRVCRMPVKPDDEPPDLSSIIEPITEERASRTLYRIELLRKIREQVLHHPQLGERLKLCQPSLDLPEWWECGRHDRDLLVGAAKHGVSRTDYHILNDPELSFLDAHKNFAQNRGAGNTSSLNPLAVGFVQTPPVISSAHIQDERVLEQAEGKVEEPENPAAKEKCEGKEEEEETDGSGKESKQECEAEASSVKNELKGVEVGADTGSKSISEKGSEEDEEEKLEDDDKSEESSQPEGAVSRGKNFDEESNASMSTARDETRDGFYMEDGDPSVAQLLHERTFAFSFWPKDRVMINRLDNICEAVLKGKWPVNRRQMFDFQGLIPGYTPTTVDSPLQKRSFAELSMVGQASISGSEDITTSPQLSKEDALNLSVPRQRRRRRRKIEIEAERAAKRRNLMEMVAQLRESQVVSENGQEKVVDLSKASREATSSTSNFSSLSSKFILPNVSTPVSDAFKTQMELLQAGLSRTPTRHLLNGSLVDGEPPMKRRRGRRKNVEGLDLLFMSHKRTSLSAEDAEVTKAFEEDIETPPTRNIPSPGQLDPDTRIPVINLEDGTRLVGEDAPKNKDLVEWLKLHPTYTVDMPSYVPKNADVLFSSFQKPKQKRHRCRNPNKLDINTLTGEERVPVVNKRNGKKMGGAMAPPMKDLPRWLEENPEFAVAPDWTDIVKQSGFVPESMFDRLLTGPVVRGEGASRRGRRPKSEIARAAAAAAAVASTSGINPLLVNSLFAGMDLTSLQNLQNLQSLQLAGLMGFPPGLATAATAGGDAKNPAAVLPLMLPGMAGLPNVFGLGGLLNNPLSAATGNTTTASSQGEPEDSTSKGEEKGNENEDENKDSEKSTDAVSAADSANGSVGAATAPAGLPSNPLAFNPFLLSTMAPGLFYPSMFLPPGLGGLTLPGFPAGLQNAVGSSEEKAADKAEGGPFKDGETLEGSDAEESLDKTAESSLLEDEIAQGEELDSLDGGDEIENNENDE

SEQ ID NO: 43 - DNA, 72352 bp, Mus musculus
  misc_feature (1)...(72352): n = A,T,C or G
acctcaaggcctcgggtccagcgctctctcacggtctctctgaggcgtcaccaaagggacctggtggaccccagtggctggctgtctcttgatgactccctcatctatgacaatgaaggagaccaagtcaagaatggcaccaacatgaagtccctgaacctggagatgcaggagcccgttatagctgcttccctgtcgcaaaccggagcctctatcggcagcgcgttggcagctatcatgcttctcctattgctgtttctggtggcctgttttgtcaccaggaaatgccagaagcaaaagaagaaacagcctccggaggacactctggaggaataccctctgaataccaaggtggatgtagccaagagaaatgcagacaaggtggagaagaatgccaacagacagtactgtaccgtgcgcaatgtcaacatactgagtgacaatgaagggtattatacgttcaaaggtgctaaagtcaaaaaactgaatctggaggtcagagtccacaacaatttacaagatgggacggaagtttaatgagaaaccctgagatgtattttcttttttttctaaaatcctttttataaaatggggagaaatactggtatttttataatctttcaaattaaacaaaaaaaagggaaaactagctttgagtggcggacagcacacatcgcatgcatcaactcacaactgagctacctcatgaaacagaaccactgagacaccccccttgccctagagtgtcagagtaaggttatgcctacaggtccctgtaacagtctcagtggccacacagagcgactctgtaaggctggccccagaagtgttttaggattaggacagacactggacaattagcttcactgattggatcgagaaagctgggctctgtgggcagcagatatctgcaagtacaaacaaagcctttggtttcttcctctgccccagctctcttctgtgtgggcctttctggacttctggacacagaatacagaatgctgacacacagattccattgacaattctaatcagcacaacttagacatctgtgcactgtccccacttactatcctgtgcggccaggcctctaagtatacttggcttttctagagccctttttgaatggggatctcaatatgctttagactgaggaggactccagccagggccatgaagagcactgcgaagtaccacagcctctgcatgccagagatacttttaaaactcagccccgcttccccaggcgttctgtggttcatcagtgcatagggagctcatgtgtttgggtttttttgtttttttttttaattttgttagtgatttttagaaagtaagcgaatcatttgagtgagtgaatttcctagaggttggaatgaaaccagagttaacagatacacatgggacctgtttgctgtgtgtcatacagcagatagagccactgtccctggtgccatagtccggggaattctctctgggggttcttttctggtagctcaggctcttagtttctcccacatcagcacatgacaacccacatatatgtatgtggcttttacatagcatagtgttcaaatatcgacttgaatattctgtgtgtagtatgcacacaacttgcctttgttttcttttctgtttctaccttatgggtacaatctgaaccgtgcacattgtgtttttaatcagagtcacaattccattagccagaagcaaatgctgttcttgtgcatggcacatccgatcagtgagtaaatcacagagcgtccgcgttgtgtcgtatccgtatggaaatgacacaaactctttgagaacattccagactcctactaaaatctagaaggaatgaaccatgaaagtttcacaggcaactctgcagacccccgagctcaagagcagagcctgtgtgagccacggctggctcttcatccttcagcggtgccttgcacactacaagcgtgcagaaatgtttgttgagtgaatgaatggacggcgtgccgagtgaatgataggcagtaaacagaggaagaggaggtgagacgttatgctggcagtattacagggtgtgtagggatgatctctgttgtatttggtttgtgaaatagtccttcaactgagaggggaaaaaaagcacacttttaggtgggtgtggccggtggtgtatctggggagtcgggaacagaaatactgcggtaatgcatgagccgcatgttggcttccagagcaggagatctggaggaaagccgatttcacatttcgaaggtaataatagtgtgttcgttcagggcaggaaaggttggctgagcccagaaattcctggctggtcaggtgctccttcagaccagcttgcataattcataatttcataattcagggcagaaattctgaaattgcttcaagaatctggaatcgctacccatctcttgcagcaaaactgatgagccacaccctggatctccaggacaacagacagggctagagcgcagacagggagccaatcatctgtagagcagcttcccattggcccattactggtcacacctcccgctgtccagatgtttgcacattagagctttcagtgggctccacacccacacacataccttcctttacacctagtgggacacatacatgtgaagagatggcagagcctggcgcgggaagagaggctgaatctgaaggcctttgtgtacaggtgggcagtgaaagacaggagcctgtgtggacctggtcgttgtgaactctggatgagagaacagcccctgaaatagccctgcctcccagcctcgcccctaagacgctttattagaagccagccttctctggtggatgcctacttctgacgcaggaagcgttaagaggtatagagccgaggtttgccttttgaggagtgttgagtcattcatttcatttacgttttgtacttcatctttgggactggataatttggtgactaatgtggattctatttcagtgaaagctttgctttcagcgtttcttacttcttcactaatgccttgtgtgtgtttttactaaccttttagattgtaccttcaggtgagaagaacagaaaaaaataaaaataaaaaccctcagcagggttgctcttgctgccaggtgctggctgtggaggtcaaaagaagtaattgtctgcaccatttttctgccttgtcagcccctttactgtaccaaggtctttgggaaacccctgcaggttcctattgcagggtgggaaattgtgaagaaaagtgtttgcacaatcttaacaataagtgttcctggtctcttgtaggtttttgttattcctagttctcccctgctcagactgagaaaaacatttgtggtgctgtcaacctgtgttcttgaccctcaaatgattttgattttttttttttgtatttccaatatgaatttgtgtgttacgaatttctgatttcttcaatagcatatgctactatataaatttgtatcaataataaatgatggcccagttgtcctttgtttgcttgactctgttcttcttccattattcatctcattagcatagacactgcactgagctggtacatcattcgaaacctgaggcttttatttaaaaaaaaaaaaaagagcaaaaatgaatctgaatctgaaacataccaattctgctaagagccaggttctgaataaattcatactctcggatctagctttgcttttatggtcagaacaaagagaaataatgtacttccaatgcgagcacaatagggtgaaggttgccatccaccctctccaagatccctgatacagtgtgagcagggctatggccttctttgttgcacaagagaaggatagctgagtgtctcaaacaccacccaggagatgatctgatctccacatgagtttttttggcttgtgaaggacacggtggcagagacagaataggactgagctttgagcagttgtggcattctgcaagcctgtgcatttgtgtgcctttaccctctgacaatacgacacactgccaaggacagtgcccagcatggctctgttggcacacttgcaaactcagcaagatctgaaaactcagtacacttccataaaagctggggaagggatgccatccatagccaggcccctgaattccctgctgcgatcttcaaatcctcttcgtgtccaactgcccaattgttaccctgcacctgccagcgctcagccttggaatgcatttctctagagcacctgaagggaccattccaaaaaccagtttctaaacttttaagattggccacaaatttaaaaaaaaaaaaaatgcttctgagacttgaaatttcatgtgcataaaatttaggaactttgagtgtaaagtcccatttagaatttacaatgtctcatgggggattttaaaattgaaaaccgagggaggaagtgatatctagactatgctactacattcagccatgtgaaactgagggtctaatagatcatgagacgtccacgatatagatttgtatgtctctccttaatatcaggataccagagtgagtgtctgttataggtttcccaaatgggctggagagagctctgacaaaagcccatcagaatagtgtgttgggctaacagccttgtcacagtctaaggacaatgtcaaatgatgggctgagtatgtctggtcaaacaaccacatacctaccatgaccccattgctacttctacctcatcctataacaattctgaggcaagtgccttaattttcttttaaattttcaaacaaatacccgattttcaaagccttagcaagcagacggtgagtagcttatcattgccctcaggctcctattaccctgattggatgcttgtgctgaaggagtcccatcactcagttaccataagacggcagaaccatgctgcaagcctttctttaaaggctggcagaagtttcatccttaggtctgttctggtttaaagccatcaggttctaggactagtcaacacatgataaaagtttattagggtccagcctctgggacagtttccaagagttgttcaaaaccagatcaaacctcccactgagaaatatttaaaaaaaaaaaaagcgatgcttggtaccaatagatcctggaacctgacaggccccctgtgtgctggcttcttcagctgtgattggccatgtggagccactgaattgagaggagcttcaggttgtcagccactgctactccctcctgccctgttgtggtttccttcttggccacaggccctgttggacagtctctctttcaaagtttctgtttgtctcggtgctgagtgttgcctttcctcccttggctgtgtggggacagcaatgactccatgctttccctagtcctcggggacttgatgatgcctgggatccacggcaaccgtgcccatacatctgcatgcactctatgttgctcgtatgtctgtacccactctctgttgcccgtacgtctgtctgtacgcactctgtgttaagcccttacattaagatgctctgaatgtactgtctctcgagtgctgaattcatatagtctttaaacttggtgacactttgtttttattttaacatcaagcacaaacacaggagctgtaaacaagtgtctgtcttaaatttgccatcttggttaatacttaacacctggctctcagagccaatggaagtcttacacatagcattcacaggcttttgttagtaaatactccatcctaccaccatggtttctctaaatgataaaagcacagttttatactatattttcaccacattcatacaataggtacaagcaaccccaagagcacagtaacattagcaagtgatcatttttttaaaagatttatctatttattttatatatgtgagtacactgccgctgtcttaagacacaccagaagagggcaccatatcccattacagatggttgtgagccaccatgtggttgatgggacttgaactcaggtcctctagaaaagcagtcagtgctcttaacgactgagccatctctccagctcagcaagtgatttctttagagtatcttcttatttctagtgctaggatcgacccagagcctcccctacacacgggcaactgtcacaaccacagcactactttgaacatgtgtttcctttgtctttaactgactgcatccagttgttacctgtttaggccccgcttacagtttgcaatagcttgtattaattctttcgagaatttcatacatggtaatttgatcatatttacctccccttccccaacagatccagcccacccccattccatacccacccaactttgtgatgattttggtttttgtatccatcaaatccatttttgttctatatgttctcaaggcagtatggagctgaccccctctttctgagaagctatcagcaaccacaagctcctaagctagaagggaaacctgcttacttttcctttctatgctggaattctgccttgtgtgcgctaacacaggtttcgtgcatgctgtcataactactgtggatgcatatgtgcagctgccttgtattcagagagcactctctcagtgttctcacgcaccacctctagttttgcattctcctactcccttttctgcaatgatccccaagccttgggaggagaggctatgatagagatacccaacatggggctgagcactccacaacctctgcttctctgtatctttaccaggtgggtcttcgtgttgatcaggattccactgcacaaagaagtttttctaatgaggttgggaaaggcactaacttgtgagtatgggatgctttgggaatggcccacctaggctcatgcgtttgaatacctggtccccatctgctggaacagtttgggaaggattaagtggtatgaccttgttggaggaggtgtgtcactgggaaaaggctttgaggtttcaaaagacccatttccagtgtctctctgcctcatggttgtagctcaagatgtgagcttttggttacttctccagcaccatgcctgcctgcctgttgccatgcttcccaccatgataagcctggactctaaccctatgaagctataagttccaaattaactcttcctataagttgctttagccacggtgtcttatcatagcaatagaaaactaagacaataaataacaataaatcattagtaattggtttaacagacagagtactacactaggttcccttctaaggcctatgactttttagccacatagttgtggcccataggttctatcctgtgaacaggactctgtcgctaccgtctccgaccagcagaaaagaagtgacgaaaccgacgtccttctcaaggcagtttattcaggaactttacaaatgtgtcggaaaaagaatgccccaacctctccagtccactctccctcaccccagtccacgtaggcacagttcattggctcaggactacattcttcacatcatcagatcttatgtcgtggtgcatctgcgcaacgcagctcaaggtacgtggctatcttgagggatatgaggaatcaggtgccagtcataagacttggcagcagtcccgggcaccatcttggggccgcggccacacccgctcctcacaggactcaaattcaattaaaaaaaaaagtagttggttgctctcatgacattcataccacggttacactagtgggtgtgtcgggccagtttttattgtagctcatagggttcacagattgatatgagggaggatagccaacactgaaaaccttatttaaaaaccatcatgaaaagctactaccaatcgtgtttgtaactaccactacactgccagtacagaaaggaagaaggaaagaaagaaagaaagaaagaaagaaagaaagaaagaaagaaaggaaggaaggaaggaaggaaggaaggaagaaagaaagaaagaaagaaagaaagaaagaaagaaagaaagaaagaaagaaacaaagaaagacaacagcagaagcttcctagaatataaatatatacgtatgtaaagtgcttaaatgaagtcaatcaataagaagacaatgtgcctgttcgataatacagaccaacaaatataaaggtcagtgccagaaatacgttaccacttttggaattgttggacaatgagatctcaaacattacaagttatttgccattgctcttggcttccctccagcacttaattaataaaaccctatggctgaacacaccacaggtgtgaaccacagatcatagaagagtcacactggtactgacctggaagccttgtctctattggctggctttcatggtaccgagaggtatcatgcatgctcccagaggaggaaggcagtcatcaatcttagacttttgaaatgagaattcacctgtagctcagactagtcccgaactttaggctcacaccatcctccctccttggtctccctagtataggagactacaaacacataccattttgccaggcctcaacttcatttattttttaatagtgctgtgcttaacaagtaactatgacattcctgaatcgtagccattgattttatatacttccaacatataattgcacagaataaatactctcaatacaaaaagagagggagttggttgtagcaaaacaagatcagaccaaagcaagagagaaatccaacatggcaaatgtcaaatgaaccctccaactccgtatctgatgtttggaaatcatgatggagtcatctcgtcttgagctagagagtggtccagtaaattctcacagcacgctaggacgtttgcagcccctagctgcaaactcttttacagcaaaacagttccaaaagtctaaggaccacatggtcaggcttctctcagcagcgacaccactctaggcatcactgtttatattagtcacttctctaattgtgataaaaatgcctgacaggaggcaacttaaggggggcggggtttattttggctctgttacatcttcagtcctgcagcagaagggagctcacactcaggctcagcttgcttgctcctcaatcttgtgcctgggcacacaggttagtgttgatctacatttgaggagcattgccacccttcagttaacctaatctgaatatcattccgaagatatgcctagagctttgtttcttaggtgactaatctagctctcccgtcaaattgacaatcaatattaatcatcatagttgtgttttagattcctcgcctggcagacacaagcagaaggcatgcagatttcacatgtatcccttgttgctacatgtatgacatctcccatccaacataccccaccaagctagcttacttcacattaagattaacttattttacccagaatccatagttttcttaaggtttaagcctaagttttcttggcaccatacagtccatgttttgacaagtatataatgtcagttacccatcgttagagtcatactgcatgattttactgctctaaaaattctctgttccacctgctaataccctcccccaccacagctcttgacaaccactaaccagccttctcaaggtctccgtagttttgtcttttccagaatgtcacagagtaggaaccacaccctttacaagctggcttcttcacttaaccagatacatttcaggtacctttatagcttgattgctcacctgctttgggccctgaataaaattacaatatacgatgtaccacagtttactgcctatccacctactgaaggacatcttggtactttcacatttccgcaattacgaataaagctggtacaaatacgtatgtgtagttgttagcgagcacagagcttccgtgatacttggacaaacaccagtaagcacaattcctggattgaataataagactatatttagttttgtaagaagcaactaaattatnnnnnnnnnnnnnnnnnnnncgggaggaggatgtgagggagacaggggaaggggagggcttgcgaggggggcgtggtgggtaggtcacgactggagcagagaggatcctggatccaagagccacttgcaagccggtcctgggcagtccgtgagtagaaacaggaggaggggctgaggaagggtgcggtctgggttgccacccaggctagccgggagctacggccgaggctgatcgttcaccttcgctgagcttctgcctgggcttcgcctccgcggccccaagggtaagtttcccatgcccgcccctctacaaccacggaacatcaggttcccgcggagtcccaggtcgtgagcgcagcttgctcctggggctgttccctcccctcccttcccccaagccctcttcccttctatggaaatagaagagacttgacctggggggcacaagggccgagctgagtaagttatcaaacttagggttttgcagcccaagctcacatccaggggactgctcattcctaaatgtcttggaaacatttaaaagaagaagggatagaggaaggtctcctgcccctgctcagagttctgtgctgagaacttttttctacggctcccatgagagctctttctcccctccaagtgtcttttagctttactttgtataggtaggagaaagatgtattggactttgagagttggggaacttcggttttctcttttaaaagacaccgttttctttgattgcaacagaattctattcactagacatgaatcacctcccctgcttcttgagtcagcaggtgaggtatcgaggtagaggtatgtggtttgtgattgcaaatagccatatatagaagttctgggtcctgtgccaatagaaagttgagcagccggggcaaaattcttccccaggaggtgcgttaaagagaagaggttcctgcccccgagagaacttcagtttctactcctcacaacatcataaaaagcagactaaaaggttattctatgaagaatcattactggttttcctgaaggtggaagtttcaaactgcctagaaaggtacttttaaactcgaacgaagatcagaccactgtccgcagatcagttggtgttgagaaatcggtagaaatgccagcaggaggaagtacaagaaaatgtagctgctgtaatccccttcaggaaggatgtgtttaaagctctattgttaggtcacttggcttgcactatggagtaattctctactttttacaagcttaaaggatggcttgataatacttcttagaaatttccacattatattggatcaacaaatgtcaagcatcagtttgggtcccgggccacagggcatggggattaacggttcattcctttgcaatctagatgcctgggttcagtcgggtcgacccaatagctgtatggtggggatttcactattgcttcctgtgcctccagcatcttcctgtgctgttaatgatgtctctctcactaactaggttattctgaggcttatgtttaaatcattgaatacagtttttttttcatatacaccagtgaataaacattgcacaaatccccagctttgagagctcactttctaacactttgcctgtcacctgacacctagtaaaaacacaagatgctggctgacagcataatctatcttatttcctcccagcaatagaaacagccatctccctattttacacatgaggaaatcctgactcaaattaggtctcgaattaagagatgtgttagcattttgtctgtgtgacagaacatctgagaggaagaatttaaaaggaagaaagatgtctttttagctcatggttttagagattttagcccaggtcaggtcagctggctccgttgctaatcattcaacgtgaggcaggacatgctcataacagagtccctggcagaggagaataccccacctcatggccgccaagacgcagagaccaagtgtgggcagtgccagggagaatacagggagctctgaggccgctcctaagggatctgctctctttagggagtcttaccccttaagcttccactgtttcccattaaattaggacaccatcaatggattgatctattgttgaggttaaagtgaccattcctgatccagttgcttatgaaactcctcagctctgaacacagctgcattcgggaccaaaatgggaaggcctgttgtacgtgacaagaagcaaccttatcctgtatccactgtatagtctggagagagatagagggtcagaccctttaattagagaggacaggccaggggagcagtggtggcgcacacctttaatcccagcacttgggaggcagaggcaggtggatttctgagtttgaggccagcctggtctacagaatgagttccaggacagccagggatacacagagaaaccctgtctcacctctgccccccccaaaacaaaacaaaacaaaacaaaacaaaaaagaaaaagaagaaaaaaaaaagagaacacagaagtttcagagaatgagcaaacattagggctaaatacttccagtgactattaatgtggtttcaggtccatctttggccctgaactgccactgaagttttagaatattttgttgccaggatgggtgggaacagtttgtatttctgaatccacactggagacaagccagcacatctgagtaatgtttacttatggaaggtgtgcctgggttcaaggaagtggcccttttcctgtctgcacctacttggaattagcctgacctcctcaaagagtagaaatgggtatttataacaagctgcgtaggcttggatcttgtaaaatgtacaggcaaggaatcagttcaaacccagctagaatttgtcttggtttgggggtgagaaacaaattctttcttcttcttctccttcttcttcttcttcttcttcttcttcttcttcttcttcttcttcttcttcttcttcttcttcttcttcttcttccccttctccttctcctccttctccttctccttctcctcnnnnnnnnnnnnnnnnnnnnnnnnnnnnnnnnnnnnnnnnnnnnnnnnnnnnnnnnnnnnnnnnnnnnnnnnnnnnnnnnnnnnnnnnnnnnnnnnnnnnnnnnnnnnnnnnnnnnnnnnnnnnnnnnnnnnnnnnnnnnnnnnnnnnnnnnnnnnnnnnnnnnnnnnnnnnnnnnnnnnnnnnnnnnnnnnnnnnnnnnnnnnnnnnnnnnnnnnnnnnnnnnnnnnnnnnnnnnnnnnnnnnnnnnnnnnnnnnnnnnnnnnnnnnnnnnnnnnatgtggtgtccttgtgcagaccaggtgatccttctgccccaacctctcacaggctgggactgcagacagcaacactattggttttaaaaaagaagtgaaaagaggcttcccagaaactattcttctaaggcccagagtacagagctgaatttttcctgccctgcggccctcaaaagtccagggccaacatgacctctttgtcgctgttctaaggcagggggagggggggaaggacacctgggtcccttcctttggctaccacactatagagatggagtatttaaagattgaaagtttccagggagctgggctgtgggggcgcatgcctttaatcccagcacttgggaggcagaggcaggtggatttctgagttcgaggccagccagggctatacagagaaaccctttctcgaaaaaccaaaaagaaagagagagaagaaagaaagaaagttagtttccagggaagtcttctcaggcagtactgctaactgtctcctccgggtcagtaccctgaaggcagacatggggttttctgtacctccttgtttgttcctcttcccaatgggccactttgagtaaatctcctttctctacttttgattcttacttatctctgtctaactggtgtactgaggacagttggccagaccagaatgactctgctagcagttgaaattgctaaatgcttagttaatccttgctcagggaacaggtttcttgatgtcagatacacaccctcctccagagaagtttctcattgactgctgactgttgctttctggattaagcattaagagttggactgaaaatgttgtgtgctgaatcacaacatggctttgtccctttaatactttgtttcttttctagattgctgtgatctcggcttgagagaaaggtggactgtcatggcctctatctgggtgagtaaaagccaaagcaccgtggcttacgtgagtcaaacagaaggacaaactgatatatatatatatatatatatatatatatatatatatatatatatatgaaagttgattaactatttaaaaaatagccaaaagctagagcacatttaagaatagtaaagtatatgtgtcataagcaggtgtggtggcatgtatctgtaactccagaactctgaaagttaaggcagaagaatgtcaagtgtggggagagaccgagtatgtagggagagcttatctaagaaggactagtagtaaaaatgtatcagaggggctggtgtcatgcttcaaaactacacttaaatgtagagactgggtttcagttctcagaatccacatcaggctgcgtacaaccgcctgtggctccagcctcacaggaaggacacccgtatttatgtgcatgtaacactccccacacacacatacacacatacagtaaacatttttaagggtataatagcagtccatacttggcaaagaggccttaatggagaaaaaaaatgtattgtataactcagcctacacaactataaagatgacatttattatcagcaaggaaagatagtttcttctgttagcaaaattagagagacttctagctcattgggggaaagtaaatctatattccacgtcccctcttacattaaaataaaatttaaatgtgtaaagcatagaagtgagggaatggttagtaacgtgcttacagtggcaaggcccaggtccctatgggagcccctgtctcaaaaactacagggaacagctccccaggaatgaaacacagtgctgttctgtgacctccacatacctgcacgcacatactgccacatgactatgagcatatgtacatgcatgtacatacatgcatgcatataaaataaataaataaatacacaattatacaaaaaataaagctcaagtggatcttttagaattaatttggaatgggtaaggccattacaaccataggcctaaagcaaaagacaaaaggttttctttaatttgtttatgtgtaaatttgtaactgtggcagcaacatcgtaaatagaatgagaagataaccttcagggcaacacatttgtagaacatcaggcagatttatttctgtaacacacaaatgacttgactaaagcaatttcaaaactgcgctcaatgggaaactgtagacacaaagtagcaagtgaaaggaattgcaagtatccaattcatctgtagacagaacctctcagaactgaggaaataccagaattcatgggaaaaggaaccattttctactgaagaggcaggtagctggaaaaaatagcaagacaaagttatgcactcaataggaaccttcaaattgttcataggagctggttatacttttggacagcattcgggtcagcatccgtcatcgttaaatattcttgtcctttattccagcaactctacttctcatgtatcatgaatgtgaatgaaggttgaaaaacaaaggtcaaagcatatttgcttgtatgattggaaatatacaggcaatgtaatgattactcagtaggtacgaattacttgttttttttaacttgcagccattttaatgtaattattttttaaaatgtagggataatattcagctctatgaaataacattagaaactgtaccagaatgagttatcagtgataagctcaagttacaggaggggtagatgcagaggctctgtataaaaaaaggacatggaagagatacaggcacaaagcatctctgacaacttcctaggcaggtggcacctcgggtaggttgactctttctcatgtctccctatcgactcttgtgcctttaagccatgagtacattttatgagttagagaacttgaaggaaaagcatgcagaggtgtggaccatgcaggggagctgtgccgagcactggtcaagagccatctttagtgctctccatacccgaaagccctctgactgtgtacgtctccaaaagagtcgtgaagaggcttctcaaaacgctagccggggtgcgctagaaaattagcatgaagtctactgacacacttaacaggctcagagacactggggttgagggtgagacacaagatatgagtttcctgttgcagtcaagccatagcaagtgactatacgttgaaggtaaagcagttagctggcagtgttcctccatggtggagtgcacacctaacatgtgctaaggcactgggtcccaccctcagcactgcatgaacaggtcagaggtattttttgctgcacgtggccatacaaaacccataatcccagcacttggcaggtggatctggagtttacggatagtctcgactacataaagagttctcgacagttgggctactttagtgccactcccaccaaacacacactcacacacacacacacacaccataacacacatactctctctcacacacacaatacacatattcacacacacacacatacacacacctgccaaatctctttcattatctcacagccctatctgcaatatgaactgattctcatagcagtatattttccgatgtaaacataagatttcgatagctagaaaccgactctgaatgaacagtgtgttccatgtgcacaatgtggaataccatccagccttagaatggaaggtgtcttaaaaacgggtgaaccatgagcatgtccagctagtaaaataagacagtcatggaaagataaacattgcacaactcctcctatgaaatacgcagaggactgtggcttcctggagcacaggagggccagagcgtgttatggttaagaccgcatagaacttgtgttccgcagtatgaaaaggttctggtaattgcttcagaacaacgggaatagtctcactactactgaacgatgcattttagatgggttgagatttaccaaaaaataatttttcaggcttaatattcttgtatgcgtccatgtaagtgcttgtgaacatgtaaggatgtatgtgagggctgtaagcaagagtgcagtaaagactgtaggagagagagagagagagagagagagagagagaacagccagaggcatctggtaaagagcagagagaaaggaggagactggtcatggccagggctatctgggagggagggagtatagaaaggagccggggaaaccatgccaggaactggtatctagaaggaggggggcctgtgaagtttggggagcccagagcttgggagctagtatggtggcgggggagtcagggactaagaagggtcaggaggctagcaataaagatggcagacttccggcttatctctcacttgagacttgagacaaaagcctgccatgcttttccagctagcagggtccctcccctctggctgactgattcaggctggtcaaatatgttcagtgcagatcctgagtcctgactgtatttacctgaagctgtgggcctattagtttccttttctttgtttaacctggtcagtccaaaattaaagaaagggtatctcaagccaccaaaactacttaaaacctccagccctctagaggaaaaacgaatctgctctgtagggcctctctctctctctctctctcctctctttctctctctctcctctctctcctctctctctctctctctctctctctctctctctctctttctctctctctccaccaccaccgcccgtattatataagtacttctacttgtttgatgaagttcattatctgttgctgcccactgtgtctagtgtgtcccctgccttttaaattttatcatctgtggagaacgtgatcgagatttctcagtatgctttttggtagtttggaatttaaagtttcactttctttgagtatttaagttgtgtcataatttgtaataacatcataattcaataatactattgttctagaaaatttaataacagttagaccaaaatgataaaaaataaactttagtgtgtcttaaaaaaaaaaaaaaagactcctaaacagtaagactcctgtgtctgacttccagctctgggatcacagtcacactctgctgctaacggcttttcacactggtgcacaggatctgaattcagcccttcatgctcaccaagcaagcacttccctaaccaagctacctccccagccctctggctttaatcatttaatcagaaagttctgctgtgacacaaagatttgctgacactagtgtgcccaattctggggagaccagaggtattagatcatgtggatctgatgctacatcagaagtttgtaagctgcctgatgtgggtgctaggaaagtcatgaactccagcaccaagccatctctccagctccaggagtgtaggtttctattaagacacaatatcagggacactagctgttcttcccaaggatctaggttcaattcccagcactcatgtagtgaactcaaggtgcagggatccagtggtcttttgtagcctctgcaggctccaggcaagcacatggtacatagccatacagaccagtactgcagcactgtgttgctatgaggggaaaaaaatgtttattgcatagttgactgacagggactccatgagctaagctgcccagagctacctctgtaagatagcagcagagggctttttagaaagtggaaggggaccaactgctttctaaatggatggtgcaaagggggagtcttagtgttgtgtggcacaagcagaaacgggcatcacacagcttcctggaccacaattctctagaagaaggtgtcatgggctgcattgggggcttggggattgagctcatgacatcaacaggtcatgactggacagactgacttcagcactgacccatttgtgtgaagctggctccagcctacccccgagaggattctggaggcagtccctgaaagacaacctaagaacttggttatttaaggaatttatgtccgaggccccgctgagctcattcttgtttttttcttcctccttgcacaaaaagcaaatacacacccaggcacaaatatgtgatctaggccgcccatccctacacggctctggggcagtgggaggttgccagcatgtggttagtttattgtaattaactcggggctgaaagagaaaattaaggagacacgagaaaggcaaagagcctctcattctggggtctggttagagtcaccagccagctgaaagtcatgaactccagcacaagtaataacactggctgtgacaattgcctatatagagacattccttttacctggagctaatttcaaataagaatgttaaaatagcagggagccacgtttgacagctgagtgcatgtgacctttaagtctttctcttttcctagatgagaactcaaagtttcctgggaatctcaaaactttgtttactataaaaagccgtaccttacgtatggcccatggtacggcttatggttttaccatattaactgcaatcctatttaatggctcacttaccaaacaactcttgaaatgtaaagtagaaaccaccaaatggggggagggggagtggagagggagagggnnnnnnnnnnnnnnnnnnnnnnnnnnnnnnnnnnnnnnnnnnnnntttaagcaggactatctttttataaggacataaattccttaaataacgaagttcttaagttgtatttcagggactgcctccagaatcctctcgggagtaggctggagccagcttcatacaaatgggtttgtgctgaagtcagtctgtccagtcatgacctgttgatgtcatgagctcagaatccccaagctcccagtgcagcccatgacaacttcccctagagaatctggcccagaaagctgtgtggtgcccgtttctgtgaacatgggctgtccttttccatcactttcttcctctacaatgctcatgtgtaaaccaggcttgtcccaagattcttttctgtggtgcagtcaggaatctgacttcacattaggtgtctcgaaggaactctgtgtctctggccctgcccacattgctgctgatagaacagggtcaaggaagaaattctcagatactgtctcagtacattcctgctgaagagcaggaggcgatgcctggtttcttcatgttctaaccgaagatgttgaatctctgccactgtttttgatatgtaatctctggtgcaccagtatgtcttttgttctgacattttccaagtctttgtttatgtttcatctgaccctggtgtctagcctggaactcacagtttcttgttggatgttgcctcgcaatatagaattgcttataacacttttaaaacattttatttttatttatatgtgggttcctgcatgtatgaatgtatgtacaggtgtctgggggccagaggttttagatcatgtggatctgatgttacaggacattgtaaactgcctgatgcggatgttaaaaaccactgagctatctctccagctctaggatgtaactttctattaagacacaatagcagggactggggaaatggctaagtggctaagttcactagctatttttctagaagacctgggttcaattcccagtacttacatggtggatgacaactgtctgtaactcaagatacagggatccagtgatcttttgtagcctcctcaggctccaggcatgcacatggtgcatagacaagtgcaggaaaaactcctgagcacaaaaaataattaaaaaaattttaaagtgtgtgtgtgtgtgtgtgtgtgtgtgtgtgtatgtgtctctgtgtgtgtgtgtgtctgtgtgtgtgtctgtatgtgtgtgtgtgtattgccatgtccctccactgtgatatcagagcacattgactttcctgcacattagcatcttcaccaacagggaagttccctgagccagtggtcaaagttttaattggacatgactgattaaactattaacttgttattgtagcattgaatttaatatccagactcctttccttcccaagaggtgaagctggctccaatctcagccctctaaatcatgtggtctttctggtgaccagctctcttcctgaaactgtcaaaggaccatgatgagtcacctcagactcagaacaaaggcactccaaccactcaggaaattccaagggtttttgaaactctttgccaagaaccaggacagagccgaatatattctcatcaaaccaccttgcgactcgcattgaagagctgggtttctgaaaccttacctgcctttatttctttaatgaaattgtaacgacacaaactgcagtctcttaaagccaaaacttagaagctttgactgtaagttatatctatagtcactaggaaactaggaaactaggtgaatataatgaagactggagaaacgagacattctgaacatgccagtcatgtagcagacatgaagaacctgcctttgctgtgggcgatgtagctcagtgatcaagtgcttgcctgcagtgcagaaggccctggctctgccccctaaaaccataagaacggggtatgggggagaggggggatccttaatggtggaaatgttgtggaatgctgcaagcagcaatctgcagatggatcaaattcaccagtgatcatgtgttcctggggacagtcagagcgtggctgcccttccctgcctgaccactcccttctttttggggactttgctgtttgacagatggggacacttgatctcatttctgtagctcctccagttgagagacagttgtgtgtgggattacaaggaaggtgcagagtgccaggatgagagaatctgtgatggtacttttataagtaatgaaagatatcgtaagtggtttaagccctgtaaaaaggaggtgagacccttcagaagagacccatcagcagccatgatgaggtcctgaaaacagagagaaagacttaccacctaaaggagagctccattaggacaagtactcaaagagaacatgacaggagtcctgaggagaggcttggtgtgggagagaagctcagagctccatccacgtcttatttcaaggttgtcttgggcctgggtcataactgtaaggagaagggagaatgccaggtcacagcaggtggagtttgaggagtcctgggggccctaactgcccatttcttacttggttggagacatcccagtcctctctccttcctggtgtgttcactcttcctgaccttgcaggttgccacatgggcgggagtcacagctgtattcaggagtgtggagaagctggactctgcctccgccttccctctcgtctcccacatctcaatgatagatctggctttgaaaatcactttgtaccccaagtcaaatgaggagcctgttgtagttaaggttcctcttgctgtggtcaggggccttgactgaggtcaacttgagaagggagggatttacttcactgtacacctcaggtaatagcacattgtgaagggcctggaggcaggagctgaagcagaagccatgaaggagtactatttacttgtttgcctgccttcttatggcacataggaccaccaagctaggggtggttctgcctgcagggagctggaccctctcacataaccaccaatcatgaaaatgccctcacaggcttacccacaggctagtctgtctttgcagagccatcttcttactggatactagtcatactggatcagaggcccatgcctgtgcagcatgacttcatcccaaccattgacatagggagtgagctagatccaatcacagttacattctttgggctgctggttaggtctttggcataggagaggcatgatctcatgccacctgcctcatgtgactctattttagttcagggcctctagtaggacacttcctttggttttaaaaggccacttctttcttgaagaattgaacaaaaagtcttaacacttcaagtttgggctgctttggtttttgcagcctgctccatttccctttgtatcataaagcttcctgacccaggacagcaacttgacattgagcacagagagtaatcatttctcccaggctctctgaaagcccttgagtcctcgagttttctctggggcttaatttttttggatctggcttttatggggctttatgaagtgatgcgtgatatggcttcacctcaccttcggaatgtgctcacggcggcggccattttttctctggagcatttggctctaaatatgctttgtgtcaacagagctggcacccgatgtttctcttttattcaccctttgaacaaagagcttcaatttattgcaggtctggtgcacagtccatgaaggaatagatgcagccgtgtttagagagaccaagggaacagcagacagttaccctgagggtaacgtggccgtgtcagtggcttcagggcacccaccatgctctgtggctacccaaaggatggctttaggaagtgagaaaaattctactggcataaggtagatttaaaggccatattagtctagactagtaagttgaacagcaggagggactatctggttgtatcaacttaggcaagcttcttttttattatttttatttttgtttgtttatttatttatttattttttatttttcaagacaggggtttctctgtgtagccctggctgtcctggaactcactctgtagaccaggctggcctcgaactcagaaatttgcctgcctctgcctcccgagtgctgggattaaaggcgtgcgccaccaccgcccggtttaggcaaggttcttaagcatctctctggctatccaggctcagggtttacaagcctgctttttgtgtttatcatggagattgaaagtgttcctagcaaagctctagacacacaacaactaaccacccttattacaaagaattcctgtttgttttcttacttcttctcattactttacttcccggtgggtttcaccatcctttttcttttgggagcatttaaaggtcaagtttgagaaaagggaagaaactaaatatacacaagacagtaggtggaatgctgaccaagcatgattttgaaagtggttttagccaaatgtccatggaggttccccattggcactgactgcggtactagggaaaggacctcaactaagaatcaataaatgggccaggcagtggtggtgtatacctttaatcccagcacttggaaggcagaggcaggcaaatttctgagttcgaggccagcctggtctacaaagtgagttccaggacagccagggctacacagagaaaccctgtcttgaaaaaccaaaagaataaaaaccaaccaaacaaacaaacaaaaagaatcaataaatggatcttgtctgacaaaaccggaaggctgcaatgaaacaggcaatccaaagagctttggctgtaactatcaacattcctaaaacaacacctcataactgagttccttagcttccacccgtgcagtagtcaggtcttgcttgctggctttattctagttttctaggggaccaagaatgaagtgcagtgttggttatgccacttggtgatccattcaaaccactgagggtctcatgaagccagacgctgagtcccaccccatcattgtggactctatgaaagagggctatggcttgaggatttacgcctctggaaattccaggggattcctatggagtgatccaggaagccattttgagaaccattgaggtagagttccctaacctccagccctggcaaggtgatgaggtgtagaacatgggcctcttgttcacatggaggtggccttaagtctaggcaccttcctgaccaacaaagttctgttagacaaaccatctctctgggactgaacacacccttgttctgttatttttaaatatgtgtaggtaggcatgtgtcagcatgcaggcatagagatttgagtgtgggtacctctggaagccaatgacactggatcctgtgcaactatagagtttcagatggttgtgagactcctgattatgcactgggaactgaacttgagtcctctggaacagcaagtgctcttaacagctgagctgtgtctccaactcctttgaatctacctcattaagatcactgaagaaatctaagatgtttgtatgatcttttgttcattatctagtatgcattaaacaatatgagtctggttatttattttaaaatcacttttgataaattatatagatatggcctggatagccaagtcttaccaagtatatcctgtaatattgttcatattaagtggctaaaacatgtttcagtatttcactagaattcaacttcagaattcccttgttctgggccgggctttggctcagtggtagaacactcagttgtcatgtatggggccctggggtttgaatcctgcacagcaaaataaacaactaaataaaaaccaggttcccacggcttctttcaagttgataggtatgtgtgcattttggagaaggagagagggaaggaaaggaagatgaacccttttattatgtaagttgtttctcccatctaacccttcacctgaaaaaaagagttgcatgatgagttaggaattttatcttcatctagttttgtaagttggaattttaatagattttgatttgtaggtggtagagagcaggccagaggtcacagagagtgtaaaccctgaatctttataagacatgaacattaaggacccaccgtattgtcttcttgtattcagaagaagccatgttaagtaacctcgtggtatagaatcacacaaattgaacttcataagaatgtagaacctagttcctggttcctaaaaataaaattcagtatatctgaaatagatccaggacatggtcacatgcattctaaagtgtcgcttcaggagatactaaggcatgattccagaaatgcaggggtgatttagagcagcacagactgcattcaaaggcagatctgtggctcagctagctgagtggatgaaagtttacacagagtcaatctgcagactgcagtaggttgtagttaacatatgcaaggtgcctagcatgggggcacctaatgggtccttccagagcatcaaatggcgggggtaggtggataagggaagggtgagaactcagaggtgggagtggatagtaatgaagtcagttgtctctgccagtttataaagcttattaagccttgaactccaaagaattatgttaaagcgactgattaagtcacttccattgtctttagacctggcacattctagcttgttagttttcattttttcctttggagtgctttaaacaatgtttgacaacattgaaacaaattgttccatctcatctattgagtcagcagactctcgtctctaccgtgccagtacattaattttccattcactttaatgtgacaagataatgtcctttcatgaaaatagacacttcagaagagcgtagatgtgaccatattaattcacaacaacaccatcaataccattcaataacagggtagaaagtccccgtttaaaaagagaatgtcagatgttactgggatttggtgcagatttttatttgaaaggtcagaatatactatatgaggacatggtgactttgaagatcttcaacatccttttggctgtcatgtagttcttcagcaatttcagaatattttattcttttgcaatatggtctttcttagctcactgtcgtgtttctaatttaagtgcttaaaattagtaatgtagctatttaaaaaaatatatactctatgctattcttgaagctccaagatgtcagcagagttctcagacaagaatcttggggcaaccatcacatgtccatcaagcagaacataaaagacaacagtcttgatagcatttttgtttattaattctttagagtagggttccccaagcacagtggtcaacatcagtttacacatcccagcatctccagtccacagctgctcacatcctcaatgtgagatgtgattggcagcttactcagaagcctcactggggaatacggtggatgaagagaatttaagtttcttatattttatatctatatgtaggaactttaaatcctgcagtcttcagagtctctgatgttgaaacagctcattgccctagaggaacaatgttttatatgtgcagtttgtcccaccttgggggcctctttctacgtgtagtacaagtatgtctagggatgggagatcttgcactatgccaggaacagcaagaacccgggctgccacaggtctcgcccatgcttatgccctactggactgggaagatggctcagcagttaagagcacttgctgcttttccagagggcttggaagttctgctctgtgctcctaacaacttaaaaagcttttgctccaggtatttagtatgcaaattcagagcctcagggatcctttctggaactgtgccagtgcactgagctcagacaggatcctctgagcatgctgcctgtgggctgtatgcaagcctggttcagtgagccctcatttagtcacacacagagtcgacagaaggcagtggaattaaaaaaaaaaaaaaaacataaacacctttatacaatttcatcaatgaccatgtgagatacacatttagtctatacgtaactctagtataaataaaaatgtggctttgaactagcagaactttccttctaggttggacctcgaggaaccataaaagattatccaggctttagcccgtcggtggatgccgaagctatccggaaagcgatcagaggacttggtgagtggagcttttcagctcctcctgtatggctggtaagaccagccaggaaagttcccgtctaaaaagccggttggcccaatttggatcctgaattagagaagttgtcaggagatattttaaagtgtgaagcaatgaagaagagcatgagagctgagtctctcagtacataaagcatttgtaatgtttgctcgattaaatcctaccagcaccacaacagctccttcaactgcttatcaccatcatgatcacaaaccatgatggattcggtccagaacagtcttcccaggttctatttcaccccattacctagagaaaatcatctttctaaattagactttacacttccagtaccacagctacatgcctaagtacgtactagtttctatagtttcaaccggtaaaaccagagaagtgcaccatccgttctttgaccgactgtttttacctctttttttttttttttaagatttatttatttatttatttatttatttattatatgtaagtacactgtagctgtcttcagacgcaccagaagagggcatcagatctctgttacaggtggttgtgagccatcatgtggttgctgggatttgaacttcggacctttggaagagcagtcgggtgctcttaccccctgagccatctcaccagcccctgtttttacctcttaacgtaatgtttttgagatttattcatgttgataagtttggctctgggtcattaattttaacttcacagtagtctattgtatattatatcataaactggaaatgttgatgaaacattcaaattgcctataactcttttctattacagtgcaaaagtccttggtgaatgctcccgcttagacttcactgtgcacagttgctagtatttctctaggacaggacaggagttgtgagttctgggtggagatggccagaattcttatttttaaactagaaattttgccaaatcgctctctggcgtgattatcaaaattagtagtactcttgggcctggagataaacttttctaagtaaaatctcaagccacagaaacatcctcctccgcttagtccatctcctggacaatgtttgcatctcccctcccccaccctacccctgccacaggaaagtatcatgctaacattttaacactatcacccagttttaacattaacaaaaacaagcttagtaatattttccctaggattcacatctactgtaccattttaatcgtaaagtcataaagcccttctgcatttccctcccaggtttagaagtcctgcttttttcctgtttacttgatcatcagtctacaaggggttgacatatgggaggagcacttagagatatccacctatttgatctctaatgaacatttaattgtctcagcacagttcttcatgttcctttccgtctgcataggaaagagtagacatggattgacttgactgggttttatttttccagccctcaaatcacctaaataaacttccttttcaaaaaacaaacaaacaaacaaacaaaccaatcaaacaaacaaacaaactgcaaacactcagattctaacccagcaagaagctggaaacttaaaacttaaaaagctttcctgactgagcttgttttggccccctgaatctgttgtttgaaacagataaggagaatccttggctcataaaataactttgttctcatttagggactgatgagaaaaccctcatcaacattctgacggagcggtcgaacgcgcagcgacagctgattgccaagcagtaccaagcagcgtatgaacaggtaccatccatgaacacagcgggccacagagacagtcacgctgtgctccggttccacccctgagcaccactcacagatctttggctttaccccgagtgtggtagagttgccctgtgcatctgctcaagagccaggactcttagttcaggttttggctttcaccacctcaatggtttggggcttctgcttcttcactgtggaatgaagaatggtgacttagagcagtagtttagagcagggtcaccaccctgttgaggttaaatgacccatccataggggctgcatatcagatatttacattatgattcataacagtagtaaaattgcaggtataaagtagcagtgaaataattttatagttggggtcaccacgacatgaggaactgtcttaaaggatcgcagcattaggaaggttgagaaccactgcgctagagcaatggctctagagtccagagcacacttgacacaaagggagactaaccttttctttttctgagacagggtctcatgtagcacagactggcctagaactcacaaagtggctgaaggtgattttgaacttccccctacccccatccccgtgttcaacctctaagtgtggggattatagccaggagtcactaggcctgcattatatggtactgaggaacaaactcaggtctttgtgaatgctagacaggtactctaccaactgagacatgcccctagtctcaagagagacactttgatgacctcaagtcagactgtgggtagagggtgatcctgacttccagtgtgtagaggttgaagatactgttaagtatcatgtgatatgaaggacagtcctcccaacaaagaatgatctgccagctatctgagaaaagcagcctttagcttcccttttaatgctaaaatagttatgtaaatataggctcagaaaacccaacataagaaaacccattaagtgtcagaaaatagctacatacatatccaaaaatagctacacacgaacaagactgtcattgacacacaatgtttgtcatctctttgttgaatagtgttctctgctggagactggagattcgctggtaagagaggcagttcctcccatcacctgtggggctagcctagcctcctatcagaaacataataagttcagtcactgcaagtggagcatgaaagtggggtgatgtggtggaaggtaaccagtgatggggactctctgaccgtggtgagggggtgatatcagcagggtgctgctgcctgacgggctgctagaagagtcaatgttgtgtctgacctgctccatctgcagatgcacagggcaagcagtggggagaacaaatgtaagggtcctgggagcaggcagctggaagtctgggggagacagaaccccgatatagccggagtgtggcattgatgtgacagagcatgtgtgtggctgtgtaatgctagagctttttagaaaatatttcaggtgccaccatgtttctcagcctagctcaaatgattgtcccaccctaggctcccaagcagctagaaataatatacaagggtgcatcacagtgcctgactactaacatttttatctgtgggttttggcatgggattttgccatactgccaatctgcttttgagctcccctattcaaatgatcctactaactcagcatctctcccagtgctgggactacagatgcatgcacgttacagggctgagcttgagcgctgtgttagcagttctcaacctgtgggtcgtgaccccctaggcaaacctccaactccaaaatatttacatcacaattcataactgtagtaacattacagttatgacgtagcggtgaagcaattctatggttggaggtcaccacaggatgaggacctgtgttcaagagtctcagccttagcaagggtgaggaccactgctttatgcctcgtgcacgggctggattttattctacagtagggactcattggaagtgtgtaagcaggggaaataatagcatccagttttgaacactgaaagatcatttgggagcctggagatttagcttaatggcagagtacttagctaccatttctagggctctgtgctccatctccagcacaacaaagaagatagaaagattattttggatgctgtgggtcacgaaggaaggagggagggccagcaggtaacagcagagtcagttcagacatcacccctgagagtgttctcagtacctcaggcactcaaactcctgtatcacacactcaacatactgtacaataaaatcgtactttatctattaatgccttaattttcttattaggctgaacatcgtaggcataagcattgtatcacagctacctttaaatgtctagcattgattaggcaccctgaagcatgtactgaaatgaatgaattgccaagcatctgggccagaacccctcccatacatgtaggtgacatggacggtccgttggctttttagagcactgtaaagtgtggaggaagaactagtagaggcaaagggcaaacagccatttctcactgtgtgacagaatgagagcatgtaaaataagatttctttgccattgtgttgagaacaggtggcagcagaatgttgcatttaaacatgaaaaaaaaaaaaaaaaacccacccgctgcagttcaagcccagaaagtgatacatggctccatctcatgacgcactgtgtccctggtgggtggtgatggtgatcgtctgtatcatcagaactgccagaaaggtgccagcctctctaccaggcctgaaaataaaacagttccatagaacttctttgattattggaaatagaaaccacgtccctgccattaggtgagagaggtagacttcctatgtaatgcgtgggaaacagtcccaaaggacatggtcctgcctgggatgtctaggatccactgaaagagactgaccagctgttgtcctcccttctctctggaggccagtggagtctctgagatgcaaggcactttaacaacaagaccctgtcccttcctcccctacccaacccaagcatcgagagcaccaattacattcgttctgtttgtctgtttatcagttgttattttaattgtgcatatttgtaggtatggtgtgacaatttggtatgtgtgtacaatgtgtaatgagcagggtcctcggaggaatggcattctggtccacttctaaagcttcctttgggctttgcagaggtctctgtaaggcggggcattgtggaaatttcataaaatgaagatcaatatccactgagatattctcagcattcccgctattccctgtgggtgaacgccctttcatctcatctttatccttgcgtttctctttccctgggcagctgctgagaaagagaagagagacacgaagtttcatgatttcctccttgcggttttttattttaggagctgaaagatgacttgaagggtgatctctctggccacttcgagcacgtcatggtggctcttgttactgcaccagccctgtttgatgcgaagcaactgaagaaatccatgaaggtaagctcttcatgtccccagattccactgtcaattaggggcctctcgggacactcccttcagatttgctggggtcggatgccatttttattgtcctcttaaaaggatggggcgatcctgaggagctctgtgtaactggtagcccagatgtccctgggctgcacggatggtcacgtttttctgtttttggactaccctgtctctctttcctttctttgattaaatgaaaatgccatcatccatccattacttaggccctataccttgtattaatttcaaccccttgttttcttttacccttcagaacccccaaacctttcaccaaatctgtacactctgctctatagtctattggatcaagcacatctcagagaactgcagaatgcaagctgatatctctacccattggcttccgctctatggcagccacccgcatcttttggttgcactgaatcagtaccctaagcaggtcccttcatctccatttctgcccattctggaactattctctctgggatgtccaaaattacttttataaagatgttttctttttctcttcttcttcttcttctttttttttttattaggtattttcctcgtttacattttcaatgctatccccaaaggtccccaatacccaccccccaatccaatacccacccactccccctttttggccctggcgttcccctgtactggggcatataaagtttgcaagtccaatgggcctctatttgcagtgatggccgactaggccatcttttgatacatatgcagctaaagacaagagctctcgggtactggttagttcatattgttgttccacctatagggttgcagttccctttagctccttgggtaatttctctagctcctccattgggggccgtgtgacccatccaatagctgactgtgatcatccacttctgtgtttgctaggccccggcatagtctcacaagagaaagctatatctgggtcctttcagcaaaatcttgctagtgtatgcaatggtgtcagcatttggaagctgattatgggatggatccctggatatggcaatcactagatggtccatcatttcgtcacagctccaaattttgtctctgcaactccttccatgggtgttttgttcccatttctaagaaagggtaaagtgtccacactttggtcttcgttctttataaagatgttttcaaggaaggtgatgtgattcacctccctaaatctccagtgaacacttaaacccccgaatcctcatcaccttcatcacccaatagagtgtggtccatgactgtctatgctttttttctttaaaattttccagccataattccccagagaaatggggctattaggcagaacatatatattaagaaatttactgtaaggagctgggtatgccttgtgggtctgggtgataagcacacaacggcaggacaggtggtcagggaagacaggagccaccagcagtctctgaagctgctgcccacaggcacatactcttcattagagaagcctggcctttgctcttatggcctttcaagagaatgaaacaggcacaaattgagtgcagagtatcaaaagagttaacttaaagtcagttggtaatggacctattcataatggaccttcacacacaggtcagcatcggacaggatgaccggggactgtagcctgaccaagctgacacacagagctgagcatcacacccctcccttcccatccccattcactggactttgcttcgctggcctcttctctgtctcctgagcattctgagcgaccttgttttggaatcctcatccatgatgttccatctcgacccctcctctgcagacattacacattcatatgctcaactttactgttattgtctttttgtgccgttttaacaattttgtgtttatgatgagtttaccctgtgacaggaggtttttttggatttttttttctgggatgtccttttcttctgtgcagcttcctcttcttgcataggagcaggttgctcattttcagtgagggtcatctcaatgcaaggtggctcacatatacgctaacctgaccctgtgaactctgggagcatggggactctggtgcttcgttcagctggatatgctgaatgatcggaggagtgacacttagaatttgaatctcagcatacactctgtatcttttgggccaccgagcttgtatctcaattctcttcttcctggacacacctgtctcagttcgaataatgtagcaatgggatagctcccttaaaaaacaaaacacacacacacacacacacacacaaacaaacaaacaaacaaacaagacaaagcaaagcaaggtctcactttgtaggccaggtggccttgaattcatactcctcctgcctccaactgttggaatcgcaagcatccagctagagcacacctgtcacttcttcaaagcagcatctcccacacacttagaaggcagatgtgcacctggtggcccaggtagtgacaggtagcctttaagatttgaacctctttctcaactttgattctgtgggagttttctgaagtgagtgaacaatgagtcaggcacgcctgcctgttgccaggtaactgtggggcggagcctagacaaatgctgacatcccagagtattagaaaatgttctctttggttaagaagaaatccacagtaaggataccagactgagaatggtgatagcctcattaacagggaccctttggtcttaggctctcccatcttagctaaagttgtcagcactggtacagtgagtttgtctctacactgatttggctcctggcagatcacacatatatacttgctcaggagcgatctttggatcaaagaatgaaagacacacatgttagcttatttttaaaaatgccatggctacctcacagtctggtcactcctaaactttctcctgctacctcaggcccaaatcaggaagtggccaatggcccctcacctgaaatctcacatggttcagtggctctctctcctcttctacccccctttccattctggctaccccaccgtgtccactcaactctaaggggtctgtcccatcttttttgtttagccattagccactggcatctttattgatcggtcagaaaaccagttgggggcaaggacctttagcatttggacacacagattcctgattgaatcaaagcattagaaccaatccccaatacaatgcgagtcatctaaaaagcacaaaggataaagagggttttacagcctctctataagggcatgcctagaatgtgtctgcctatgattattctgcacatatccattggttagaatttagttggatggatgagttcagtggcaggcatcccagccacaattgaatctgtttataagtttcattggccttatttgatcaagttctactgcaaatagcttcacaaggtgagttagtgaccttgatataaatgaggtttagaggtagctgggctccaagccagcaagtcccacgacaacatttactgaagagttgaaaacctctgtgtatgagaaggctgctgaccaaccctgcccaggggtacaaggatgaacgcatccaaaattgctgcagagccctttctaaacagagtgctacatcagtttcctgggctaatcctcttagaccatcacttccgatctttaatgacataggcaattttcccttatactcttcctccctagaattatttttgactactttcacagtagaatggagtagtttctttaaaaacctgatgtcagtttactccagatgactttttattttaacactaaaatgcacggaaaatcagaaacctagtgtcgagcaatatgaggtcctacactgatttacttagagctgttctttcatctgtacaaaatgagatattaagcctgaaaagcatgaaattaattttttaagtgccctaaagataagatttctttttcctttgttagggaactggcacagatgaagatgccctgattgaaatcctaacaaccaggtcaagcaggcagatgaaggaaatctcgcaggcctattatacaggtaaccttgttttcttctatcctttaccactgatcacgtgtgtgagccaagttgtttctcctagcatcttgcctatcatgagcatcttatgagggcaggaagtagggaaagaaagatgcatcctacaatgaactgtgcatgttcagggcaagttagaatgtgatctgccacataacaatggtgttgctatcttgcctttatagcacccttgattcagagggctctgccctcaacattcacttaattgaatcagccattctcatcaatatcagagtttcaaatcattgtgcacttctatcataagttaaaaaccactcagattcatgattttgggtgtgggaagtttggtaagccattttagagctgatgtctgttagctgtgtaaaaaattagaacgtcctcactatgtaattcagaccatgctcaggggtggtatgaactcataggtgaccctcagccactacacttcaggctcagacatgagcacagatattcccaggcctcctatacctctaaccaattgcctgtaactcaggatcctcactgcacactcaggctcagtagctcagtagatggctaacagaagtcacgaaagtacagtactcccaatgacagttttgttataaaggaagtgactcgtggacagccaaatgacaacacacagaggtggggggtgcagggatcagggcgtctgagagctccaacctgaagcttctaccccaatggtacattaatgagcgatcgcatgtcaccatgttcacttgaatgtcagtagcctctgtttctaatcaggttttgtcactgagatacgattgattgattgattgagtcactattcgtgtgattgagctcatctcatagcctgtcctcggaggttggtatgactatgtcacaggactcaaagcttaactctctaacctcagggctggtctgtctaatcttactgctttctattcttggtcatcttgttagaaaaactcagaagaatactgtgaataagggactcaaatatcagacagagagagattggagtccaagggtttgtcccaagaaccaaggactaagtatcaactcaattctgaattacacaacacccaaaaagttctctaaggacctcgacagtgccatgttttctaaatttgcatttccaggaggtctacttgtgctgtgaaaacccacggaaatgggaatcctgggccccagatgggtataagaaaggttatttttagaaattctcattaaatgatagatacctaaataataggtgactaatttgttactgatgtatgaattagggaccagtcagaaaaaccacaaacaatacaaaacgatactaggcattttaacagagagagtttaatagagataactgcatcaataattttggaaaatagaaaaagaacagaaatggaagatagatgataatacaccaactatttccaaaattaagaactcaatggcacagaagttagggttatttggaactgtaagctcaggaggcggaaactacctgcccagtgttggttcaccagggactctaaggaagcacttgggattctaaggagaaggagtttgcttatctggagctggcacctctatcgttttggtaaggagcttgctgcagaggccacggctgcctctcagggtggaatatacagcaaagacaggaggtcacatgcacttcttttctagtacgttcctagctggcagtgagtggagaacactgggccgggagaggaaagaagtagatgtgaaaactggttaataaaaggcacaggtaaagccgggcaatggtggcgcatgcctttaacccctagcactcgggaggcagaggcaggcggatttctgcgttcaaggccagcctggtctacagagtgagttccaggaacagtcagggctacacagagaaaccctgtctcgaaaaaacaacaataacaaaaaacaacaacaacaacaaaaacaaaaacaaaaaaggcacaggtggatagagaatgagtgtttagaatatttgattcaagtcttctgggacttgcaagatgacttcagtgggtaaaggcacattccttcaagcctagaaatatggtttacattctagggacccacgtggtagcaaaagaggactgactccaaaagttgtccttagaccccaacacaggggctataacatgcacaaacagatgtccactgtaatgtgaaattgtgacctatacataagagtctatcaaaggaggccatcaatttggccttcataaaagccgtcccatttatgcagtgacacaatagtctaaataaacaactgggaactaagcttttcccaggattctaaggttactgctgtgtgtgaaagaatgccaaatcagggatcatgaactcctaagtcctggttcaggctccttcctattgcaacaccaacctcattcctttaccctgatatgcttcaaaatgcacaaggcacttgtcaatcatttggaatcatttctgcctatttcctctttgctataattattggtacatattggttgcacatcttaatgagtttcattgacatgattgcatacatgcatgtgttggcatgtttgcatatatgtgtgtgttaggcaggaatcctgtccttctactatatgcattttcaatttttaatagtccagcttcctgcaaaatatgtggtgaagaaggaagccagagaagactgcgtggcatgaatatttagtcttatctagataattctaaaattaccaaacacttttgacttgtttttagattaaaattccttctctaaatagagtgtagggtgggacaacaatattaagactggtaggcataaattatcaccattgagataaataatttatatctctgatgtcttttatttgtcttaatttcttgaagaatgatcgatttcattaaagagagtcattaaattgtgctgaggatatttttgctgtgctgtgatctatcgctttctgtaattgtcttctattgatttaaagatggttatccacgtggacagatgacgttattgaaagggcatagatgggattactattaacacctggtgttgcctccatccagatgtgtattaccagcaagggaattaccactccaaaggaacagaacagaaaagttaaattgtgggcaggacaggaactgtgctcaggacccggcctcaatccccaacactacaaactagtaagaataaatatcaaagccggagaaatgcctcagagtttgagagaatttgcagctcttacaggggacccaggctcagtcctcagcacccacatggtggatcagaaaaatgtaacttcacttccatagaggcctgatccctcttctgactgctgtcagccccaggcatgtacaaagtatatttacatgcatgcaggcaaaacactcacacacatgaaagaaaataaataaatctttacaaataaaaatacaagtaaaaagtgaccacagtttgcaccccacttgtcatgcaaaagggactacaactagtatatactagtgtatactagtgtatttgtatactagtatagcatataatatattagtgtgtactatagtatatagtattctagtatagtgtatactagcatatgtgaacacaaagctggtattggttacttttttatttctttcttatttttgagcaatattaatataatctagaagtatttcttaagatgatttcttaagatgaaagttagattcaataaaactgaacaatagcgtgcttacacattatcaatctttagttctcttatatgcagaggttgacagattgacgattctatgtctatagtatctcaaaactttcagtgactcaggccccatccttcacagtgatggacagggtcaaagcattgggcctcaaaccacagagaggcaaaggataggacaacgatggctatggcttgtccctttaaatagacttcccagaaaatcactcacacctgcctacaggtgatccagaacttaataactgggctgcacctagcttacaggacaccaagaagccagcttctggctgtttgatttacctctgctgaaggttaggactctccatgtgaaggaagagtaaatgtggaaacctaaagccaactggtagattcctgacctgggtattcctagccattgtcacataaagtgaaccacaattctatccagaaccacggttcttcctgttgtttgcctctcaccacacccagagcaacgcctccatcccacacctccatcccacacctccatcccacacctccatcccacacctccatcccacactagcagagcatcaggaagttaagcagaagggacactcggtcgctgccctctgctctgcggtggtctgttttagttcctcactacttaatcccgttcttatttggtttcagtgtataagaagagcctcggggatgacattagctctgagacgtctggagacttccggaaagctctgctgactctggcagatgtaaggtttgactgtttattctctgcttcccctcgcattcagggagttcacagaacctaggaccatgagatttttcactttctgtgaaacgattcatgcacatgacatttgctttgccatgatctataaaacatttatccaagatcacagaagcatatgtggcgatctaaccacaacaaaatgccttggttggctcagatcggtctacagattacaagtgtttccattgagattcacagtgtgcagttctgatgcaccgcccacctaagctcaaagttgctcattttccgccatgtttgcatctttagaacatacagaattcttctgggttgcaaagaatatccatttgtttaagttaagtgagaagaagacataagacttccataagaactaggtagtaaagccaggaaaataaatgatctgtttcaggactttgtccccaatacctcggaagtgatcctatgtgagcacatgaggccactgctcaccttacttggaaggcttatgatttaggtaacctcaggagaccaggcagggagctgcatcaggtaaagacacttgccattatctctggcaaacagggtccaattcctcgaacccacagaaaagtggagagagagagagagagagagagagaggagagagagagagagtgattcgcctccatagggtactcctctgaccttcacacttgcactgtggtgctcccaccaagcatatacatattaatgtgtaataaataatacgtattttttttaagatgctaactttggggctggagaagtggcttagcagttaagtggctgctcttcagagagcaaaggtcggagtgtcaccctcacgtgttggctcacaatctctcttcagccatgtgtgtatgggtatcaggcacacatacacacatgcacacaaagtacccacacacattaaaaaaaaaaaaaaccaaggtggtaaagtcaaggataagatttattcgcaggcttgagtaagagaggacatgattaaagccccatctcgttgacttcttgcagctgatttacacagctcctgatgtgtggggaaatcccaaggggcacagcatgtcagctgaggcagctcttgaaaagtgaggctttaggcttcaggtgctttaactgctgaaaacctcaggaaggttgaagctacaaacccaaggcagcggcagacgtggcctcctcgatgtgtgtcctggtgcgcatcctcatgtgtttgacgtgggctcacccactgtacgcaggaagaataacgccccagggctggttttggatcaagcagaactggaccctcctgctgcctcatggtttcctgtatctgaacaactaactttaagctttcaggaatccgtgctcatacctgtgacgctgcactttagatagatattaaccccttgaggtgttgtgaagagtaggagagaatgagaggtgctggttgcatggaaatcagtactttggggttcactcgagtcttctatggattttaacagatctatgaatggaccttccattacagtttcatgcagaatagttccacttctctaggaagtctgtcttctgcctatatatatcactctttttctctccctcagaaaccatccttatcaatctacttctagtttgcctcttgtgtagtgttcagtagttgaagtcactcaccatgcagccctttcagacccgctttcagtatttacccatctgctgttctgtgtggtcaggatactatcttttgatagtgacactttagggtttttgtctgtttgtctccctgtttgtttgtttgaatgagtgagtttcttagagtgaacaaaagtaaaaagcagttgcagaaggataaaacagctctatcaaatggggccactggcaggatccagcacaaaccactgcagtatcccagttgaaagagtaacaaaaggtagcaacatcaaatcggtgattgcaaagatccagtagtggttccatggggaaagacagttgaacagaacttgcccagtggagctctggaatgagaggcataggtgagtagagtgtgcctgccggctaagctaagcatagcgtgcctgctggtgaggtttccaagtaaaagaaccatcagtgagtagcaaagataagagaacatcctcaaaccaacacttacaaccatctatcagaaatgactggatgccctgctcagttcagggcagggcagtattctttctacagtgagcttctgccttctctttccctccataggcattgtgatattatgatattataatattataatatgattaacaattgtcactgcagatggtgataagtttacttcttagctgttttcaaggacagcatgtcttatcacacttagctgcttgctgtttttctctcagttaccaagtcagggggtcagcctgacccaggacaggggcatttggaggacacgtgacataaacatgcctgagcctgaacttggagggtcagtcctgtttccagagtcaactgcttagtgatatcaaaaacatatgtcattttaccaacataatggatattgtgtatgcctgtgatgtttctctatattctttttcacaactaactggtcagctggtgccttttttttttttactgaataatattttgttatataaactgttttataagttgaagggcatcttggttgcttcaaagctttgtcagttataaataaaattcagttaaatatttatgtgcaaggctgtgtatggacatgtgcccatcttgcttaggtaagtgtcaaagagcagaattgctggattacactgtaagaatagacctagcaatataaggaactcctggaaggtccctgtaagtccatgtgccatgttacatccccatgagcaaagaaagcagagttcccgctgtttccactctttcccagcatttagagtcgtcagtggtttggagtttaatcctgttaacagatcctgccttgatttatagtccccagggacatgatgaaaaccatctttccatgttttctctatgtctaaacatcttctctggtgagatgtctccttagatcattttcttaaaactgggttgtttattatcttcttcctgggtcgcaaaatttctttatattttttgcttatttgtcttttatcaagcatgttttgtaaatactccttgtcttctcattgtaacacctttgagtttccagaggacctggagactgcagattgtgtaccctgctacactgactgactatcgatggcagagacagactcagaaccaagagagcctgatttttctctgctacatagtctgtatggaaaaccttccaagatgagctggtgggtggagaactgtgtccttgcagggctgaccttgattttctcattcctgctgctttagggtagaagagatgaaagcctcaaagtggatgaacatctggccaaaaaggatgctcaggtcagtaacagtcaggagaacagctcttttacacctaccaccaccaatggctctgccctggccctgtcctctcctgtcctgtctgaggcaaagcctggagacaagtgtcatccagctactgtagtgtcaagcatccaccattccctcctccaggtcctgtatttgaccttcagatttgaatggcctctaaaatcgaatgaaactcccacctcttctcattccatcccttcaaatagagaaagaattgcatttctgatgacacacagggatttttccatttgtcaacagatcctctataatgctggtgagaacaaatggggcacagacgaagacaaattcaccgaggtcttgtgtctacggagcttcccgcagctgaaactaagtatgtgtgacacaagtcttcttggctctgtgttgttttggcaaaggtctttgtagtttatgtagcaacatcttaggagaccaaatggagaagttggattttaactaggtagcactgacattctcttctgttttgccctaaagacttagcaggctacctaccctgtgcggcactctagatgagaacgaggaagacaggggcaatcctgtagagagcaggagctggttgccctgcttcaacccaagctctccttggctcaccaccttctgaaaaagtcaggcactgccttacctttccctggcattggtttgattgattgatctttgttgattgattaatgctgtgaacagtggcttctgtctgatatgaagggtaatgagggtgggggaagaaccagctcttctctgagacccctgactgagtcccacccagccgctcagtcaggagtctccctgagctcttctacaagtacccagagctccatgtcagtattctgacagtggctgccaggtgccagtttagacagcagctgcagtgcaggaccaaccttatgctgagctgagaaagcagaagggtgttgctgtgacttttcattttgaaatctgcctctttcacttggacagtgatttttatgtgtaatgtattagtgcttttctctaagtctttgcttgaaaacagagaggtagggtgatcccctgtataactttgccaattttccatgtttaaaaatgtgttggatggttcatgtctttactcctagcagaggcaggaggatatctgcaagttctatgccagctagggctacatgtgtgagaccgccatctcaaaacaaaagagcagcactaaaacctcattgaaagaaatgtacttggcttatgaaatcttgtacacgtgatgacataagtatactgatcaagacatattgatggcttctgtgaaatagtaggtgtgaagtgggccaccctgccttagagaatgacaccctctgcacaagaaaatccaaaccctcctagacagggttagtaacatcaggttggctcatcaggtcaaggcatttgccaccaagtctgaccgtctgagtttggtcctagaaacccacatggtggaaggagaaaactacctcctataagttgtcttctgacctttgtagatgcacacacatgcacacacacacacacacacacacacacacacacacatacaactatatatatataattaatattaaaaatgttttaagaaagctttccagttaccattctgcagcttctgaccagctagtaccgcattgcttcctagaactgctatacttttgcaatagatgagttatttgtcacagaacattataagctcttttaactgcttcagactggagagaggggaagggagatcactgaagaaatggcctaaggagttcagtcttcattgtgttcaacttttgatggctgctgaggttttgagcttgcccgttgatctgctacatcttacattttaaactgtgaaatatattctagtgtggccctctgggatgctttaaatatttttatggtgctattttttagcatttgatgagtacagaaatattagccagaaggacattgaggacagcattaaaggagaattatctggacattttgaagacctgctgctggccataggtaagcccttgagtgttaataagtggaactgtttgtacttctttgaagtccatgtcaaggtgagctaattataagaatctggactaatccatctctgctcctacagcctcctgcatggcacaaacagctgtctacacaaatactgttaaataatacacggagaagttatctacttttaagtttgtatttggcttgtcattgtgtttagattataccctctttgagagcagaaatattacagtctactggtattttttattgaaccttgttgaaactgagttttaatcaatttggtattccactgtactttgttatctctggaagatgtcaatggcctcccaaattggagccaatcagaactatagatcgcttcctctttagttgagtgattgatcaggtgggattcaggctgaatccatccccatatagacacataaattagttactggtcagcaatgctgttgtacaggcaatgaaggcttcacagtttgctcttccaggcactaagacagggcttcaaaaggaagatgagatcaaagcatgaggcacaactcaaagtcgggattcttgacctctttagtgaagagtcaaaaaatgcaagcatgtgtctctgtctttgcctgtctctctgtctctctcatacacattcacagagaggtggggatccagtctagttctttggagggacactggagaattgacttcagaattccattggggaatgcctagacagtgaacaccttgtcacctcaccagtgggaagtcctttccaatacccactgtcgtaattcatgccacctgcactaagatcacctcgggttgcctgtacaacagcattgctgaccagtaactaatttatgtgtctatatggggatggattcagcccgaatcccacctgatcaatcactcaactaaagaggatgcgatctatagttctgattggctccaatttgggaggccattgacatcttccagagataacaaagtacagtggaataccaaattaccctcagggtaatttcctcttcctaccagagattcattccccagatgctaattgccatctctgaagagtgactcctaattatggtgcctttacttttatgtttaagcaaattctttatgttgggcactgtgttcaacccttcacacacgtcaactcatctaaacctttgacaatccttcaaagcaggtgtagtagtaattttggctaaaccactctgtgctcctggcagatcacactcccagtcaccctccagattcctctgtgtaactgagccgtggttgtcctggacttgatttgcaaatgaaagatacacacacacacacacacacacacacttccatcctgtaatcctgacctaacaccctctaattttatattttatctttgttgccctatgtagtcaggtttctatttctgcacaaacatcatgaccaagaagcaagttggggaggaaagggtttattcagcttatacttccacattgttgttcatcaccaaaggaagtcaggactggaactcaaacaagttaggaagcaggacctgatgcagaggccatggagggatgttacttactggcttgcttcccctggcttgttctgcttgctttcttatagaactcaggactacctgcctagagatggcactacccacaatgggctaggccctcccaccccttgatcactaattgagaaaatgtcttacagctgtatctcatggaggcatttcctcaagggaggctcctttctctgttgtaactcctgcttgtgtcaagttgacacacaaaaccagccagttcattctattaccttctgagcagccacctagtctttgatgcccaagacacttctgggcagcccttctgggagctgcattccttcttacctacattttggatgattttccttttgtggctttaaatctgacctgtctgcctcagaatcctggtgattctccttgccctccttctagttcctagccagcacaaattcaaaggtaatgccttagtccacctacccagccattggccatttactctttattgatcaatcaaaaaccaattggggacaagggccttcagcgtttaaacacccagactcccaattttggttcaaagcattagaaccaatccccaacaagcaggttcatccccctggtgacacggtaaacctggggctcaggtggattaagtgacttccttggaccaagggcatctgagtttgtgagataagttgataaaggcatttggtcttaattttaatgcttgctcaagatcaggagcaaatcagagattaggaatctatagcaatttacaatttgatcaagacaataaagatggtaggaaataggcaattgtgaactgttggtaatggttataattgaggtggttcctcctccagtttcccttcctatgatgttgtatgcaaaagtaagttccttactactgagttactctactgcttcccttattttcagatacaaagaacaaaccttatacttgggaacataaagaaaaggtagggtaaaggaaaggaaggtgctgggcagtggtggcgcatgcctttaatccaagcacttgggaggcagaggcaggcagatttctgagtttgaggtcagcctggtctacagagtgacttccaggacagccagggctacacagagaaaccctgtctcaaataactaactaaataactaactaaggaaggaccctgattagaaggagtgtgtacgtctagttgtgggaaggaccatgattaggaggagtgtgtatgtctagttgtgggaaggaccatgattaggaggagtgtgtgtgtctagttgtgggaaggaccatgattaggaggagtgtgtgtgtctagttgtgggaagacagaggagaagcttaagaagatttaaaaagagaaaggaaaagactcatgatggttttgtccaaatcttaagagttaatgtttgttgaagaaagtttagtagtagcagtgggagtggttggtttcttgtcagaaagcttcatttcttaagttttccttaagtcattatagttactttcctgttgctgtgagaaaaaataataccatcaccaggcaacttagagatgggcttatgcttccaccgtccacattggaaagaacatcatggcagcaggcttgcaggtgtggcagcaggaacaggaaggtgacagcttacatcttgaactacagccgcgaagcagagagactgaattagacgtagctcagggatttcaactctccaagctcgcccacagtaacatactttctgtaccaaagccacaccccctacacctccccaaacagtgccaccagctgggaaccaagtgttcaaatgtcagagtctgtgcaggacatttctcacttaaacaccacatacatatggcaagtctttgccttgctgtatgtaagtgtgtaagccactagaggggaaatcaaggctttttccaagaccccaaatccattattacattcatctgctcacctatggccagacttctgcctgaatcagatgtaagaacactaaaacaactgtgctgcatgaataggtgtgtcctctatacactttacttttcctgtctatttcactttgcctcaaagaaaactnnnnnnnnnnnnnnnnnnnnnnnnnnnnnnnnnnnnnnnnnnnnnnnnnnnnnnnnnnnnnnnnnnnnnnnnnnnnnnnnnnnnnnnnnnnnnnnnnnnnnnnnnnnnnnnnnnnnnnnnnnnnnnnnnnnnnnnnnnnnnnnnnnnnnnnnnnnnnnnnnnnnnnnnnnnnnnnnnnnnnnnnnnnnnnnnnnnnnnnnnnnnnnnnnnnnnnnnnnnnnnnnnnnnnnnnnnnnnnnnnnnnnnnnnnnnnnnnnnnnnnnnnnnnnnnnnnnnnnnnnnnnnnnnnnnnnnnnnnnnnnnnnnnnnnnnnnnnnnnnnnnnnnnnnnnnnnnnnnnnnnnnnnnnnnnnnnnnnnnnnnnnnnnnnnnnnnnnnnnnnnnnnnnnnnnnnnnnnnnnnnnnnnnnnnnnnnnnnnnnnnnnnnnnnnnnnnnnnnnnnnnnnnnnnnnnnnnnnnnnnnnnnnnnnnnnnnnnnnnnnnnnnnnnnnnnnnnnnnnnnnnnnnnnnnnnnnnnnnnnnnnnnnnnnnnnnnnnnnnnnnnnnnnnnnnnnnnnnnnnnnnnnnnnnnnnnnnnnnnnnnnnnnnnnnnnnnnnnnnnnnnnnnnnnnnnnnnnnnnnnnnnnnnnnnnnnnnnnnnnnnnnnnnnnnnnnnnnnnnnnnnnnnnnnnnnnnnnnnnnnnnnnnnnnnnnnnnnnnnnnnnnnnnnnnnnnnnnnnnnnnnnnnnnnnnnnnnnnnnnnnnnnnnnnnnnnnnnnnnnnnnnnnnnnnnnnnnnnnnnnnnnnnnnnnnnnnnnnnnnnnnnnnnnnnnnnnnnnnnnnnnnnnnnnnnnnnnnnnnnnnnnnnnnnnnnnnnnnnnnnnnnnnnnnnnnnnnnnnnnnnnnnnnnnnnnnnnnnnnnnnnnnnnnnnnnnnnnnnnnnnnnnnnnnnnnnnnnnnnnnnnnnnnnnnnnnnnnnnnnnnnnnnnnnnnnnnnnnnnnnnnnnnnnnnnnnnnnnnnnnnnnnnnnnnnnnnnnnnnnnnnnnnnnnnnnnnnnnnnnnnnnnnnnnnnnnnnnnnnnnnnnnnnnnnnnnnnnnnnnnnnnnnnnnnnnnnnnnnnnnnnnnnnnnnnnnnnnnnnnnnnnnnnnnnnnnnnnnnnnnnnnnnnnnnnnnnnnnnnnnnnnnnnnnnnnnnnnnnnnnnnnnnnnnnnnnnnnnnnnnnnnnnnnncagggtactggttagttcataatgttgttccacctatagggttgcagatcccattagctccttgggtactttctctagctcctccattgggggtcgtgtgacccatccaatagctgactgtgatcatccacttctgtgtttgctaggccccggcatagtctcacaagagacagctatatctgggttctttcagcaaaatcttgctagtgtatgcaatgatgtcagcatttggaagctgattatgggatggatccctggatatggcaatcactatatggtccatcatttcgtcacagctccaaattttgtctctgtaactccttccatgggtgttttgttcccatttctaagaaggggcaaagtgtccactcctcaattctttaatgggtgtttcctgtggctccaaacgttatgtccaactgaataccttattttcctcacctcaggccaccaccagtcctggctcctgtgttcagggacctcacaggttgtgctgaccaggactggccttgctcagctttggacactgaactctgcctccttggccttgttccttgggtctcagccacctccactttcttgctgttcccaggttatcactgctgtccccacctggcaactttgtgtttgttttcctatctgtagtgttcctctaccatagctgtggctggctttttctcatcttttcaggtctcagctcaaatgtctcctcttgaagtaacccctaagtatccatgtttactaactggatcaaggtcacttggtaaggccatgaggaattgaatctggcctgatggatgatccacagcaagactggggctgtggcaattgtagtgagagcaactggactttttatacctttatcagaaacagaatataatgaaaagtttcaggatcaatatagttgtccttgccaggatacaatgatgtatgcaaggtgcatggggtacacaaggttgatgtctaagaccaattgtcatgtcttccatgcttccttgactttaagggagcatacagaggtgcacacagcagcctgaatgtttcactgcctgaggaagtgcatggatctctcaagaactgggaggcacattgtgccccaggagccatgaactcttccctgaaaagcttatgaaacaggcctctcaatcagctaggccagaacaactccgtggttctttatgtaacactccctcatttacccagtcaactggctttctctccatcactctgcattcttctgccttgtgttttctcctcactcttattaatattcactaaaataatcagataatttgctatctctgtctaatagaaaataaacttcacggagacagaatctattcactgctgtgtgcatggcacagaaaataatgtcaggtacacagtacacgttcaactggcatttgttggaaacatcacttaacagacccagcattcacttaacagctaccttgaaagtttcactctctttccccattgttccaatggtacatcatcactttgaccatctactcacaaacacctcgcacatgctctctccatatgtgaacattacttccgctgaggccacgaccatcctctattgctgcagacatgtccgcgtgggtcgcagagactttcctcttacccctttgtcttcgttctgtttctcccctggaatctgtgcttcctgttgcaaacggacagtctcagaagccaaccacaaataagatgtgatcccagctttcttagtttaaaatgttgtgacagcgctcaactttgggatacagttggagtttcatttcatggtcagcgaagtctagattttccagatgcatcatttgctgttgtttattatttatacatcctaaactttcacatacttcacgcacagacacacatacacacacatacacacagagagagaggttgagagagagagagaatcctttactagagaattctttgctttctatgcaagcccatccccttccctagtgcatctgttacctgggtcttgatgcctctgcctcagtttccccagtgcctcaccatcccagcatacccctagctgatgatttaggcttcgctgcagatgtcactttcttaagcaggccttcctaatttttagtctttcccaggttctgttaaaactcacctctatagaacccggtatctcctatctgtcagactaattttaaataactttttatttaatgattttatcctttcattgagaacttggtacatgttttgatcatattcacccacacatccagctcctcccagatccactcccctactccccttccctttccaccccccaactctctctctctctctctctctctctctctctctctctctctctctctctctctctctctctctctttctctctctccaaggtcaatttaagctgcccaaatatttttgtacctgtggcctttcaacggcatatgggtgacttatcagttgctggacttctagaggaaactgactctttctgtcccagcagctaacaaatgccagtagcttcaaagttcctccatgctaggatttggtgtcagactcattttcaatgtcctgttttgtaacctgtatctgctatagaactacacgctcattagggatacttcctcttcatagcatggtgaaggctcattacaggggctcaacacatatttcattaataaatgaatggtagagtttggtgctaaatgaatgaagaggagttgctgtggttggatatcctgtttacgatcctcttatctcttacaactgaatgtctgcatatcattgagtaactggtgaggtctcacggtcctttcttcccagggtgctggaacagatgaattcactctgaacagaataatggtttccagatcagagattgatcttttggacatcagacatgagttcaagaagcactatggctactctctatactcggccatccaagtgagtctcctgtaggaacagcagggcatggttctccttctctgctcacaagctttctgtcatgatcctttaaaacacagataggctgactcacatttctctctccctgttattgtgctttctgagtttaaaatagttctaccaaaacatcccttaaaggtgggagcttgggaactgaagagatgactccgtggtgcctaaggacctggatttgatccctagcatccacatagcagctcacaaccatctctaactccaattccagagaatccgacagctttttctggcatctgtgggtaccgcgtggacatggtgcacaaacatgtataggcagaacatgcattcacatgaaattagaaagaaatacatcttttaaaaaattgttaaaaatggtaactgttttccagttcttaaatactaagaatgtaatagtaagccatcttttaaaaggtttattggacatacaattttattttgggaaaaaaaaaacctgaacatgtaagttgattgtctattgtttgtgctgcagtgtttttaaacaattatttcagcatggtggcaaagtaagaagtaagtaaggaaaaaataaggaaagaaaattacatgtttcacattttcctttagtgacgccggcatgtagatcagtagtaaacatttacctggtatgtgcaaggctatgagattaatccccaccacagcaacgataaattaataatgataataataataataataataaaaggaggaagccctgtgttgtatactatagatgatgggttctgtatcttcagttcttatctttacagtatgaaaaaggcttctcatttttcgtgactgtattattattccatttttatttcaataacactaacagatatttagagtccctagctattcaaaacagtgctacagtgtgcatacccggattcatgaggtgcaactgttgggggtgatgggtaaatggctgagatagataaaacttatttttgattttggtaaaaatgagcacttggttctccttcctgtgttttcctcagagcctcagagttatctctactcatagacaacccttttgcatttttatagtccaacaggtgcatgttaggatgaacgtatttcacatttttaagtgccatttttatttcctttttctctgtgctttctgtttctgtgttttgggcccattcttcgtttggatttctattgctttctgttaacgtctaaggtctccttgtacattaggcagattagctatttttttttaaatctcattataaatattttttgttactttttgcctccgctttcccaagtagaacttttatttgctatgtaactgaatttattaatccttgtagtttcttggattttatttttatgttccattgtttctgccattctgctaagaatatttctaaaatgtctgatactccttcctttctgcttaacagcaaacccatggtcactgttcccaagtctcaggaaaaaaaaatgtatatatataattacacctttaatcccagcacttgggaggcagaggcaggtggatttctgagtttcaaggccagactggtctacaaagtgagtttcgggacagccagggctacacagagaaaccttgtctccaaaaaacaaaaaacaaaacaacaacaaaaacaaaaagtaaaactgatcaaattgatagaattgttcagaaaaagtctcctataccataaaaattctggttcaatgtcctagctgaaagagaactattccagctagctaataaatgctaaggaactagcccaggtttccctcgtagtattctgtgggttctgctttattgttttgttttgccttagcccctagatgtcacacaaaggcccctgttaatttagagaattcatccagcctggttccctggatcagtctgggcactgaggttgagtgaactacccgccatcctagtcacccagtgtagagtctggctccacaagggccccacgggctgcatgacttatttacctctgagttcttacatgctttacaagctttctcaggaaaatcagctttgaggcccaggctggtgccttctgagaacctgtgcccagaagaattaggacaaagaggatagcagcccggagggaagcattgagagtctcaagctgaaagcacacaccccaggccagctgtgggaccactgtatactgtacagatccggattcttggcagctcctagccctggttcttgaggaattgatgcttagccttggcaactgggaatgtctggcctaggccatgttcctgtgccacactgagtagctggggtctttccttctacccacagtgtagacctacccacactagacacccttaatcagcacacacattggcctgggggatcgctaactgtcttagaagcattccagcctcagggaccacagatgatttattttttgttttaaaggaatgaataaatgtattcacttcagtcagtcagctagattggctcaccaaattcctttgggcttttaaaaaaccagagtctttgttttctgctaaactttgactgagaaagatgcatgggtaagtcaaaatcataactgatccaaaagagcaacaggctctacctagggcttagcacggattttgtcagcagcctaccctcagttctatgtgaattgatcctgacacattacaatagtttcaatcatcataggaagattcaataacattaaccacattgtacttgccgaggcagaaaagcagactcattcattttataacaattgtcagtaacaaggttgacacaccaggagggcttctggttcaccttcagcaaaccagaaaattagattaagttgtggtgctctgtccccaccccccaaccccccatgatggagacttactgtagtaggagacacttaaactatttgtagtttgataaagagaaaaatccaccactgaagagtctggtttgagatgtgaaataacacagactctgtccgttctcctgcctccacgtgttgtcaggtagtctcattcatgatttcctggctggccagtgggatcttttcaagatggttgttcttgaaactcgggagtcggaacatggaaacgctgcatacattccgctcttggtctctgtcatcctctgctttcccctattatccagacatctaactgctgttcagtcctctcatggatgataactggtgaggtgaaggaaagggagagtgtaagtaaaaaaaaaaaaaaaaaaaaaaaaaaaagaagaaggagaagaagaagtcctccttcctcacaagacgattccggtgtagtgacacgtgcttataacatccataatccgggagtggctgaggcaggaggatctttagtttgaggccagcctgtattatatagttgagactctgtctaaaaaagtacattaatggaaatttcaaggagacctaatgttttgttaacttccctagtcagtaataaaaagcgtgctataagggcaatagagtgactactccgagaatctgagtaatcttatagtctagaacacagaatctagaacactagaatctagaacactagaatccgagtaatcttatagtctagaacacagaagactccagatgaaggcttaaagaaaggcattgacatagatggcaattggaacagcatcatctagccaagtgctaaatgtgagtatgggagtcaggaatacaggaactgacaaaaaagacatttgagagttagaaaagaacattttttagagcaatgggtcctgagtctgcctatcaggtcaacaacaggaactaggcacctcctctggaattctgctggtcagcagggtcctaagatgcatcttagaaagagaatcatagtaagaggctggaggaaaaggaaccttaagtcaatggcttaactagaaaatctacttcagggaatactcgagcataacatagtgaaatgaattcacccagagtcccacagttgggagttagtgctgtattcatctaagcacaaatatttactaagggaatgctgtgtcagactcagggctaaagatgtgaggaggaataaggtttttgctcctatgacattacaaatatgcattaaaaatcactactttcatgtgagggaaggagacatggtactaaaatataatataacatgaggacttgactgacaagaaaggcttctatggggaaagataattttaatctggaaagttcagtaggcattagcaaggagatggttgtgcctgtatgtatggagctagccaagcattctaaaggaagaatgtgggatagatgaatttgtaaagatcttgggacagaagaaactgtgaatacagggtaaagaggccaggtcatgcaggacttctctggtaccattgaaatagtcctgtctttagcacaggaattgtggagtcaatagaatggtagacaaaaggatgtctcagtcatttaaaataattctggtgactgtgaagagtgacttaagtagggaccaagagagacatggggtgatgagtgtgtgtgtgtgtgtgggggggggtgacacagacacaccggagtaggtctgacttggatgggagaccacgacacagccgatctgcaagctcaatagagagggacttaggatttggtaagagaagcgagaaaaaagtgtgaaggatgacacccaggagtctatcttaggaaagagcaagaagtgctgttttctacaagaaggtcagggaagagggtgttgtccttggggacgtgtgaggaagttcctggtctttcgtgtcttgagtttgggacatgctaggaggcagtacttgaagaggtcagcacaatggctgctagtgtgggtccattgtgagagtcagtgtcccaggtgccttctattgctggatgacaaaagcaacgtcaggaatcaggcatggtggcacatgcctttaattccagcatcagaagcagaggcaagcagatctctatgagtatgaagcaagccttgtctacatagtaagttctaggccaccgagagctacacagtgagactcttgctttctaaaataagtaagcaaatgaataaacagctcactaactaactcacttaagggataaagagttcacctttggcttacagttcaagagggaaagaatccataatagcatagaaggacctggctacaggtagttggagtatgggacccaggtgcaagaaactggctgaacagagtcttctatactcagaaaacacagagagaacaagtgggcccatggcgagaaaaaaaacttaactaaaccaatagcctaccaccctgttgtgtattgccctagtgctgtttgtattttgatgctaattctagttcccaaagaggggctgcccccaacaatcaccacactcaggtgatttcatgtgaaccttctccccattttaactggtcaaataaagtctagagcctgcgattgggcagtggaagggaaaggggaaagtggaagtgttagagaaggagagagaggagtgaggaaaagagagacgatggagggaaggagagagcagaagatggaagaagaggaggtggaaaatggagcagaagcacgtgggcttgaggagccacaagtagcaagggatctcatagctggggaatagggtagtgtagtgatagatctgcccaatctagatgtgcagcttataaatattataactgagttgtgtgttctttgcacaggcatattggggttggagatttaccgatacaaatatggctggtattaaatgttaaggctgtctggtgtttccgatttgtgaggatttaggtgggcaagagggagggcaaaaccgtggagtggtcattggcagtagtggttgtagcagaccactggggccgtctgtctgtggaaccagaactgtagctccaggcgttctcaggaaggacatgttgcaggacttagcaagccagcctcaggaaccagggtaagatgtggaacagacaggatggaagtggagcccgcctgggcggagctaagtatgccacccaaacttgagaaatgcaagaccaggaatttcctcacacttccctatggacaacaccctcttctctgaccctcttgtagaaaatggcacttcttgctctttcccaagatagaatcctgggggatagaatctcggagctaagtcataaggggctgtggcactgggcaaggagaccaggcaaagggaagcttgcagaaagagtgccacaggtatgcactaatccctcagctgacatgattgtttctcaaaccacctttctctgctggctgggggaggtgggtgggtcactacagctcctctaagaactggaaatgactcagtctttgtagcttggcttgtctgagaggcactgttggtttttattgcttcctctggcaaggaagggtctagtgaatttggtcagtttcagggacttcctggaactataataagttgtttacctccctgcttagggaacttcctgcaggatggaatgtttgaatctcccaggaaactgacacagtaggagtgaggggtgaaatcacctgagtgtggctctctgatttgagggttcctttcttagcttctgtaattgttacacgaagattagcagagttcatactctgctgcatagatgttttataagggttacaatagttaaacttttcatttaagcattttatattgaaaattcaggttttcacacatgctaaacacactacatgccattgagtgacacctccagttgcacatgatgtttacattgtaaatagaagtgtcagttaacgttatttcttattaagcaacagatattagagtttctgttagcagctaatatggaatatcatgtcattgatgaaatctttccagttgcactactccagcaggatttgaacattatgaactgcagagaacatgctaggctggggcacagctgtcctcaagaatgaaagaaaaatggcacggcaggtgtgctgtactgaaggatacagctcaaacgtcatctcatacccaagtgactcccctagccctgtaggtctgattctcctgtaatcccctccttatttatgctgtgtttaatcttccctgtcggtcctgtcctttgcagtcagatacttctggagactacagaaccgtgctcttgaagatctgtggagaagatgattgaagaagatggctcccaatggctgcctgccctgatggtggaccgcctcaaaatctctgcacactgctttcatgcagcactctaaagtgcaagcaaatgcaagacagaacctgtctgcctgataggcattggcatcgttcagtgcaatggcaaaaatgaacttgattttatttcagaccatctcattcatgataagggaaattcaatctagaattaaagacctactaatgattttctgtttggcttaggaagttggaatctgtgtagttcaaaaccattaaacataaatcaggatactaaagatggctgcctttcctaattgtaatttgtgtatttgttttcagtatctactaatactgtatgttgcctggtgccaacaaatatttcaaaatacatttgttgtaaatgctctgggtgcttctgttacttgattagtgtggtctaaaaagctagtcataaaatgtcatggtgctgctcacctacaagcccaacatttaggaggtggagaccggaggatcaatagtttgagccatccttgtgtaggtgcaggagatataaacaagtccattaacagtttattgcggttgaggcttgggctccgagaaggagaatggtgcctggtgaatttatgttagggaaatgaggtagtgctgtccttattgatgttcagcaggtgctagaatctggcagggaaaaaacaacaacaaaaggattgctggcagatacttccactattccacaggatttctgtctgccaggaagagccacttctgtatctctccttcctctggcggatgaggcattaggctgattgttaatatgtacccatggtgcatgctaacctccagacttccccagttcgttccaggctgctccagttcagagggttcccttccccacctgcaactactgtttttctgcctaacccataaaaggttttcctgctcctgctcctgctcctgctcctgctcctgctcctgctcctgctcctgctcctgctcctgctcctgctcctgctcctgctcctcctcctgctcctgctcctgctcctgctcctgctcctgctcctgctcctgctcctgctcctgctcctgctcctgctcctgctcctgctcctgctgctgctcctgctgctgctgctgctgctgctgctgctgctgctgctgctgnnnnnnnnnnnnnnnnnnnnnnnnnnnnnnnnnnnnnnnnnnnnnnnnnnnnnnnnnnnnnnnnnnnnnnnnnnnnnnnnnnnnnnnnnnnnnnnnnnnnnnnnnnnnnnnnnnnnnnnnnnnnnnnnnnnnnnnnnnnnnnnnnnnnnnnnnnnnnnnnnnnnnnnnnnnnnnnnnnnnnnnnnnnnnnnnnnnnnnnnnnnnnnnnnnnnnnnnnnnnnnnnnnnnnnnnnnnnnnnnnnnnnnnnnnnnnnnnnnnnnnnnnnnnnnnnnnnnnnnnnnnnnnnnnnnnnnnnnnnnnnnnnnnnnnnctcctgctcctgctcctgctcctgctcctgctcctcctcctgctcctgctcctgctcctgctcctcctcctgctcctgctcctgctcctgctcctgctcctgctcctcctcctgctcctgctcctgctcctgctcctcctcctgctcctgctcctgctcctgcacctgctcctcctcctgctcctgctcctcctgctcctgctcctgctcctgctccctctcctctctctgctccctctcctctctcagctcccaagagcagtagtcctggcctttgacagtctgcccttctcctctctgccccagagactattgccccagagaccatggctattttggaagttcacaaaggctctggatattctctctctcatatctacaaaagtataaaaaaaaatctataaaaactttccacccatggatcagtcagtttgtcagctctctgtgcctttgcttacatgcccccacccccaccccagatttcagcacacaatcaagaaatcactgagatgatcactccacgaatggggaggtttttattaacactaaaagagagagaacagtcagaagcacctgtatgagtccagagcagagagaataagaggaaagactgaccatggccagagctagagaagtgggcatgaaaaatagtgtgggttacaaagagcacaagtagcctaggggaaggaatctgtgaactgaaacagcctggatgttcagagcagaggaggaggtttgaagggccaagatgctggtgtgggctttgaaatgcataacaggtacaagtgaatagggaccaaaggagcctcaaggcaaatgtgggcttttgatatgtaaccagaggtataaaccaagggaagtggccctttctgacaggctcctgaggaatgcttgggcctgacacccacaataaagagacacaaggacacctgcctctgcactttacctaactgctagtgcagttagagctccccttcccaccttttcaagcatagatgcctcaggcctttgaggaggacaaacagagagggcaccagaatattgcaattccccttttcatggtggcactcccttccccctaacatccccctgccccccccctccactgggggggggagcagcagatgccagctttggggacagacagaaaacagcataccttagcctccctgtcaccaaggctaacactctccttgatagataaccaacatttttccagtgcagatcgctcctgtccttgaagaaaacaaggactaaacatccttgaaatgataagaggcctgcgcttggaccaagacacaagggcaattaagtgttcccagacagctgtgaccactttgtaaaaatacactagctcccgatagcaccacaaagttacttcccaggtcaggaaggtccccttccagctacacagttctgccctgctgtctgaacaaatgttaccaggtttgaaggatggtttttcccttgtcacctcctcagtcatggaaccccaaagtttggggattcccggcatatatatgtacacacacacacacacacacacacacacacacacacacacacacaccaagcccctggttcggccattgtatccctaacctgcacagtgggaaagtctttctatctgggtctgacttataaaataaagactctctttgtttttacattggacttgcaattcctggcgttctccgggggttcccaagaactgggcataacaacaagattgttttataatgaaatgaaatatttaaaagtgtgttcatggggatggagagatggtttaccagttaaggatgcttgctcatccagtgaacctgaattaaagtcctagcacccatattaggcggcccatcaatctgggttcccaagccaaatgaggggtggtagaacactgcctatacccccagacagctccgagagagcacagcaggaataggactgctccctacccaaatcaggcttgggcctacttaactccatagagacaaaggccacttcataataatgccagttaaacttctgttttcccactagagaactggcttctgagaaattatgtgaagggcagtctgctaatcttgctgataagattggaaggttccacccctctgcaacacttcctcccttgtccttccccctaaagctatataacctgacccctctatttcaataaacaagctgtcctctgaaatagtctcccgggtggtttatatccaccatactcattgctgcctgagaccctgttcctgaacgcctccaaatcctgagactgccagtgcacaaaagctgatgggggcaagagacctacatctggtgcctgaacaggaacactccaggatgtgtggaagagagtgagtaccctccctgtccccctcccctcagcggcttccgcatcttgcttcgccatcctaccttgaggatctgcttccttgctcctctgctttgatttgacccaccttcaagtaccaattttgaagtgaaactatcattgtttgactgggtctacccccactcacccctgaattgactgaaggctcttagtcctctggtcggaccctgacaacccttcggcgacagcaaaaatcacccctctaaagctctgaaagcacctggtaatgcaataaccaggtaaaagtctttaggatactcggcagttttcttaaatgtgaggataggctaacaccccagtttcagtggaatcccctggaactcgtgcagtttggagagcgtccccatttgactgagcacttccattattttctgtcatgggaaagtctgcttctcaccagaaggaagcccttctgtaacatcttcacaggagcacagcaggtttgcccaacctctagggaattttgatcaagtactcctttgtgtccttcaggcctgggatcacataacctcccctcccccaacttctgaatcccgaaatggagatttcttgcttctcttcctccagcaaaaccccaaagaacccttctctgactttgctcttcgaacaaaaaatgagcctaggacacaaaattcctgatccctgtggctagagaaaccatcgttaaaggcatggccttgcaacactggctagcttgttaggggttgaaaaatgaacgttatgataaatggatagttaccactcaagacattaggatggtttctcataaagttactcccttcacccaggcctctgaggtgacctttaaaacaaaaggaaaaaagttttaaatttggaaaggcgagactctggaaggacaaatattctaactctggctcatctaagggcttggaagccacccctcctaaaaccaagtgtccctgatgctgtaaagaattccactggggactggagagatggctcagtggttaagagcactgactgctcttccagaggttctgagttcaattcccagcaaccacatggtaactcacaaccatctgtaatgggatccaatgccctcttctggtgtgtgtctgaagatggctacagtgtactcatataaataaaataagtaaatctttttttttttttttttacaaaggattccattggagaaagaattgccattctacatatgataaagatgtttagcccctcaatcctttaaatgccaaaaggggaaatcttcgaccccaaaaacaaaaggaaaaacctacaaaatcttgtgggtcactaacattttggaaggctcacaccccaaactcaatataaatattgcagaaaaccatttaaatgcctaattgacaccggagcagatagaattattttgaagcaatctgatgtccctcagcattgggaatggatccctgggcacaactaatgggcacaagaggctcctcccaggcatacaccacaaaagaggccttcaaaggggaggatccagatggtggtgttggccttatcagacctcttatctcagacatggccaccaatgtgttagggagagaagctttagatatggtccttatcagtaacatggaaagtgaatgcatccagatagaggaatatgacaaacatccttccagggaattctaagagccactgtcagatttgagactccctgcctcaactgggtctcagatgagcttgtctgggatgaacaatggcctttaccagggagaaattagaagttcttactcagctcattaaagaacaactacaatatccatcctttccttggctgatggaatttccccatctttgcaattaaaaagagttctatgagatgggagctattacaagacctttgggccatcaacatgactatgcatacttggggatccccatggaggggtctttcccttgtctctgcaatcctggccaatactctactattggccattggtattagagattgttttcttctctatccctgtacatcccaaagattgtcaacatttcacattttcagttccccaaattaacaactctggctcagcttcctgatatgaatgatgtaggcacgatgtttctgtgcactgggtaaaagttatccttgtattattcaaatactgatttctctgtccccttgtttcaatctgggcatggcattgtaatacttaagtcaagaatctcctatgtcaagtttgtataaacaatgtttatcatttattcgtgtcaataaaagcgattacccagtggctgggcagaagatagaatatggtggaactcccaccagccagaggagnnnnnnnnnnnnnnnnnnnncagggagggaaggagggagggagagagaagagtaagacagattgagccacaaggagggaggagaggtgattttagctggagcatgaaaggccctacatgaaattattacagggattttggccgggaagtagccagattaccttagaataatgagatggatcaatgactgcctaggtatttcagtgaagcttgaaaataaatcttggtttctctgtgtcactactggggaattagctaggataaagaaaaaagagccactgtattaatttatatttactatttatactaatttactatttattctaatttactatttgtatttatattatttatatatttatattaatttatattatatttctataatcatacattaataaaaataaagataatattaatacaattatatataaatatataatgtatattaaaattactgttacagaatgaagactcctccaccaagggatggccaccagccacactatttgccaggaagtagttgctgctgctctgaaatcacatttagaaaagggaatacacacttatcactctcctggttaaacaaccactgtactaactaccacctgagactctgctccccagctcgtccgaatcctgacacttcaagcacataatggccaattgggagctgggaacccacacataactacctgtaattccagctccaggagattgtagaaagagctggcctttgagggcacctgcatttatgtgaatactgccccacacatatgcataattaaaagtaataaaaataggttttgaagataaaatgaaaagatgctcagtacagtagtagaacataacccttaataaatgttattttaagccatggttggggattcacacttgtacttacagctactaaatttgttataaaaattaattaaaaattttcatacaatatattttgattgtttccctcccttaattcttcccaaactccctcacctccctatgcactcaacttcattgtctttctctttctctctttcataacacaaaatcaaacgaaaaccctccaaaattaatttaaaaacatggaaatgaaaatcaaaacaagcaaaatgcaggaaagaaaaatgaaaattccaaaataaaatgaagcaaaatgggaagaaagaaaggagagagggagagggagagggagagggagagggannnnnnnnnnnnnnnnnnnnttaagtattacaatgccatgcccagattgaaacaaggggacagagaaatcaatatttgaataatacaaggataacttttacccagtgcacagaaacatcgtgcctacatcattcatatcaggaagctgagccagagttgttaatttggggaactgaaaatgtgaaatgttgacaatctttgggatgtacagggatagagaagaaaacaatctctaataccaatggccaatagtagagtattggccaggattgcagagacaagggaaagacccctccatggggatccccaagtatgcatagtcatgttgatggcccaaaggtcttgtaatagctcccatctcatagaactctttttaattgcaaagatggggagggggagggggagaggactgtgcctgggcatgggtcctgccctatagtatgattgatatacacagtgagactccactggagaaaactgacttgcagtttcttgagtttagtttttcagcaggtatcaactgtaaataacttcttggttagagatgggactctgtccaatttgtcccatcagtgctaggacacatctggattgaacttgtgcaggtgttgtatgtgctgccacagtctctgtgagttcatatgagttctgagactctcacaacagctggctagaccagctggaagctgcttctgcctctggttatcccaagggactagagactgcagatacttatgtaagcgctatgtgcctgagggataaaagccggatagaacatggaggcagagccatgaccttaggatcaggatgctcagatctggaagaccctgtttccttggagtcattcctcagctacagccattcttcctcctcttctgcaaagatcccagattcttgacaagacaggcttgatgacaacgccccatcaagtgctcagacgtctctcactctgtatattgtccaggtgtgattctatgtcagttatatttttttactttaatcataagataatcatacaaaacagctattattattagtttggagattgaagaaggatgattacttaaatagttctagacattcttgagctagtgatattgatcctggggttgtttgggacagagcctcggtcctggcagtcctcacaagctaggtttggacacttgtccttgatagatctgttaaggaaataggtaataatgaaaaacagaaaagaatttattcaatacagtaacatttgaaagaagaacaaagaaagatattcagtggtgtgcaagcccatcaataaatgtggcatctgggtttaaatagagggaaagaggtgggcataactacgcagtcagggtcaagatgtggccaccactaaccccctgtctaggctctcatctgtcctacaagatggtcgacaagttgttagggtctctttgccagagacaagctccttttctggttggcatcttgggaattgattgtctccataatttgaaggaaaagttgtctctctgtagtatatcttcacacctaccacacagttgcaagatcttacctcaaaaagaaagaagattctgctaccttataccatatgttattatagtgttagtcaaggagggtggttttcattgcctctgatttccacaaggtggcaggtcaacttcaaagccagatagttggttttgtgtccaagtgacaaaacctactttacttgtttaagagtccagataggaactacgtggaaacatgctttgacgagtgcatgtcatagtccaggagtcttgttatgactgtaaacactttctcaatgatgattacgtaattcagttctttggtgtccatcattcttggggaagtctgcatttgtatgaagaatgtgtatgtgtgtgcgcgcgcgtgtgtgtgtgtgtgtgtgtgtgtgtgtatacatatatatacatatatataatacatttgtatgtatatatgtatatactatatgtgtctgagtgtgtgtatactagcttagtcatggatcaccttcactgatgagtatctgcaagtcagctcacagaacactggttaatccatgaagacagtgatggagaaaccttgcaatctggaaggagccctggccttgtaatatggttaacgttagaaggcaggagactctagatcaagaatatacttggtctggagattaggtgcttcaaaaatggcaaatgacgatactggatagaaggttctcaaagaacctactcgtgcttttgaaggaaatgtttagggtaatgtgatccagaatttacttctgtatattttctgctgtccattttcatatcatttgcatgccatgttgatagcctccaatttctgcatctgaattgtcttgaatgcattgggtttggaatcagatcagtctgggctcagatcttggctttctacttaactacaacaacgtgtatgtaaatcagtatgtaattggcaaatactcctctctttgcaacctgatacttcagctacaagtaagtccttacccaaaagagttatgaatatttaatgacatgaagagtattaaaaagttaactcaataaaattcaattagtggagaaagacataaaagcatttgccctgccatactaacctgaggtggccagaagaaagatacctaagcaactacctagggtatcactaccacaaatgaatatgtgatggagagatgggaagatggagtttgtggtggtgagatagaggaaaaagcaaagccaaggggtttgtatactatggagaaatgtggaactggagactgaacagcagcaagatgaggaggccatggtggtctccacatggtcttagcccaggtctctgccacaaaaggccatgtctggattcatgatgcagctagggtctgtgtcattgtctgtggcctgagttaccaccaaaggtgaaaaccatgtggatgtctgagggtgtgctggcatgggggtgaaggggatgatgtactgatctgaatagcgcgtcacctgaggccatgggacatccaggcccaggttgttgctagggatcatgtctgg

SEQ ID NO: 44 - DNA, 1506 bp, Mus musculus
gggcagtccgtgagtagaaacaggaggaggggctgaggaagggtgcggtctgggttgccacccaggctagccgggagctacggccgaggctgatcgttcaccttcgctgagcttctgcctgggcttcgcctccgcggccccaaggattgctgtgatctcggcttgagagaaaggtggactgtcatggcctctatctgggttggacctcgaggaaccataaaagattatccaggctttagcccgtcggtggatgccgaagctatccggaaagcgatcagaggacttgggactgatgagaaaaccctcatcaacattctgacggagcggtcgaacgcgcagcgacagctgattgccaagcagtaccaagcagcgtatgaacaggagctgaaagatgacttgaagggtgatctctctggccacttcgagcacgtcatggtggctcttgttactgcaccagccctgtttgatgcgaagcaactgaagaaatccatgaagggaactggcacagatgaagatgccctgattgaaatcctaacaaccaggtcaagcaggcagatgaaggaaatctcgcaggcctattatacagtgtataagaagagcctcggggatgacattagctctgagacgtctggagacttccggaaagctctgctgactctggcagatggtagaagagatgaaagcctcaaagtggatgaacatctggccaaaaaggatgctcagatcctctataatgctggtgagaacaaatggggcacagacgaagacaaattcaccgaggtcttgtgtctacggagcttcccgcagctgaaactaacatttgatgagtacagaaatattagccagaaggacattgaggacagcattaaaggagaattatctggacattttgaagacctgctgctggccatagagggtgctggaacagatgaattcactctgaacagaataatggtttccagatcagagattgatcttttggacatcagacatgagttcaagaagcactatggctactctctatactcggccatccaatcagatacttctggagactacagaaccgtgctcttgaagatctgtggagaagatgattgaagaagatggctcccaatggctgcctgccctgatggtggaccgcctcaaaatctctgcacactgctttcatgcagcactctaaagtgcaagcaaatgcaagacagaacctgtctgcctgataggcattggcatcgttcagtgcaatggcaaaaatgaacttgattttatttcagaccatctcattcatgataagggaaattcaatctagaattaaagacctactaatgattttctgtttggcttaggaagttggaatctgtgtagttcaaaaccattaaacataaatcaggatactaaagatggctgcctttcctaattgtaatttgtgtatttgttttcagtatctactaatactgtatgttgcctggtgccaacaaatatttcaaaatacatttgttgtaaatgctc

SEQ ID NO: 45 - protein, 330 aa, Mus musculus
SFTFAELLPGLRLRGPKDCCDLGLRERWTVMASIWVGPRGTIKDYPGFSPSVDAEAIRKAIRGLGTDEKTLINILTERSNAQRQLIAKQYQAAYEQELKDDLKGDLSGHFEHVMVVTAPALFDAKQLKKSMKGTGTDEDALIEILTTRSSRQMKEISQAYYTVYKKSLGDDISSETSGDFRKALLTLADGRRDESLKVDEHLAKKDAQILYNAGENKWGTDEDKFTEVLCLRSFPQLKLTFDEYRNISQKDIEDSIKGELSGHFEDLLLAIEGAGTDEFTLNRIMVSRSEIDLLDIRHEFKKHYGYSKAIQSDTSGDYRTVLLKICGEDD

SEQ ID NO: 46 - DNA, 78728 bp, Homo sapiens
  misc_feature (1)...(78728): n = A,T,C or G
taagtaaaatcctctgaaaaccacgggagcctctgcctcctcagccacagagaactccctcctacaaagggggagactgaaacccgagttaaggaggggcctggcaggcgtatcagagcacattagtgatgcccttcaccccagggaggtgtctgttcccaactagtttatgtggcactgagacatccatccctgaccaaggatgctgcgaaacaggatcaatgtactacggccttttaattcaacattgccataaatgctttaaagaaaacccaccacactttcctcctactccggtctttgcccgttcctgtaacagacaatcccatgtcctaggtatggttttttattctgttagtgcttcgggaaagtaagtgattcatttgaataaggcaaattaggagaaagcccaggttggggtgaaatcagacttaacagatacatgctggttctccttgctgtgtgtgacacagcagacagaggcactattcctggtgcagtatttcagggatttctctttgaggggttcttttctggtagctcaggcaattatttttaccatatcagcacatgacaaggccatgaacacatggctctaaaataatttagtgttcaagtatcagcttaactattttgtgtaggctacacacagcttgcttttgtttctcttctgtttctgccttattggcggaaacataagcgtgcatgccatgttgttttgaattggaggcacaatttcattattcgagagtaaaagacatgtcctcttttgatgcatggcacaccatagtcaccaagcaaataacagagccttcacattgtgtaatatttgtatgagaatgactcaagctctttgagaacattccaaactagtaacatttcgctactaaaagctagaaaggatgaactgtgaaaggttctaggcagctctgtgagactccaagctccttgaaagtaggacctttgtgagccacgcctttcattcttcaacagtgccttgcatgtaacaagcactccagaaatgtttgttgaatgaatgaatggtgtcatgggtgaatgatggggagtaaatttaggaaggggaagtgagagagtatggtggcaatatcacaagggaggagagaggaaaacaattatcttctctacttggattatgagataaccttttcttggaggaaagaaacaccgctttacaaaggcatgactctggcggtggtcctaaggaagcatgagcagaaaattcataaaaatgtatcatcagcaggagatgagactatgaattggcatccagaacaggagatttagagcaaaatctaatttagcattctgagatgagtgtcaggttttcaggagagaatgagttggggtgagcccagagtctgaaactcctgactggtcaggtgctacttaagaccagcttgggcaattcagggcagaactcctgtatcagcctcatggacacccagaattggtatctcatggctggagagctgatcagccaggcacagaatctccagaacaacctagagagtgaatgctaatttgtagagcgaacttccatttggcccattatttgtaactgtgtaactgctccaagtgccagaatgcttacacgttaaagcagcacctttccatttgcccacatattcttcttgcacaccccttccattactgctgaataggacattgcatgggaagagtacagaggtggcagaatgaagctagagtgggaaggactaaagactgagccccagagtgctcccagcaaccgccacgtacaaggtctgaaatgacaagggcaagagtgagataggaaactgtgtgtgaaaggaaagcccttgcagtatttctgcctccctttctttctgcctttcaccccactaaatgtatgttattgaatgccagtacttctctagtggatgcacacttgttaaatagtgttaagagatgtggagatgagatatacccctttgatgtagaattattcatttggtttgtttcatacttcattataggaatcaagtaatttgatgactaatgtggattatatttcagtcaaagctctgctttcaatttctctgatttgctcactaatgccttgtgtgtgttttactaaccttttatatcttgccttcaagtgagaaggaacaaacaactctcagtggttactacttgcttttatatgctggctgtgaaggttaaaagaaagaatggtctgtaccattctgctttgctgcccttttattgtaccccaggcctcctagaggactcctgcagattctattgttgggtgggaaatagtgttggaatgtgtttgcacagtcttatgatattcagtctcagtctgctataggtatttgttattcttggatactacacacctgctcagactgagtaaacatttgtggtgctgtcaacctgatttcttgactctcaaatgatttttgtatttccaatatgaatttgtgtgttatgaatttctgatttctccaatagtatatgccactatataaatttgtattaataaatgacagtcttgttggttttttgtttgttttcctatgttctttttagattatatctcttatgaatatagacattgccattaagatgccaaaattcattctaaatttgaagcggtcttctggagaaaacccttctaatgagggtgaatctgagacgctcattaactgtgttcagagtaagatgctgaataaattatatgtttccagattatcataggtctttggcaatcagttgaaattctgagacaaagaggaataattaaaatttccatgtgccatataataagatgatttttgtatttattatcaaaacttctaaagagacatgatatagtatgagggtggcttatgtccttctgtgcacatgcaaatatttgagcatccatcactgaccctggaaaagaccaaagctccaaacaagagtttataggctcatggaaggaaaaatcagagtcaaaatggagctgtacccagctggtctttgcattctgcaagcctgtgcatttgtgtgcctttcccttctgataaaacaaataactgccaataacagtgaccagcagggctctgttggcacgtttgcaaactcagcaagacttgagaaagcatgtttatagaaaatctggggaagggatgccacaaccaattctggaagttgctgagatgctgccaggagcttaatgtaaacttccaatcctcacaatttcctgtgattatccgttgccttagagcagactctctgccctggagttcacttctctagagtgcagagaagctgtaccaggaattaatctaagaattgttaggattgtctataaaaatgcttctgagactggaaatgtcatggccataaaatttagggatcttgaggaatagtggcagaaaatgagttcccatttagaatttaaaatgcctcatagactgcttttgaagaaatgcactgggagtggtggaaggagactatatttggaatatgttattacattcaactacatgaaattgatttgataggttaaaaatagtccaatatcaatagttttgtatgtctcaacctaatattatgataccacaatatgtaatagagattctgtccccaaatgagccacagagaactcttaactagaaccctgtgtgctgagagtagctaatgccccaggactgttacagggactatatcaaatgatatattgggcatatctggcaatgctccgatcaagaacaatgactcacttatattctgtacctcattcagtcttcataacaaccccgtgagacatagttgtcctggataagttcctttgaaagtttcatatgaatttcagaatttcaaatctttgaaggccttcacaagcacaacttgatgttgctttaaaatggtcccaactcctatcacctaaatttaatgcttgtcatgaaaaattacatcacttgattaatacaacaaaatagacctatgctgcaaccctctctaaaaaagctagcagaattttatccctaggctcattttggtttaaggccaagttccaagattactcagcaagttataaaagttattagaatttcggtctatgggataattttcataaattgtgaaaaactagtatcaagatatctcagttccaagactactcagcaagttatagaagttattagaatttcagtctctggaataattttaataaattgttaaaaactagtatcaagatatctcccttaaacatcccactaaggaatgctttaaaaatgaaccagtgctggatactagcaactcccaagagtccctctgcggctgattctgttgctgcacactgaatctgccctgccctgtgctctgggaaaccgacttttcatcaactgcttcttcaaggctcccttgcctcttgcttctggttgaggttggccaagtggaaccactgatgagagagaagatgatgtgtgtttagcctcctccctgcttccttctgccttgtgattctggggtggctgcatccctccctggccacaggtgtcacgggttctgatgaaaccccttccctcccttgcccacgcaaggctagtcatgatttcatcctgtccctagtccttggagactatatcatccctgtggatacctaaccgaactctgcccatgcgtttgtaaatagctcctttatttgactctttattcagaccctttaagtactctgtctttctgtccaaactcttacacagtccttaaattcagtgccatttggttccacttctctaatgtaaatcaaaattaaatacttgaactcaaatcttgtctcaattttaaatttgcttgttattataaagagtgatgtgctgataaatgcttcacaactgacctttcgggtaaagggaagctccatttacagtatttcctagtttttgtgttgtatatactcccattatggctgaatacaacccattagcataatttcactgaatgtggagttgggaagagatgcacagtagtaccactttatgcactatttttcttttcttttttttgagtcggagtttcgctcttgttgcccgggctggagtacaatggcaccatctgggcacactgcaacctccgcctcccaggttcaggcgattctcctgcctcagccttcccgagtagctgggattacagacatgtgccaccatgcccggctaaattattattattattttttctttctgtttttcttggttttttttttttttttaagatggagtctcgctctgtcgcccaggctggagtgcagtggcgcaatttcggctcactgcaagctccgcctcccgggttcatgccattctcctgcctcagcctcctgagtagctgggactacaggcgcccgccaccacatccagctaatttttcgtatttttagtggaaacagggtttcaccgtattagccaggatgtcttgatctcctgacctcgtgatctgcccacctcggcctcccaaagtgctgggattacaggcgtgagccactgcgcccggcttatgccctattttcaccacatggatgcaataaacacaacctggaaagcatcactaataataaaatgtcctctccccctccccctccccctccctctccccacggtctccctctccctctctttccacggtctccctctgatgccgagccgaagctggactgtactgctaccatctcggctcactgcaacctccctgcctgattctcctgcctcagcctgccgagtgcctgcgattgcaggcgcgcgccaccacgcctgactagttttcgtatttttttggtggagacggggtttcgctgtgttggccgggctagtctccagctcctaaccgcaagtgatccgccagcctcggcctcccgaggtgcggggattgcagacggtgtctggttcactcagtgctcaatggtgcccaggctggagtgcagtggcgtgatctcggctcgctacaacctccacctcccagccgcctgccttggcctcccaaagtgccgagattacagcctctgcccggccgccaccccgtctgggaagtgaggagcgtctctgcctggccgcccatcgtctgggatgtgaggagcccctctgcctggctgcccagtctggaaagtgaggagcgtctctgcccggccgccatcccatctaggaagtgaggagcgcctcttccgggccgccatcccgtctaggaagtgaggagcgtctctgcccggcagcccatggtctgagatgtggggagcgcctctgccctgccgccccgtttgggatgtgaggagcgtctttgcccggccgccccgtctgagaagtgaggagaccctctgcctggcaaccgccccgtctgagcagtgaggagcccctccgcccggcagccgccctgtctgagaagtgaggaccccctctgcccggcagccaccccgtctgggaagtgaggagcgtctccgcccggcagccaccccgtccgggagggaggtggggggtcagcccccaccaggccagccaccccgtcccggagggaggtgggggttagccccccacccggccagccgccttgtctgggagggaggtggggggtcagccccccgcccggccagccgccccgtccgggaggtgaggggtgcctctgcccggccgcccctactgggaagtgaggagcccctctgcccggccagccgccccatctgggagggaggtgggggggtcagccccctgcccggccagccgccccgtcagggaggtgaggggcgcctctgcccggctgcccttactgggaagtgaggagcccctctgcccagccaccaccctgtctgggaggtgtacccaacagctcattgagaacgggccatgatgacaatggcggttttgtggaatagaaaggggggaaaggtggggaaaggattgagaaatcggatggttgccgtgtctgtgtggaaagaagtagacatgggagacttttcattttgttctgtactaagaaaaattcttctgtcttgggatcctgttgatctgtgaccttacccccaaccctgtgctctctgaaacatgtgctgtgtccactcaggtttgaatggattaagggcggtgcaagatgtgctttgttaaacagaggcttgaaggcagcatgctccttaagagtcatcaccactccctaatctcaagtacccagggacacaaacactgcggaaggccgcagggtcctctgcctaggaaaaccagagacctttgttcacttgtttatctgctgaccttccctccactattgtcctgtgaccctgccaaatccccctctgcgagaaacacccaagaatgatcaattaaaaaataaataaataaataaataaataaataaaaaataataaaaaaaataataataaaatgtgaaataattaggaagtggttaattttgagtacctattacctttgcttttaacgtaatttattcaattgtatttatttaacttgtaataatgtctacattaatactggctgtgaaataactgaaaattcaggaactggctttcacatgctggtataacccagctccaacacatcactgtaacagcagctatgtattcaacagccacaatcacgtagtcggtctttccttcacattttaccatatgttctaaatatatctcaataactttgctttaaaaatttgtatttggctgttaaattgttcttttgatcaggatgctataggaaaattccctttttactaacctgtaaagttctgtgtattcagaataatgaaacttttattaaataaccttttctgaattctttttctggataaccataaacctggattctaacagcatcctctaatatttccttccaagaaaactcatcctttggggaaaaaatagttttataatatgccatagcatgtttctaatataaatggtggtaattgggctgttgatacaactagaaaaactcaaaaaatgataaaagtgcatttgttaaagttaccatcaggaaatcaaagaagttaaatcctgaatggtttaaacaattaaaataaagcctacatgtaaaacatcacctgttactcattttcttctggctataaatctagccctatgacttcctagttgcctggaatacaactcgtagaacttactgagtccctctgagcctgtgtctgtatctgcaaaatagaggcaatcatacctaatttacagctagttggtaagcatgacatagatcacgtacgtcaagtgcattacccagtgtctggcacaaataataataaatattttcccccatttcatgctaatctcagaattttttgaggtaacatgggatttaacagtttattgtggtgaagtctgaatgggagtcaggaattactatgcagaacagaatgcagaacaccatcctatcttctctcttgcagaaagcccatcacttcggatttgtagatctgagagggctcccagggcactggccttttaagcatgaccacttctgccttctccgttgtagctcctcttaaaccagtggttctcaaactttaggatgcatcagaatcacttgatggcgcagggtttcagggaatttgcatttctaatgagtttctaggtcccaggactcagccttaaggaccaagactgtaatctcttcaactcacactcaagcagctccagccatgcttatcctctaaaaatcctctgtgctccacctgttcaccctacctcctctcaactcctagaaaccagtgattttttttactgtctccgtagtgttgccttttctggaatgtcatatagttggaatcatagtgtgtagcattttcaaatgggcttctttctcttaataatatgcatttaagtttcttccatgtgtttttatagcttgatagctaatttcttttcagtgctgaataaaattctattgtatagatgtatcacagtttatttatccattcacctacgaattacatcttggttgcttccgacttttgatacttaggagtaaagctactataaacatccatgtgcaggtgtttgtggaggtaagttttcaaatccttcgggtgaatacataaggggcccagtgatgactgagtgcaagcaatactttttacttacgtggtctcggataaatcacttcacttttctaagcctcagttttctcttctgcaaattgtgataaaaatagcacctcctagagttcccttgaagataaaagaggtaaggtattcaagcacttcaatgcctgatactcaatacatggtaactttttctacatccttcagcacacaactgctcataattccctcatacgagtagggctttaaccttttagcctcgatgatttgttttgctcttccaaatgcctagaatgcccttccaggttaccgtctccctgagcctttggttggaatcctcataccagagggtcaacacgtttagtagaggaattactgaaatagttgggttccaaacactagctctggcatttaccttctgtgtaaattggctgaagttacccaacgtctctgtatctcaatttcctcatctataaaatggggataatagtatctacctcatagagttgttgtcggagccattttaatggcaaaaaccgcaattacttttgcaccaacctaataaatccgcgcatattcttaaagaagttagaacagtgcctggtacaaagtaaatgccagatcaatgttattaatgttaggtgtccgccacctatgccacgcagtgagttccttaggtatagggacagtctaatctccgaatccacactgcctagaacaaaataagcattgcagtacatttgagaaagtaaaggtgtagtggaaaccgagagcgaaatgagggcgtagggagaaaagggtggggaagcttagagaccggtgagggagcagagctggggcgcctgtgtacagggatagagcccggcggcagcagggcgcggcttccctttcccggggcctggggccgcaatcaggtggagtcgagaggccggaggaggggcaggaggaaggggtgcggtcgcgatccggacccggagccagcgcggagcacctgcgcccgcggctgacaccttcgctcgcagtttgttcgcagtttactcgcacaccagtttcccccaccgcgctttgggtaagttcagcctcccggcgcgtccccgcgagcctcgcccacagccgcctgctgacgggtggcttggggaggtcgcggcgcctcgcccagttcccccgcgagtgcagctcgaccctgggcagggctggcggctggcgcccgcgcccggccccaacccagctgcgtgggtggggagctggagggacctcagtcctgcatttcagagtcgaggagactgggcccacgggggggaaagtgccgtgccatgggtgggtcacccaggtcttggtggggcccaagctgatactcagctgtcctcgctccctgaaagcttcgcttattacagctagcagcgtaagggatccacttagccatctcggcctccccagtcctaaaggtctaggggacagaaaaaagctgggagtcggaaggttcctcgggtccccggcatggcagacggggctggctcagaggtctgctctgtggacttggaatcgcacccatcctgtgagcatcttctccccctcacataggcaatttattttattttacttattttttttagaaggtagaaaacagtggatttgcatattgagggttggaagttcaagaagtttgctttttcctgaaaagactaaccgttttctttgcaacagaatcctattgactagatatgaatcattcccttggtatttgagtcaccaggtggaagatttggatacttgattgcagatgaccatatataggaaagtatgcaggtgctgggaggttctgggtcgctggaggcccctctggctactgatacgaaattgcatagcccaggccgaattctttccaaggatttgtgttcagcactgacagcaagaccctgccctccgggaaagatacatttactatgttcaccaacatcattttttaaaatgtaactaattaaaacgttactccatgaagataccacctttggttttcacgaagacggaaaacttcagactgaccagaaagggaatttttaaatgtaaagaaaaccagaatcttgttcccagaactatgtggttgtgtagagaaacctgtttagaaataaccgtagaggaggaagtaaaaggaaatgatgtaatccctttcaggaaaggatatattgaaattctgtttaagtcatttggccttcgctgtggagtaattctttacatcttaaaagttaaatgatagattagtaataattcttaataattttccagttctgctggatcaatgcatattaagtgtcagatttggtcaggtgtgggccaggcagcagattaaggcagaagcatgggggttaggttcatacctttagagtctagctgcctagatgcagtaggggtccactcactagctgtgtgactgtgggacattaccatacctctctgggctccagcttcttcatatgcaaaacgaagatgtaatacctaactcactggatgattgtgcggcttgtattaaatcattcatttaatcaataagttttttttttaaatatctaccgtgcaccagtgcacacagataagaagaatctccagccctgtgaaactgacctcgttcaatgctggcaacacccccttcttcactttttacagatgaggaaattgaggcccaaagaaattgtgtttagctttaagaggcaaaatgagaaccaataatgccttgttttcactgtacagatggtttgacttctgatttttagacttcagaatagtttatctggctgtaacccctcataagtcaaagagcatgtatttagagagatgcagtattagactctaactggagagttgactgccctaggctacagagagcctgaaaaaaccaaggtgaaatatttccagagactaatagtgtaatttcccattgaacttttctctgggggtgtcagggaatttttagaatattttgttcccaggaagggtgggagcaacttgcatttctaaatcaaccctggagatatgccagcatgtttgaataatatctatttaagaaaaatgtgtctggcttcccaatcaaagaactgtgcctttcacctctgcaccccaccaaggactggaccacctcctcaaagagcagatgtgtctttataacagactgtaggcttggagccttgtaaaatgtacatggagtttcacaatcaagcacaaggaatccaactgaaggcagctaaactttgtgttgatttggtgaggaggagtaaaatcctgtgtttttgttgttattgatccccgtagtggtagcctgtcagtaatcagcagagttctcctggactttaaataagtcaaaaattggcttttcaggaagtatatttgtaagcatcttaagtacaaagatttttttctgtctcttgtcttgaagtcctcacaggtctagcacagtcccttgcatatggtagatgctcagtaaatgtttgtttagcaaatgggatacccaatgtcagatatatgctcttcctgagaaggtttttctgtgaatgttgacatctgttttctggattcaagattaagggttggactaagattattgtgttctgaatcacatattgataccatttactaattgttttcttttaatagattagtgtgatctcagctcaaggcaaaggtgggatatcatggcatctatctgggtaagtaaaaattaagccttcacaacacagtaacatatatgagtcaaaccaaaacacagaaggtcaagatagcaaggaaaattttaggaaagtttttaagtttatctggcaaaattaacatgctagaaaagccagaggatgtcaaaaataataaaatatttttaaaaatgcattgtaaagttacatagttaaaataacttatgatgacaccaaggcggaaaggtcaaaatcagataataaatttagtatataatttgggaatttattatatgaaaaagatgacatatcagagaagaagagacggattattcaataaatgttaggaaaacttctagctgtttggggaaaaagtaaatctgtattcctttttctccttacaataaaataacttccatgtggataaaatacagaaatgaagaagatgaaatatgaatgggccgggtgtggtggctcacacctgtaatcctagcactttgggaggccgaggtgggtggatcacctaaagccaggagtttgagaccagcctggccaacatggtgaaaccgtgtctctactagaaatacaaaaatagcccggtgcgatggcagatgcctgtaatcccagctactcaggaggctgaggcaggagaatcgcctgaacctgggaggcagaggttgcagtgagctgagatcatgccactgcactccagcctgagagacagagtgagactccgtctcaaaaaaatagaaaaagagaaagaaatatgaatggattgaagaatattcttggagtggggaagatgcttacaactgtgacacaaaaccaaacgcctaaaagaaaaatattgatctattttaactacatacaagtttatcactatgacagccaacaatcccattggtagaggcagaagacagctcgcagggaaaaaatatttgcagcacattagacaaaagacttatttccttaacatacaaataacttgaataaattggtttaaaaaatgaacttgacagaaaaagttgtaagggacataaacaggacataaaaagaattataaatgtccaataacatcagaaggtgctacaaggttggacacagtggctcacacctataatcccagcattttgggaggccaagatgggaggatcatttgagcccagaagttcgagaccagcatgggtaatatggcaagacccagtctcttaaaaaaaaaaaaaaaaaactttaaaaattagctgaacgttgtggggtgtacccatggtcctagatacttgggaggctcaggtggtaagatcgcttaagcccaagaggtggaggctgcagtgagccatgttcataccactgtactccagcttgggtgacagagtgaaaccctatctattaaaaaaaaaaaaactcctgcatctcagaattgaaaaaaacataaatatcatgatgagaaacacttttctacttaagagattggtgaaggttaaaaaaaaaaagtaatgtagaggatgtggcaaggtgatatttttattctctgttcatgggagagtaaatttggtacacttttggatagtattttggcaatatctctcagtccttaaatgcacatgtcctttaaacccagtaattccacttgtgggtatgtatcttatagataaacttgcataaggttgaaaaaataggggcccaagtacatttgtttgtattaatgaaaacaaacatgcagacagcataaatgtccatcgatagggtaggaataagtaaattactcatttataacttacaggcatttttatgtgatcattaaaatgaatgggaaaaaagtggatcagctgtatgtgaattgacattaaaaaagtcccaagatgtaataatttaaaaaatcaacttatagagtaatatgtacagagggattctgtttaaaagaaagaacaaagaaaataaaaaatttacggaaagactattacatcaaaactttgtggaaaggtggaattgtgagaaaggaattttacttttcaatatatcaccttctgtactgtttgatttttttttttaatcatgagcatacattatattttataagtaaggtggagggcaagtttaaagaaaagcctgtgcagagatgtgaccatcccttggcctggcgtatggatggaaggtgtgctgttggaaggctttgtttggcccaagttactcccttctcactggctaggaggctaaactctcatctttcatctgaaatccctgctgcttttatgaacatatcatagaatcagatgaaaaaagcatctctccaaaatgctggtgttaaaaaaaaaagtcgccctctggccctcgcccatgagtaaattaacatggaattatttgggcaggctctcctgctgacaccttcaaaggcgtggcacatttctgaagggctaggagagacccaagtgcgtgtgatcaagggtgtattcatttcctattgcactatgacaaattatcataaatttagcaatttaaaacaacatccatttattatctcacagttctatatgttagaagcctgaaatgggtcacacagcactaaaatgaaggtgttgttgggactgcattcctttctggagactttgggaagaatcctcttccaagcccttttaggttgttggtagaatttagttccttgtagttgtcgaattgagttcttagtgcttgctggctgccagcagaagctgtctttggctcctggaggtctctgcctgtccttgtatgtggcccctgcatctcagaaccagcaatgatgcatcaaatcttacttatgcttggaatctctttggcttttctttctgggggatctcttttctgccattctcttctccctccagctgaagacatttctctgcttttaagggtgcgtgtgattaaattgggcccacctggataacacgggctaatccctgtgttttaaggtctggaaccttaattatgtttgcaaagtctctttcatcatgaaacacaatacattgacaattcccaaggattatggtgtatacattttaggaggctgttgttctgcctaccacaggggctaggagtatggctacatcagggatggtagcatttggcatcagatagcaggaaagaggtggggaggggccaaaaacaggaggctaacctgagcctggagggcaaacccacacgtggagaaagaggccctagccaaagaagggctcctactgtctctgggtttttctttcttttttttttttttcctgtttacctcctctccctcaattaaagaactaatacttatgagtggctcagagagcaaacattaggaacaactcagaactgctatggaaaacaagatagcaattctccaaaaaattaaaactagaactaccacatgctccagcaatcccatttctgggtatatatccaaaggaaatgaaagcaggatcttaaagaaaggtatctatacacccatgttcactgcagtactttttacaatagccaagaggtagaagcagcccagtttccattgacagaagaatgaataaacaaaatgcggtacacacacacaatggaatattattcagtcttttaaaaacacatgttgtgtgagaggaagaaaaccctgtcacatgctactatgtgggtgagccttgagcccagtatgttaagtgaaaaagccagtcccaaagagacaaaatactgtatgatttcattgataagaggtatccaaagcagtcaaattcataggaacagaaggagactggtcgttaggaatgaataaggaaagagaaaaagaggagttgtttaatgtgtagagtttcagtattgaaagatgaaaaagttctgaagatgtttcaaaacaatgtgaatattctaaccactactgaactatacacttagaaatggttaagatggtaaaaaccctcagatttccaattgtaaacattcttatcacaaagttttatgtgttctttttttctctctgccacacaaaaccacatacacactcaaacataaataagcaatcaagtcattgcatttctacaaaactgtatacgtgattatgtgtatgattaatttattacagtggtatgatcaagggagaagtcattagttgcaatttcaacgcattaccattgaagatgaaagaatggctggtttcttaggtcttttatattctatctaggagtgttgcaaccctaccattgtttcagatgaatcaacaatctatgttgcattagtatttcctttgtttgcaaattttgaatatctctgttcagacatatgttctaccacttcacccttgatgaaagggcctgatatcttattggtttgtactccttggacttagagtcccttgtcatatgttgcctgtaggtccacagcaagcactcaggaagcccacaaattagaatgtcttagaacgtgactttttattaagctaccacagcagtattttttctgcgtaccttctgttatacaatgctggctttcttaggtaaatactctgagctctttcctccttgatcaattcctaacttacatttacagaataataataaatgtaattcctattagtttgaactctcaaattagaatttttattatggtactagaatttttctttctttatttctttatttttttttgacagagcttcactgtcattcaggctggagtgcagtggtgcaatcacggcttgctgcagcctcaacctcctgggctcaagcgatcctactgcctcagtctcctgagtaggtgggaccacaggcatgcccccaccatgcccagctaatttttaaaatttttttatagagatgggaattcactgtgttgcccaggctggtcttgaactcctgagctcagctgatccacccacattggccttcggaagtgttgggattacaggtgtgagccaccacacccagtggtgctaaaatttttttaaattaactcacaatcattgtaatcaccatgaactgttagtaacatcctaacttgggatacattctcctttcaccactccaaactctaatttacaaaatgaggaaagggaatatagagctactctgcaaccaagggataagagaagttttataaaaatatattacctaaatacaatgcctactaactttgttttgaagttcatccaaaacagttaaacaattaaagcagcaagtacctagtgcgacaggctctgctgggagcagaatgaagacagtctaaccaaaattgtaactctccctttcagaactccctaatcatttaaaaggtaggctcttgagcaaattgcttagtctttctctacttcagtttcctcatctataaaacaggtagggtaatagtgcttatctcatctacggtttgtaagcattaagccagttcatgtaaaatgtattagcagtgcctggcatggagtgagcactcaataaatgttagttttaatcagcatgatttcaatatattaattttattctaaaatgtatttcttgccaaataatatcgctgcaactgtttttgtagaggggcttctgcctatttcctgggcctgattttattacacatcaatagccccctctccccattggaatggttctttcagccatctaaaagagatgtcatgtcctcaatcagattccttctgaccactcttgttttcaatattttataatattttaaacacatatatatttctaaagacataaaatactccctttccactcctagtgggcatactggaatacagttctgacactaactacccagcattagcatcagattccacaggattaagggttcagtcctctgcaaaactgccctcacttcagatgtcagttcaagtgtcgggaatcacctgcacttctggccaactggctataaatttaggagttttcatgaccctctgaaattaaagaattccctagaatgattcacagaactcactgaaagtgctatccttatgaatgcaagtttattatgagggatacccatgggcaagctctggaagggtcctggacccagagcctccatgccctctccctgtggcatcagggcacctcaccctcctttgtgtcagtgtgttcaataaccaggaagctcctctgagcctcagtgtccagaattgtaattggagttccattatgtagacacgaatgattgattaaattatttgttacatgattgaactcaatctccagcccctctttcctcctcagaggtctggctgaccagagttgcaaccctgtgatcacagggctaatctttctggagaccagccatcattctaaggctatctaagggtctaccatgagtcaccccaattgcatcacaaagtcactcctatcactcaggaaattccaagggtttttgaagctctatgccaagaaccagtgcaaagaccagatacattcctaattatactacacatctataactcacattaaggcacacagtttccaatatatattcttttatttttgactaacattatattaaaaataaataaagttatattaataccaatggccctggctatttatgttgatcagaagctctgattgttagatgtatttttcatatatgggaaaaataggaaaatgaattaatgtttggtaataaatatagattagcaaggcagaatcattcaaaacatgggatccatatagaagataccgaaaaagggatccgcggtggtagaaatgttgggaaaggctgccaggatggacccttgcagataggaaaagctaatctatgatcaagtgttcatggtgagagaaggcacagccccccttccctcccgaacccttcctctctggtgggaacaagattggtgcagtttgacatatgaggacacagtcatctcatttccactgttaacccagaggaatggcagtagtggtagaggctcttaggaaaggtgcaatgtgctaacatgagagagaaatttgggaagataatgcctttcaaattctgtcccatagaagacaccagccctgggcatttggatgctgttgttcctgggttcaaagagtttgtgagtgtcctgtccagtttcatactccttgctttgacacagacatcccattagacctttctttcctgatgtgattgctcttctttgctatgcaaatttaaaacgtgtgaggagaaagctgtgttcatgcatgtgaatatgctgaactcctcctctggtctccctcacatctaccacatccaggaatggaagatcaagcttggtgactattttcactgaaagagacttttcacatcccaagcagaacaggcatctttcctggttaggtgctgttcaagtctgctgtgtgttttaaaccatgttccctgaagctgctttaggtaaatattggcattcagacaggtacacaaatggtcttttgcagaaagttgatttaaaacaggttagacctggatttcaaatcaaaacatttaagctttgttttgggacaaagcctggaaagtttctcatctgagtgagaacagagaggcttcctaggaatgagtggaatgaacactaaaaagctgttctttgccattctctgatgttagcccaactgtgaaggagggagggtccctcttttatatttaatcatgataaaactatagtatgcaaagctaatgtttaaccattggaaaagcctggtaaatcagaggtaaagaggaaaataaaaagctctagatcagaggaaggaatgtaaagtggagaaggtatgatttgttctcttgaaagtctatttttttggtggatgtaaagcagttagaaaaaaaagaagtatatagagtactgagcaataaaatgaatacacaggtctcacgtgaattataagagaataaatcaaaagaggagaaaattctcaagtctatcccttcattatcagatctttatttctttcatttgtaactctttgtgtttgattcagtacctcacgtaggttctggaggcatgtttaaataggagtagtgacagtcccatgtgaacagggtttaagaaaggtgaagattgcatttgtagaatttttaccatatggcatggagctctgaaaagtctgacaccggcatttgagaattattgaaagaaacaggatgcagaacaagaaagcatttttaattcatttattcactcaactaatatttactaactatcttttatatgccagatattggctctggcaacacagcagagaaagagaaataaaaaggatggcacctacattttattagggaagacagacaataaatgaagaaataaatgtacagtataaaaagacagttttaagtgctctggggaaaagtaaaggtggataataaatatgatggggggtgtgattttctgctcagatataggaggagaagtcaacgtggcatgagatggtgagctgagggaatatctcgggaaagagcagccaggcagacggaatgataagtgtaagccctgaggcagatgggcaagacacatttgaatgcaacaggaagattcccacgaagcaaaaacagggatacaagattacaaggggattgggggaggtattacaattctcttttatggtactttattatcctccaagggccacagagagtcccaagaagtcttcacatggactgttcaaggagtttccattctctaggtttactttacattaggaagcattcttaaatttgctgcaacttcttgttgggattatcgctttttaaaaaaactcataaataacccataaaataatgcatttaccatcatgtccagtagacatcatttaccttggccatttatgtaagaagtattctgcccagaatattacaaacaggagacatccctgatcccagtccctcacaggtttctcatcctcataggagtgaggtggatagagtaagtgtccccaaatcctgcaaagccagtgctgtggtctaaatgtctgtgtcgttccccctcccccaccaacctgccccttattcataggttgaaatcctgaccttcaggatgattgggcgatgggatctctggggggtgattaggttaggtggggattattgcccttttaaaagaggtctgagggagcttggtcacatcttctgccatgtgagaacacagccagaaggtgccgtatatgaaccataaagtggaccttcactagacactgaatctgctggcaccttgatcttggaattttagcctccagaattgtgagaaataaatttttattatttataagacacccagtttgtggtattttgttatatcagcctggaatgctaagacagacagccaccgttctctagccaagggccatttaagaagatgtggattctgcacttcagtgagccaaattccctatatttctccatatatccaggaagatataaattctctatatattcctgttagattgcaggacccttagacagggacgtctcccgcagaagttacacatgcacagggctgagtatgtggccagaatagccatgttagtcttcaaatctttgtgacccttggccaagagaatttggtcaagaactcttaactaggttaagcactttactttgattgtagaacaaagagataatctacaaatactggtgctagatgactcaaaagaagattaatacaaattatttataatctgctttaaacaaatacatgaaaattattctgagaaagatgttcatgttaataaagtctctggggaggccaagtgtttcaaactcaatccagatagttgggtttgctacctttgtcagagaaaccctgagcgcttggagagacaggaaggaagatgtaacagaatcaccagacacagtcatgcatttcatgtctccagtgtactagaaaacactcagcttctgaagtatctcccaaatctcccagaatacaataggaactttgatttctagactattgatacttgaaggaagcaactcatcgggcagccaaccatctagtgtagagcttggagaaagtccacactgtgagatgtcattgtcttgctttcatattcttacttagcaaactaattcacagttatgtattaagcccctatctggggactgagcactgggctcccagctggataaataggaatgagtgaaacaaatgtctctgccttctggaattttattttagagggggtggagagacagatataaacagcgagaggtattactcaatgctgagtgccctaacaatggagaggtggctgagatgcagaataacagtagaagacctactcagatcaagtgccaaagaagatctgttagagaagatggtctttaaggagaggactgaaggtaaaaatcattccagttagagagaacaacacaaaccaaggcattaaggtgggaaagagttcattgtataccagcttgactttcaaagaactgaagtgtgggaactctacctctcatctggagagagtggctccagataagagtcatgaaggtggttgggccaaaccatgcagggccctatggaccagtgtaaggagtttggactctattcagtgtgaaataggggagtgacaagatctgacttagattttttttttttttttttttgagatggagtctcgctctgttgcacagaccagagtgcagtagcacgatctcagctcactacaacctctgcctcctgggttcaagtgattctcctgccccagcctcctgagtagctgggattacaggcacctgccaccacgcctggttaaattttgtatttttagtagaggcagagtttcatcatattggccaggctggtctcgaactcctgacctcaggtgatccatcccaaagcacagagattacaggtgtgagtcaccccacctggcccgacttagatctttaacagatcccttggctgctatgtgggaaatggctggagatgggaagtaggaagtagagaggaacatgactcagatgttcaagtacgggagagcgatgattgtgagttggacaagagcaggagcaaagaacctggggaggagcgcccatgcgattatcttcttaaaataatctcagcaggccttgctgatagatggaattcagagggaaatgcaggtgaaggaatcaaaggggactcccaggtttctggtggctgatgattgctccttttacagggatggggaaggttgaggaaactgagcaaattggcgatgagcacagaaactggagccagattgcctaggttcaaatcctggctgtgccacaaactacctatgtgaccttggcgagtgtcttaaccgctctggaccctcttttttctcctctataaaatcacggtattaattgtacctacctcatagggtggttttgaggattaaatgatcaggtatatgtaaaatacaagtaagtactatgtaagtgtcagaagggggaagaaatagcttgggaggaaacaatgagttgatataggagataatcaaaacaaatacatggaggagacattgaatatacaagaccagtgctcagaactgaagtctgggctagagctataatgtgggatttttctgtatacagaagagggagtggaagaaataacccacagcaggattagagggaaagaaaagagagagccactttccactttagaattgcgtattttatagaggtcagacaaaggtgagtgcatcctggagaggcgggaagaaacctaggaggtgaggcacaggagccaatggaaggcaggctagctgtgagtgacacatgctccaaggggtcaaggcttcttattataactcatgtgtcatggaaaatacaacatcaatggcttgtttgtccctgtcttccctgatttctgaatctcattcatctttctactccatcccacaccctcctctgttctcacattccagtcctcttgctctgacactgccctgatgatgaaatcactctatttaaaaaagaaaagctgaactattcacagtagcaaaaatatggaataaaactaaggtttatcaacagaggattgaattaagaaaatgaatgtagaatactatactatactatactatagaatactactcagccactcagccacaaaaaaaaaaaaaaatgaaatcatgtcttttgcaggaacatgaatggaactggaggccattatcctgagtgaaataactcagaagcagaaagtcaaataccacttataagtgggagctaaacaatgggtacacattgatatagagaacggaataatagagattgaacacttcaaaaggtgggagggtgggaggggctaagggctgaaaattacctattgagcacagggctcactagtcgggtgacgggtacactaataaaagccaagacttcaccaccatgcaccatctgcatgtaagaaatctgcacttgtaccccctaaatatttttaagaaatttaaaaaagaaaagctgaaaagtatgaatattttttctttgagtgagcccaagaacaaatataaactttttcttcagtactttggacacattatgaacaaagccatgttgtcagcctggcatatctcagggatcccagcgtctgccagtcttgcctgctgtggacgttcagcaccgcctactccttactgccctgtgggctgcagagcatgcctgcggtggtggtgggaggcttctgtttgtgcatcatcttccataggcacagtgatcattgccagccagtggcacttctaggtgaggaggctcttaggcgaggcccccaggatttgccctgtaggaaccgcttggttaccagtatttttctctggcctttacctgctgtattagtttcctagggctgctgtaataaagtaccacaagctgctggtttcgaatgacatgaatatattatctcacagttctggaggccagaagtctaaaatcaaggtgtggtcagggccgtcctccctctgaaagctgtaggggagaacttcttagcctcttcctggtttctagtggtttactggtataggggagtaacagtaatccccataggttcttagttggaaagcacctttgttacaaaagacagattgacaagagaaaaccagacagaagtttattaacatgtgtattttgagtatacatggagacaccaagagaatgagtagttttcagaggtggctttgaatttcagcttatatagcatcttcaacaaagaacagtaaattttttgtaacaagacaatagaaaaggacctttgaatctctgtgggcagcaacttgcaggtggggcagtgaagaaaggcaaataacttgcagataaaggttagttagtacagcttgctaatataaattcttctaataccattgtcaggctgataagggtcttaaactatcttcagtctttaacctttgttctccctggtagtcaggagggcagaataccttttgtcttcataaatctttgtcctgcttttaggcaaatggaggaaagatatctcttgagtatctgtttcttcttgtcttcaacaatccttcatgttttgaagaggcacattctggtctcatactggcagctcgcagctgcgtaactccagtctctgccttcaccatcacatcacattctttctgtatgtctctgcctttacatggctgtcttataaggataccagtggtattggattgggggcctgccactgtgacctcatcttaattaattacatctgcaataacctggtctccaagtaaggccacattctgtggtactgtgggttaggactttaaggtatttttttggggagacacaattcaacccataacacctgcctcacttgactgcattttatttcagggctgtttacagtaaactttctttggttttgaaaaatgctttttactggaaaaattgaacaggaagtcttaacaatttccaagtttgattgctttattttttataatctactccatttttccttgtatcataaagcttcatgacccaacatagcatcttgacattgaacagagagccatcgtttctccccggctctttgagagctccttgtcctggagttttatctggagctttgatttgatgcctcaatttttggatgtggcctttatagggctttctgaagtgatgagtgatctggcttcaccgcatcttcaaaatgtccctgcagcaactgctattcttgctctgtagcatttggctttaaatatgtttcatatcaacagggttggcaccttctgtttttctcttccactcatccttctgaatgtaaatgtttaacttcttgcaaacacagtacactttgcataaagaaataggtacaactggcttttgtgagtcaaaaacagactggcctctcccaggggcaatagcaaacagctccctaggcccagcttggccaagcagtggcttcaaggtgtcatgtgctaaggctgacctccgaaggatgattttagaagatcaagggagattatattgtcttgaaaaagatggtttaaatgagatgaaggctagtctagtttaggagcaaagactgttggaacagaccacttactggctgtgggaacttagacaagttacttaatcatcagtttcatcatctgtgaaaaggatttattatatctaccttataagtttattgcaaggattgaataagcaaatgcaggaaacgcgcttagcacagtacttggcacatagtgattagcagcaattgttcttagtataaagagctcctgttactttccccctttatctagacattctttgctttaatttgttttccaactggcttcagcagcatttttcttttggaggcatctgaaggtcaagtttcagaaaaggaaagcaactaaatgtgtttaaatgtgtggatggaaatctgatcaaaggcaatttttttttttttaaatagactttgccaagtattcaggtgatgttctacgctagcactgactatgttaggacactagggttactggaaataaactcagccaagtattgattagtaatataaatgtcaaggaattaagcttgcagtggagcaggcaatgcaagcagtcctgtttggctgtaaaaatgccgacattcctgaagcgatgagctcatcattaaattcttcatcttccacacccataagagaattcatggcttgtttgctcatttttgctttggttttctagacagctaagaaggaaataaagcagtgcttcttaaactttattgtgtactagaatcacctggaaggtttgttaaatcgcagattctgcatcctggccctgcagttgttggttcaggaacactggggttgggcctgagaatttgcatttctgtcacattcccgggtgatgctgatgcagctgcttcaggaaccacactttgagaaccactaagatgaactccctcgaggcattgtgatgtgacatagagcagggggcattttagtcataaggtgatgggtttgagtcctggggctgtccttattagcagagctcttttaagcaaataatctctgtgagactgggtttcttccattttcaattagaaataataaaattcacctcatgaaggctcttgtaagagttaaatgtttgtaaatcactttgttcatgtattagttttaaaagatttcattaatctttgattgtaagattattttgtaagtcatgtaatatttccgaatgatttgggcaaccaagtctatcaaatgaataatgccattcgtttaaataatggaagcagttttaaatatttcactaaaattccacttcagaattcccaagccctttttcaagttggggtgtgtgtgtgcgtactttcttccccccttgtaattaaacaagttattcctcccccatttaattcttgctaagtactaaattgcataataaattgggaatttcctccttctctaattctgtgcattggcattttagcatattttgatgtgtaggtggtaaaggccagtgaaaagttcacagctggagtgcaaaccctgagttttcatgatgcatgaacaactgggatctgaccacaattttgtctttttatatttagaatcagccacgtcaatatctgcatggcacagaatcacctgggagcttcttacacatgtagaatttagcaccccatctctaaaacatatgattcagtatatagaaggtgtgtcctggtcatatacatttaaagtatcactccaggtggtacagagactgcacttcatgaaacaccaggaatggtctggaatagtctagtttgcttttaaattcagcctctgcctgcaactagctgtgtagacttgatcaaattctctggtcttcttaaatcttggtgctgtttatgtgaaattgctcactctcatttattggggctgttatgcagattataattaacatatataaagtgcttagcatgtaaagtgtgctgggcatgaagcattcaaacaatctaacattggggtagttcttttacaatgccagacactggaaggtggacaggtaagatcaacacaaaagttcctagatggatagaagtgaaatgaagccagttggctctgtgaatccataaaatatttatcaagccttggagaaagagaattcatcaaaaattatattaaagtgactaatttattttctttctttctttctttctttttttttgtgagacacggtctcactctgtcacctagactacagtgcagtgacacaatcacagctcactgcagccttgaccttctgcgctcaagtggtcctcccacctcagcctcccaagtagctgggaccacacctgcacaccaccacacctggtaattttttaatattttgtagagacagggtcttactgtgttgcccaggctggccctgaactcctgggctcaaatgatcctctgtctttggcccccgaaagacctgggagtacaagagtgagccaccatgtccagactaaagtgactggtttgttacaggtatcttcaggtcaggaacattcacaactagtttctaacttgcaattattttctaggttctaaagttcttattttagatgctataagattaaacagtgtttgagtgtattgaaatcaattattcagtctaatctaatgaatcagcagactatcatattttactgtgccagaacactaattttccattcactttaatgtgacagataatgtcctttcatgaaaatattaaacccttcaagagagccaaaatgaacccatattaatacaagacaacagagccaatactattcagtaacaggatagaaaaatgctgtttaaaaggaaatattattactgtaaagacagatttttattcaagaagttaggaactaccacataaatctacgtttactttgatttttctcaacatctttgtggctgtccttctttagtctcataagcaattttaaaatattttttctatattatggtctttcccagcttactgacatgcttctaatttacatgcttaaaattagtagtgtggcattttttacttccttgcaattcctgaagatctatgatgtcagtagagcttttagaaggtcttctaattgcacattcattaaacaaagcttaagaacagacagtcctaagggggttttcatttatggatcatttagtctgggattccccaaggacaatggtcaacattaattaaaacatcttgaagtctgtaaaccacagttacttctgtgcgagatgccatgatgagctttgaattatcacttgaaaaataagaagatttaggaaatttcagctttcttgttgctctcctgcaaatgctactttaaaacaaattttcttcagtgtcaccaagattaacacaacttactgctctagagaaccaatgttttatatttgtaatttgttacacaaaagaaaaagaggactcctgagatatggggtagatatcatattccctgtgtctggggggtagaccatcacttcaactgtaactgccagatgggttcttcctgctcactgtgcagacaaaatcagtccactgagaccatcacattgcagtaaagaaaaagtttaattgatgccaggctagccacaccatgtgggagacagagttattactcaaatcaatttccctgaaggctcaaaagttaggggtttttcaaggttaaaatggagggcagggggctagggaaggggcatgctgattggttggagatgtaattataggggtatagaaaacagtccttgtaggctgagtctgcttctaagtgggggccaccaaaggagttgctggtctgggtggggctgtccagtagtcagaaatgcaaaaagcctaaaagacttnnnnnnnnnnnnnnnnnnnntagtgatgctatctgcaagagtaattggggaggttgcaaatattgtgacctccagaataatggcaggtaattatgtaactatgcctgcatcttagtaaaattcaggcccctctcatcctcctaacttggtagacttccattaattttacaagggtagtttagcttttgggaagagctagtatcatttaaactataaactaaattcctcctgaagttagtttgccccacacccaggaatgagcaaagacagccagcctgtgaggctagaagcaagatggagtcaaccatgtcagatttctcttactgtcataattttccaaaggcaatttcagagccactcctgaagtggtaggaaggtgtgcgaattatgggtttgtcatatgcctctcatatgcatgaaggaatatgcatatgtaatacaagaaagatgtcattttgaaccaatgggactttcaagtatttccttctaggttggacaccgaggaacagtaagagattatccagactttagcccatcagtggatgctgaagctattcagaaagcaatcagaggaattggtgagtgatattttacaattcctttcttaatgttgaagcaaatcaggcaagttacaatctaaaagttcagtttgctcagattggcttactcaatttaataaattgtcaggaattttctaaaattgtgaaataacgaggaaatatatagagaacccagttttattaaatcttaacatttatcatatttacttaatattaaaaattaccactgatactagtggtctaggggagatccccaaatgccgggggaatctcaaccctggctggtatccagactcttgacaccatctagagaagaaattcaaggatgggtcaaaaaatactgaaaacacagagatttattgcaaagtgaaaaatacacactcaggaaaggggagtgtgagtgtactcaagagacagtcgtgcacaagggggtttggggctgttgcctttatgggtttctttaaccaaggggtggaatagtcatgaagattctgggaaaaaggtgatttcttgaaactgtagtgccacccctttttacaccaaatgtcggtgtttccggaactgccatggcactggtgggtgtgtgattgagtatgttaattagcatataatgagatcctaggagaatcctaggtcaaatccagcgccatgttgggtccagtgggtcttagccagcttgatccacactatgggttttcagggtcatatcagcccctagtttctgcagctatttcaacagtttccttttgctagtcatgtgaaactgctgcctggaattttctgttctcctgtgaccatcctgtattagtcctatctaaccaccaccaccactgccaccaacaacagtaataattatcataataaatcattacaaatatggcccccttggttgggcatggtggctcctgcctgtgatcccagcactttgggagggggaggcaggaggatcactagagcccaggagttcaacaccagcctggcaatataaggagggcccttctctacaaaaaaactcaaaaaattagctgggcttagtggcttgggcttgtgatcccagctacttgggaggctgaggtagggggatactttgagccagggaggttgaggctgccctgagctgtgattgtgccactgcactccagcctcgatgacagagtgagagtctatttcaaaaacaaaacaacaacaacaaaaaaacccaacacaatcccgtcagttcttcctggatttcactcttgcccctttccctagagataaacaccatcccaaattagagttcattcccatgaaacttttaataccataactacatatacatgtacatattgttatgcatggtctcaaacagcataaaatgaaatcatactgtatacattcttctgcaatatgtttttgtctcttaacattatgtttttgagatttatccatgttgatatggtgagctctagtgcattaattttaactgcatggtagtctattgcatcactatatcagaagatgggaatattgatggaacatttaaattgcctacaattcttttatattgcaatataaaaatgctgcaatgaatattcctctcatgtctcattgtgcatatttgctagcatttctctagaatatgacaagaactggaatttccacattgatggggatgcttctcttcaaatcaactagaaattttgccatactgctctctgaaatgaatgcagaaattagcattcctttcagcaatgtacaagacttccttttgctccatattctcaccaacacttgctatagtaagactattccatttttctaattaagtgtgtctaaacagtatcttatactgcatgtgtgtttgtttcctgtctctactccaatgactgatgcagttaagcatcctcacttgtgcatctgcttccactttcatatgtcaataaaatataaaatatattttatctatttttttcagttggtttgtcttctttatgattggcaagagtttttttataattcctcaatacagactttttaaaaaatattacaagccatgaaaatatttcctataagtttatggttttttttttaacattggtgacatggtttggccctgtgtccccacccaaatctcatcttgtagcttccataattcccacgtgttgtgggagggacctggtgggagatgactgaatcatggggacaggtctttcccgtgctgttctcatgatagtgaataagtctcacaagatctgatggctttataaggtggagtttccctgcacaagctctctccttgcctgccaccatccacgtaagatgtgacttctcctccttcccttccaccatgattgtgaggcttccccagccacatggaactgtgagttctccattaaagagttccttcataaattgcccaggctagggtatgtctttatcaacaacgtgaaatggattaatacaattggttacagtaatttttattgcatagaagttttaaattttagtgaaatcaagtttaccaatatttttgtccaggatttatgcttattgaatcttttctataacgaagtcataaagttagatattctcctactttttttttcaaagttttgaaattttatttttcgtattatgatcttaaatctacatggaattagtgttcatggatggtatttaaaggtgtctcattttattctatttcatgtggacatttaattgtcccagaacaatgtattgaagagctcttccttttcacactgatttgtacgtaatatcacctatgttttatgcttccctatttttctcttctctgttatgcttcatttatctatttggccctcccaacaccacattgtcacaattattaggattttataatgacactaaatatctaccaggcaaggtctttcttggctctttgccctcctctatgaattttaaaatcagcttgtcaaattcaataaatatactatattagaactttatatcaatataatattatgttttttctgcctgtttgaggtttattttttccatttttcaatgtaagttatttcttcatttatctcttgatttccttattttttttttaagagagaagggcttgctctgtcacctaggctcgaatgcagtgatatgatcacagcccactgcagcctcaaactcctggatcctatggcctcagcctctggtgttgctaggactacagatgctcatcacaatgtgtacctaatttttaaattttctgtagtgacagggtcttgctatgttgcccacgctagtcttggactcctgggctcaagtaatccttctgccttgtcctcccaaagtcctgggattatagatgtgagtcactgcacccagcctgattgccctatttatatctagtgttgaatagactgtttcatgaggttaatagtctttaaattctgtcacctctttttaaacattatgtttcttcatgaatttgcactttggcttacaggccttctttaagaaggaggttattgtttatgagcaccacttctgataggttctgagttcagaatgaggtatcataacggtgtttgcattagggatgggtcagacacagtctctgaacctgaggcatcttggcttagtttttgatcttgggcatgtttaaaaataagagatgagaaactgccaggcatacaaactacacataactgcaggtagtttggtatagttgtagtctaggtgcataggttatagagatgcagagagggggtagaaaatgagaacaaagacataaggcaggagagatcataatgagctgatacatgagctaaggggcttaaacttcatcctgaagattacaaagagccattagaattttagccaagggggtgacatgatcagattgtatttttaaacatttacttaggcagtagtttacaggaataattatatgggagtcacattaggaggtgatttaggttatccaggtaaaatatgataaggacacaggagcagagggcatgcagaggagacgacaaatttaagagatgcagataattgctataatatagagaataagataaagaaaggaatctgagatgattcccagggtttttgcctggatgactatatccatagttgtggatgagggaacataaaaagaaagacaagtcagagaggaaatacaataaattccacccagaatgtgctgagtttcagatacttgtgcagttgtggtggccggtagtgtactgacacagatgctgggtacaatacacagcaccaaattggtgctcagacccacagagcacaaatacactttaatctgattcggtatttatttaactatgtgtaagaatacaaaaccaaagacacagaaaggcagcatctttcattgggaggcccagcagctaaccaagtacacagaagcttttgcttcatcattgatgtaagctgtgtaccactgccacggaagtgtgtagatgaggtctgtgagggtcaccttgacacaaagaagttgagcattgagttccaggtgctcttttatacctctctagtcatgcatgctctaggcctgcaagccaattcacagcttcccaaaccaggtatcatcgtgggttgggaaattaattagacacaactttccacgtttttcttactactgtagtcaccaagataagaatgaccttgaggtcattcttaggcaggccagcatcagctctggcctgatgttaccttttgcttacaaacaattcattttgtatatgggtttgaaatttatgagagaggccgggtacggtggcttacccctgaaatcccggcactttggaaggctgaggcgggtggatcacctgaggtcaggagttcgagaccagcctgatcaacatggtgaaaccccatctctactaaattaaaaaaaaaattagctgggcatgattgcacatgcctgtaatcccagctacttgggagactgaggcaggagaatcgcttgaacccgggaggtggtggttgcagtgagccgagatcgtgccattgcactgcagcctgggcaacgagagagagagaaagggcgaaggggagagagagagcgagagagagagagagagagagagagagagagaaagggagggagggagggagggaaggagggagagagggaggaaagaaggaagggagggagggagggagagagagatgtggaagaaatgcatgagagagatgtggaccaaagatagaaatatatgttttggggtcagagatttgggttcaacttcttgctggaccactcagcagttgtgtgactttggcaaggaagataagttcgtgtcttcatctttagtacagcgggcccctgtgaatattaactatggcaatgaataaaagggtgtttcatgcagggcagattttcaataagtgttggttcctgttttccagaggaagaaatattttgatatcaagtatgggagagagataaaaggcaataagacagtaaccaaacctcataaaggtaaaaaagtcaagttcaaaagtagtaggttgttttgtctgatgtacagaaaggagtatttagacaatgattgtttccttccccccaaaactatccaaataaagttaacttttttttcccaaaactcaggcaaacaaaataaataaataaataaataaataaataaataaataaaattccaaccagataagatgctagaaattaaaatgccttactctctgcatttgtctcaggccattgatcattttgcttttgttcaagacaaatgttgagcataaatattgagtaaaataacttttgtttcatttaggaactgatgagaaaatgctcatcagcattctgactgagaggtcaaatgcacagcggcagctgattgttaaggaatatcaagcagcatatggaaaggtaaggtcacattaacatgacaggcagtaaagagatcattaatgtaccatggtcgctcccacatggttatgcccacagtcttctgtttcaggctgagtgtaacagaagatgccctgtgcatccagtcaggagcctggaatctgagtcgtggttttgccttgaactagctgactggctttgggcatgttacttggtctttctgggcctcagtttcttcacctgtaggataaggtttgccttagcccagtgggttctaaaccagaagtgattttgctccccaggggacatttgggatgaatggagacattctgatgatcacaaacaggatggtggggagtacttctagcatgtagtaggcataggtcagggatgctacaagcatctgagaatgcgcaaggcagccctccacaacaaagaattactaaggaaactatctgactaattctgtcttaggtaaccttttatttctcttttaattttaaaatatttatgtagttataggtttaattcattcagcaaagaaaatttagtaattaccagaaactatataagaacaagtaactttgggaggctgaggcgggtggatcacctgagatcaggagtttgagaccagcctggccaacatggtgtaaccccatttctactaaaaatactgaaattagcctggtgtgatggcacatgcctgtaatctcagctactcgggaggctgagggctgaggcaggagaattgcttgaacccgggaggcggagtcttcagtgagccgagattgatccagcctggaaacagagcaagactccgtctcaaaaaacaaaataaaaaggaaaaagtaaaagtaagacttggtctttgctatacagtttatttgtccaatgtctatttctgagtactaatctgtgttaggagatatcctagacattggaaatagactggtataaaaagcacatcctgccttctttcatggagctaacattctattagaatataataaacaagtaaataaaaataattcagatatgataagtgatatgaaagaattaaaatggttgatatgatagacagtgactggtgactggctcctgcagatagagtgatgaaggaatgtcagtgaggggttgttacctcactccccactaagcctaaacaatactaggggttctgccctgcttgatcaggagatagtatttaaggtacagaaaatataaaagccctgaagcaaaaagaaactgggaatatgtgagaaataaagaattccaatatggcaggaatgtagaaagtgaagggggcagaagaaagagatgaggctggagacaggttgagaacatgctaagccttgggtcttggtagggtttagattttattctaagggctacagggaaccactggaggtttgtaagcagaggaataatatactgcagtttttatttttaaaggattattttggctgctgtagataatgaactgtggggggaaaaggtacaaacagacccggccaactgttgagagggtctagtgaccatccacaggcacctcaggaattacctcctgggagtgttctccaggcccccaggctccattaagacacccttctctgagctccctttatcagataacatattatattgaaattttatctttgaatatttctgtttttcccatgagggcagaatgccttaggataaggactttgtctaacttacctttaaaggactagcacagagcaggtgcccagaaaacatttgttgaattgagtgaattgcctagcttcagggcaagacaacactttcacatacagagaaggtgaatgatctattggccttttggtatttccaaaatatggaagaaagatggaggtggaggggaacaaccatttctcacagtggaataggatgagagctgtgaaataagattcagctgcagtggcttggattgaggacagatggtagtgaaatttaccatttagagaggaaaaaaacactgtggcaattaaagcagagttgataacactgaatgccaccccatttgtttcagcaggaacatgccactgctgcaccccccaggagtgtggttgtgtcaatctgtgcccacagcgtttcagcaggctcagaggctaccagcctctatttcagagctgaaaataatcaggagcaggaacaaacattattcagtattatgccattgaatattgaaaatagaaaccctgttacccccctttaagcaggggagatggactgtacttaggtgtgaaaacagtgctcaaaacaatatcaataggtaatgtctgtaagaggctaaattctagtgttccatcgccctgtaggataactatagttaacaataatatagtttcaaatagctagaaggaggatattgaatattcctaaaacaaaaaaatgttacatgtttgagatgatgggtatgcaattaccctgatctgattaccatacattatatgtattgaaacatcactatgtaccttatgaataagtacaattattatttgtcagaaaaaataagtctaatgtattgccacacttagggttttcttttctttacttgttgccagaaaattgcttctgatgccacctagttccacattctcaccagagacaaatgaccagccactgtcctcccttccccttcctcttggagctctttgggagttactgagaggcaagacaccgaggaagagagcacctcccactgaagctgggcgtgaatttataagggttcctcttcctcttcccttaccccaatctaagcattgaaagcatggcggatctaggaaatgcatttgaatacagttcctaactgtggcactcatggaatcctcccatttggctctccttcaaaaaacctctacaaaacagaacaatttgggagtaattagaaaatgcagattaatattcatagaaatattttcaacacttctgtttattccctgtggatggacatgttttgtctgattttgatacatatgttcatctttcactaggtgactttagagaaagagaaaaaaagtatttcacatttttccccttggttttttgattttaggagctgaaagatgacttgaagggtgatctctctggccactttgagcatctcatggtggccctagtgactccaccagcagtctttgatgcaaagcagctaaagaaatccatgaaggtatgagccccccacaagccatttctgcccagggtttgaccaagtcatcaaaaatagtgactttcttgcagtgcacacttgtgatgggtggacttggatgcccttttggtctggactctcccagtggtagaatgactctgaaataggcaacagctatagaaccttaagcccaaatgttcctgggctggaagaattttgtcatatcctttgtttgacatgaagagtcaagttctctaatttgtcatcgttgaaagtaaatagcactatgattaaccccaacactcaagctaaaaacctagcattatccttgagcccttgttttctcttacccttccaagctcccaaatctatcagcaagttccttagttttacttcaaaatccattataaatatgtgcacttctctcaaaatccattgctactgttctagtctgaccaccatcatctcttgactggtccatatcaataggcttctaactggtccctttgcctccatttttgcccatctcaaattcattctacacagaatagccaaaattatttttattaatttattttaaaaatcagattatgctacttacctgcataaatttccaatggctttgtacgcttaaaatccaagcttcttatcatgactttcatcacccaacatagtgcagctcctgtctaactctgtgactttttaaaattctatttatatcagtcagggttccctcagagaagcagaaccaataggcaggacatagactttaaaagatttattgtaaggccaggtgctgtggctcttgcctgtaatcccaatactttgggaggccaaggtaggtagattgcttgagctcaggagtttgaaatcagcctgggcaacttggagaaaccctgtctctacaaaaaataaaaaaaaaattagctgtgcatagtagtgcattcctgtagtcccagctacttgggaggctgtggtgggaggatcacctgagcccagaaggtcaaggctgcagtgagctgtgattgtgccactgcacttcagtctgggtgacagtgagaccctgtctcaaaacaacaacaacaaaaatttattggaaagaattggaggccatggtgggaggattgcttgggctcaggagttcaaaaccagcctcaaactgagcaacatagtgagaacttgtctctacaaaaaatttttaaaaattagccaggcatggtggctcatgcctgtagtcccagctatttgggaggctgaggtgggagaatcacttaagcccagcaggtctaggctacaatgagccatgaccgtgccactgcactccagcctgggatgctgtctcagaaaaaaaaaaaaaaagaagaagaagaagaagaaagaagaattggttacatgattatgggactggttaggcaagttcaaaatctgtagagcaggctgtcaggaaaggcaggctggaactcttgggcacaagctgaagctgctgtccacagaaagaatcttctaaacagaagccttgcctctggtcttaaggcgtttcaactgattggatcaggtctgccgagaaaggtaatctcccttacttaaagtgaatcgataataaactgaaattatatctacaaaataccttcacagcaacacctagattagtgtttgattgaataagtggcattatagcctggccaagttggcacataaaactgaccgtcataccccctcctgctcacccattaatgatgtagctacactggccttttctctgctccttgaacatcataagcttattcttgttttgagatctttatacatgatgtttcttccatctggaatgcttttcctccagacattttccattaattcactcaaatatattttcttaactgcacttattactgtctaaaagtatcttgtctatttatttgtttttgagacaaggtctcgcttcattgcccaggctctagtaaagtggtgcaattatggctcactgcagcctcaacctccctggcaagcctccaacttcagcctcctgagcagctgggactgcaggcacacaccaccacacctggctaattaaaattttttttttttgtagagacagggtcttgctatgtcacccagactggtctcaaactcctgagtcaagcaatcctcctgcctcggcctctcaaagtactggaattacaggtgtaagccactgcacctggccttttctatttttaaaatccatttgtttattatcttttttcatctaactaaaaggcaaacctccaccatggcagggaacctcattggtcttggcctatatcttctgttcctagagcaactcctgaaatgaagtgggtgctcaacgtattaattaataggaaggaggaaaaagaagggagcctagatctgaggcataagccatattctgccttgccatcagggaatggagttatcttcttttctgtggaggacatatgggcatctgagaagcagatggcaagatggaatttgatgtacaggagatttattttgagaaacacctgtgaaggataaagaggcgaagagcagggtaggtggggtgaaccttcagactgcagtggtggcctgacccctatgagaggagagaggagaggaagtaggctgagattaggaagagcctcagtgcatagtgaagctccgagaaaaccttggtaggctgttggggagcccctgagcaaagactgccctttggaggagttctgtgttgggcgcaagtccagtacccctgttgtttacagtcattgactgacagccacctggagagggcatgacctcagtgtgaactttggtagacccaaaggtgtggcagttggaggctgttagctaactgcgttctttgcagctgattctcttgaagtgaaatctgagcattgtttctctatggctacccaaaggggagggtttagcaggtgtaattgtaaggattagattcaccaataagtattagaacagtttctcttttacataaaagaaatccaggctgtggtggcaccaccattatcagagactcagtctccttctatcttgaggctctgccgtctttaactcatggttttcacttcctggctaaagaaggctcatgactcagccattatgtcttcattccaggcaactcaaaagagtaaaggacaaagaagggttcactccctcactctaaggatactccctgagcatacatatggtacttctgcatatatcccattggtcagagtttagtttctggacatatttcactgtaaaagaagctgagaaacatagcctttatatgggtagcaatgtaccaagttaaaagttgggggttccattactaagcaagaaagacaaaagagatactgtggtaaactaggaatctctgctacagagagacagaattcagtctctgttcatatgctgcactggccttattcaatcaagtcttagtgtatatgacttttcttggagtcacagtgtgattcagtgaccttgatataaacaggactgagaggtaattagtccccatgccagccaggcccatgatgcacattactgaggatttgaaaggctccctgtatgaagagaatgatacatgctgatagacccagtacagtgatgcaaggatgaaatcattcaaaagtattatagagccttttctaaacatagtggaatgtttgaatgttggtagggttaatcctgttagactgtcacttctaatcttgaatgacacaggctttttcttttatactatttctttccagaattattcaattgattttcacactagagtgaaaaatttgctgtcactttattccagatgatttatgttattactaaaatatatggaaaaatagaaaacgagagcaatagagaaccttgtattgatttacttaaaagtgtcctttcatctatataaacaagataataagaccaaaaggcatgagattaagttatttaagtgttctaaaaattagattttcttttcctttttagggcgcgggaacaaacgaagatgccttgattgaaatcttaactaccaggacaagcaggcaaatgaaggatatctctcaagcctattatacaggtgtcttattttctgcttaccttcaccactgttcacacatatttgagccaatgttgcttttcctagaatcctctcaatctcttcatgaggcattttgagaagacaagacttacagaaacgagaatacattctaaaatcagctaaagactatgagtttccaggaaaaattggaatatgatctgagctagagactgctacataacaatagcattaatgctttacatttataatattacagctgcagtggattttgctctcggcaatctctcattaattgaattaaccattgtcatcaatgtaagagactcaaatcgtattttatttttaggcgttagaaatcactcagattagatccacgattttgggtgtgggaaattagattaatttagaggatgtgttgagcataaggattcaatagaagtagctaaagacctaatagtctgctggctgtgtaaaattagaaagactctgaaatgtaattctgactgtaactacccagggttagtgtgacttcacaggttaaggtcacagtccccacaagactaccttcacctcagacaccagcccacaagctcaggtgttttcaggctacacgtgcttttaaccagctggctacaaattcagggttctcactaccctctcaggttgaatagcacactagaatgacacagaactcaagaaagtgctgtgttcacaaatgcgatattatcataaaggaaacaaatcagggccaatccaatgtggagactgcatatggagatatttggaagggtccagtggaagcttccactctcctgaccattgatatatcattaccaaccagcaagctcacttgattattggtagccttagtttttattggggttttgttatataagcatgattggttgaaccattgttcatgtgattgaaccagtccacctacactccccagaggtcaggctgatattgtggctcaaagcctcaaccttttaatcatatggttgatctttctgatgtgaccagcctttattctgggtcatattgttagcataactgagctgtagtccaagagaccaaccatgaataacaaggacacacctatgacttgggaaatccaaagaatttagagtttacctcccaggaatcaggaataagaccagcccaattctctactattcaatggccccatagaaccctctccaagtactttaagggagccacagtttctctgtttgtgtctcacagaggtcagttgtgtcatagcagcttttgcagtgggagaggtccaaagaaggagtacatattggtcctcatgtaggtgttaaagaggatgctttgggagattcttgttagaaggtaaatacctcaatgtcaggtgactgttttgttattgatgtactaattgggttctaatcagaaaaacagaaacagcactaggtattttgacagatagaatgtaatataaagaactgcttaaagggccgggtgtggtgactcacgcctgtaatcacagcacttggggaggctgaggtcagcggatcacaaggtcaggagttcgagaccagcctggccaatatggtgaaatcccatctctactaaaaaatacaaaaaaagttagatggtcatggtggcgtgcacctgtagtcccagctactcaggaggctgaggcaggagaattgcttgaacccaggaggcagaggttacagtgagccgagatggtgccactgcactccagcctgggcaacagaatgagattccatctcaaaagaattgcttaagctgggcacagtggctcatgcctgtaatcctggcattttgggaggctgaggtgggcagattgcgtgagccaaggagtttaagaccagcccaggcaacatgacaaaacccagtctctataaaaaataccaaaaattggccaggtgtggtggtgcacgcctacagtcccagctcctcaggaggctcaagtgggaggatcacttgagtctaagagattgaggccacagtaagccttgatcatgccactgcactccagcctgcgtgacagagtgagaccttgtcttggaaaaaaaagaagaattgctaaacacctttcagaggactgaaaaagcaaaaagggaacaaaaggattcatgcaggttataaccccccagacctgagacaacaaaggaaagaggttgaggctatcagaaactggaagctagaatgagggacatacctggctgatgtcgggacctcaggggctcagagcagaggcttaaggagcaggagttcagatctctgaaaagagggctccatctgtaggtactggagccagtacctacacgggggtcaaagtgactttttctaggaagctggagccagttgctgctgtcggggtgaacagccttccctgggttgacactgacatgactagccgtcagatagcttgcacttctttccacctcctgccttccagtcccctctactccccagtactggtggaacctaatagggagcgggtacagacagaagtagacaagagaattgcttaatcattaatgcacaaaagagtatgttttaggtgtttaaaatatttcagttcaacaaggtttacatattttacaaaacccatcagaaccaggcactgtttcccaagttggcttggtattttctggtgtttcttagaagagccactgctccccaagtggacctgccctgtgacagatccctggagcccagcatttaggtacaaacagttccaggatgtgagctttatgaggatgaggattttcgtctatgttgttcactgctgtatcctcagttctaagaacagtggggcagataagtgcaaatatttattaaatgagtgtcctcaaaattgaggttaaggtcttaagagccaagtgaaacttttaccattcaggatagtgttgtgcagatatgacagatgataatagcacaaagttaccagagcctcaatttctatgtgagtaatgctctctgaggctacaaaggatacaactgcatcaaggttaccttggttactagagattaatgatacacaagaagatcaagaaggaaattgtctcaatcatgcatagccaaactttacagagattaaagtcacagcactacccgagggacccagttatgttgtcactctctcggcagcaggcatccattgctccccatgctaatgttttccgtgacagtaactgctcctcttcctttttgcttctaatgttcttgacaccagcaagtaacatcccctcccctaccacatggtgtttgtctacccaaggcttataaatatttgtgcatagcttttggttattcttggctactgttttcttcattatttccaggagtcttttggttctttgttattctattgtctttgtctccttttctgtgtcactcgctccctaagagagaagatacaatgggttcaggaagtcactatcatgttggccctcataaagggaccagatgtcttctacagcttattcagtacagtggcacaatagagtctaaataaagagagatctaaattcttaacttttttcggtattctaaagtcaatggtgtgtgagagagagaacactgaaacagggatcagggactcaaagttctagtccaggcacctgtactattaaaatattctatttgattttatactctactgtgcctcaaaatggataaagtagttgtcaacttaggttgaaataattttttactctaatatcccacaaaatatttgaaggaaagggagaggctgtgtgaaatgacttataaagtctcatctaaataattccaaaattacaaaatacttccccaagttctaagaaatgggatattcattcttctacttgatattttcaaatttaaagttttttatctaactagaatgaaggatagatgtaacaatatcacaaccattaggtttaatgatgcctactaaatattattatttagaaaaataacacacttttttggtggattttgcttatatgaattgctttgaaaagttacagatttcataaaaaagagacttactaaaatcatgctgaagaagtttccatctcagcgcagttcttgctattggataatctcatatcactttctataattgtctttcattgatttaaatagatgagaattctcatggctagtatggctaatttatagaattcttgagaatggtgcagacagttcagatagccacatggtgtcacctacaacaaagggtatagtggctccaagagaatcaccaccccatggatggggcagacagagatttaagactgatgggcactgcacatcacaggccatgcaaaaggggctacaactagtcagtactaaaatatatgaacacacagttggcatttgtaaagggaaatggcatgttttgggtagctttcttacttttgggagatacgaaaaaatatggtttaattatattcattaagattagggttagattcgataaaacagaaaaattacagtggcttacaaaaggtagaagtttatttctatcatatgtagaagtctagacattggcaattctaagtctagtatgacagctactcaaagcttttaggaactcagacttcttcttgattacttttatgccatcactaagaagtggtccttatcttcacagtccaagatggctgcccaagatgcagatatcagttcacatgtaaggcagttggatggaggaaggactaagatgaacatggcctcatccctttaaggagatttgtctgccttcatttcattgtgaataactaagttatagaactgtactagctaagaggaaagctgagaaagtagtttttaagctgtgtacattatatcttgcttaaggttagggttctcttagtatggaagatggccagaatggaaattgaaaggcacactagtagctcatccaccccagcttttccactatgcatcccttagtgccattgtcagatgaaataaaccaagatttgctccagaatgacaactctttctattcttttgcatctaccacaacacagtgcagtaagagttacaagaagaatgtaccatctcacaacagaaaagcatgaagaaattaaataaaagggcaagatttatcttatcacatacccattctttgctagtgttggcatttaaacttttctctgttttataatcatatttttcagtttgtcaaggcttaatttcattctgatttggtttcagtatacaagaagagtcttggagatgacattagttccgaaacatctggtgacttccggaaagctctgttgactttggcagatgtaaggttttattttttattttttaactccccagtaagctgcatgctcaataacaatttttagggagtttaaaaataaccaaactgagacaatgagttcacaattttccttatgaaatggtttgttcattttacattttcattgccaccaagcaatataatgtttaaccaagatcataaaagcatacataatgatgtaacaacaaagaaaacttatttgagtcagtaagtggaggtgttttggtcaggtttcacaattttgacattagaagacattctgatacatcatctgacatacaatatttatttccattataagtgtctccattttaaagaacaggtttattttcttctggactctgaagaataaatatttcttttgttagcttctaaattaaataggaagcatgatacagaagaatgatctttagagatgggaattaaattgagtatcagtctcaggattaaaaaaaagaaaatgattgctgcaatttcagccttgccaccttggaaaagctgccaaactattaatcatcatgtgacctaatgaggccacaccttgctttctctttttagaaggcttatgacttttattataaagatggtaaggtcaaggatgaggtgtattcacagctgtgtgtaagagagaacgtgatttaaaccatagctcaccaattttctttcagctgatttacatagcacctaaatgtgagaaaatcccaacaacggtctcagcctcatggttgaaacagcacctgtcaaagtgaggcattatgccattaggaagcgatttatctaaattatggtttcagttactttaaatgtgaaaaacttatgaaggttgaacccacaacaccaaatttatgaagcattgctgcaaacatatgctctcagaggtatatattcctaagtgcacatctgtttgtgtatggacatgaatgcacccacccacaggaggcagtatagagtagggctctaggacagggttctagaatcaaacagggctggaatctcatgctgccaactagctttgtatatttggacaagttctttaagtcttaaagcattcattttcatatctgtaaaactaaaatactaacaataacaagtactcatagggtgttatgaagattaagagaaagagagagtatgtgaagtacttagtgatcaacacagggtggtagtggttagtattatattaagaccgatgataatcagcatttatgtcattggagcgagcgtaagtgaaagagaacaagaagaaagcaaacagcagcagggtatcagcagcacagaaaagaaaccaggcaaaaatcagacagtcatacaaggacctaatgtttaaaaataggaacaaattcattttaaactattgtagctaaatgtttcattcacctataatttgccaaataattcaggcaatcccgtgttttggttttgtctcctgtctttccataatgtgcttaagtatttgtacatgaacacacataccacacacacacacacacacacacacacacacacacacacacacaccacttaaaccatagagcctttaatatcacagttggggatctttgaggactttttattttttcttttttgagacagagtctcactctgtcatccagactggagtgctgtggtgcgatctcggctcactgcaacctctgcctcccaggttcaagcaattctcctgcctcagcctccctagcagctgggattacaggcacacgccaccacacccggctaatttttgtattttagtagagacagggtttcatcatgttggctaggatggtctcaaactcctgacctcaatcaatccacccgcctcagcctcccaaagtgctgggattacaggcgtgagccactgcgccccgcctttgagttttttttttttttaaataaactttactttttagagcagcttcagatttatggaaaaattgagcagaaagtacagagagctcccatatgaccctattctactctctcctttcctttccattattattattattattattattattttgagacaggatctggctctgttgcccaggcttgagaactatggtgtgatcttagctcactgtagtctcgacctcctgggcccaagcagacctcccacttcagcctcctgagtaactgggaccacaggtgtacaccaccacattcagctaattttttttttttttttttttttttttagagcgagagaaggtctcactcttgcattaattagtatgtgtatttattataattggtgaatgaatattgatacattattattaactgaagtttatagtttacattagggttcactctttctgtgatatagttctatggattttaataaatgtataatgtcatatgtctatcattacagtatgatagagtagtttcactgtcctaaaaatcctctgtgctctgccagttcataccttcctccccaccaactactgatcttcttactgtctctatagttttgccatctctagaatgtcctatagttggaatcatacagtacgtagccatttcaggcaggctggcttctttcacttagctatatgcctttaaggttcctctatgtcttttcatggcttgatagctcatttctttttagtactgagtagtattccattgtatagaatatttattttacctgctgaaaggcatcttctttgcttccaagtttggcaattataaataaaacttctgtaaacattcatgtgcagatttttgtatggacatgttttcaactcctttagttaaatagcgaggggtgcaattgcttgattatatagtaagagatatttagctttattaaaaaactgcagaactgtcttccaaagtgactgtaccattttgctttcatatcagcagtgaatgagagttcctgttgctccacattctcaccagtatttggtgttgtcagtgttttggatttaagcccttctaataggttgtgtagtggcatcttattgttttaatttgtaattatctaatgacatacaatgttgagaatcttttcatgtgccatctgtgcgtcttctttggtgagatgtctgttgagatctttcaaccatttttaaattgggttgttattttcatattgagttttaagagttctttatgtattttggatacaagttctttatcagatacatgttacaaatatgttctcccagtttgtaccttgtcttttcttccacataagacctctgtgttgggttgggcacagtggcccacacttgtattcccagagattcaggaggctgaggtgggaggacagcttgaggccaggagtttgagaccagcctgggcaacatagcgagatcccatctctaaaaaaaatttttaaattagctgtgtgtggtggtgtgcacctgtagtcatattagctattcaggaggctgaagcgggaagatggcttgagccttggagttcaaggttatagtgagctatgactgcaggactacactctggcctggccaacagagagtgagaacctgtctctaaatatatatatatatgaattttcggaggagggaactgaggcccccaaaattgtgtgatttgctaaaaatttcatgactagtcaatggcagaaccagaactggagccctgagtacatgatttttctgtgcaacctgtcctgccttaaagaaaaaccactaagatcccctgctggttgaagtactatgtgttagaatcttctatctttaaaggatggcccttgttttcgtcctcctgtttagggcagaagagatgaaagtctgaaagtggatgagcatctggccaaacaagatgcccaggtcagtaacaaagcgggaaaacatttcctttacctattctcctatgtggctgcctttgcatttatgtgaaaagggagaaaaatagcagcaacagggacttttctttttttttttttcctgtttgaaagagaagcctgaagcttggggatcggaaccctaactttttgcctgccccagtggtagttatcattctccttggctcctgacagcccaatttttgatttctagtcttctgaaagtgagagatttagataatagatgatggcactgacctctgaaatacaactccgattcttctcatgtcacctctcaaaaagaaaataattgtgtctctaatatcattctcttgtgaatagattctctataaagctggtgagaacagatggggcacggatgaagacaaattcactgagatcctgtgtttaaggagctttcctcaattaaaactaagtacaaactcacattacaatcctttgtgttgtatgttgtttttacaaatgtttttgcatttagtatacaaagatctagaaaaacgaagtttaaaattgcgaagtctgttccagttattcacacttcaggaaacaaaatgggaaagctgtattgtaactcaaggaagtactgacactacacttttgtttttccatagaggctgagtagattacctagtgagtaccaggtaatagatgggggagggaggtggcagggagaagaaaagaggccaccctctagggtgagagtagaagggcttgttcctgtggaatggagaagcccaactgcttccactccacctaacagttctccctagttagccacttccagaaaagccagacactgcaggtgagtctctgttgacacatcaatactgattaacctttagctatttctgatatgaaggtaagtggtagaatggatcaactcttatcgtcagaccagctattacatggaattgtgggcacccgccctcttgctcatggcatctcctagaactgttctggaagcaacaacacctagaaaactaaaccttcatttactgtgaacatcttctgactgtggcttccagatgctagtttacagaacaaccacacagcaagaccaagcttatgctgagttgacggaacaatgagtaaacataaggatattactgtgactttgaaattctgaaattgttctttcttaacttttgcattaaaatcacatttattttataaaataatgacaacagtatgtgatagttgctttattcatgtctttgtttgaaaaacaaaaaccagataaccctaggtctctctccaaaatttctttttttaaaaatgtattggggaaaaatatacttggcttacaaaatatgcctgtatacttggtgacatatgtacaggttttgcttggggcaaatactgatcaagaaattcaaatgccttctgggaggtgtgaagtaggccatgccaccttaggaaatgattcagcacaaggaagtcttcagaattaagatttctttaccagagaaaacatatttgactagtgattatagtatcatttcccaggtgctgctataaataaaatttaaaatagcccaacttactggataaattatttattatttaactatttaggctatttaaaatgcttactgcttgagagaaggggaaagagaaagagagatcattgaagaaaatcatctagggagtttgggttttgttgtagatgatttccttaaaaaggaacaaaagaaaaacaaaaacttctgtgcccagattttcatggtttaaagagggagttttttagcttgctacttgatcttctgcatatcaaataaaaaactagaatatattcaaatgtgctcaactgcgttgctttaaataattttgtggtgcttctttttagcatttgatgaatacagaaatatcagccaaaaggacattgtggacagcataaaaggagaattatctgggcattttgaagacttactgttggccataggtaagacttcgagtgctggtaaactaagttactttgcacttgctttaactcagtgccgaggcctgctccttttgggcaagaatcctgactgatccattttttttgctccctacagcccccaacatggtccaggatacacacagtacgctcaacaaatattgttaaatgaatgcttgaagaagttatttttttaagtcttttttctttttcttttttgaaacaggatctcactctgtcacccaggctggagtgcagtggtgtgatctcagctcactgcagcctcaacctcctgggctcaagcagtcctcccacctcagcctcccaagtagctgagacaacaagcatgtataccacctggcccagctaattttgtattttttgtagagatggggtttcaccatgttgcccaggctggtcgtgaactcctgagctcaagcaatccatccacctcagcctcccaaagtgttgggattacaggtgtgagctaccacatccagccatctttttaaatcttaccttgctttttaaatttgtatttgtcttgtgaccatgtttagcttgtagacttcttgagagctgaaatattttatttctactggcatttttattgagctttgttgaaaactgagacgtaggcaaagcacagtggcatgcacgtgtagtcttacctacttgggaggctgaggtggaaggattgctggagccaaggagttcaaggccagtttgggcaacatagcaagatcttgtctctttaattaaaaaaaccacacacacacacacacacacacacacatgcaactaagacctaagccagtttggtaatccaccatatttggttatttatgaaagatatcagtggcttttcttttctttctttcttttttttttttcttttgagatggagtctcactctgtcacccagactagagtgcagtggcacaatctcagctcattgttgactctgaattgctaaaagataagccgaggaggctaagaaagggaaaactttcttcttcaattaaaaaagtagaattgagatcagtcttcataattagttctcagactgttccagtggtaatgatacacctggttaatttttttttccattttacattgttaatctttttttctttttttttctttgtgacggagtctcgctcggttgcccaagctggagtgtggtggcgcaatctcaggtcactgcaacctccgccttccaggttcaagcaattcttgtgcctcagcctcctaagtagctgggattacaggcacacgccaccacgcctggctaacgtttgtatttttagtagagacagggtttcaccatgttggccggggtggtctcaaattcctgacctcaagtgatccgcccacctctgcctcccaaagtgctgggattacaggcttgagccaccacccctggcctatattgttaatctttatattaattctgcttgctgtttttcatttggtgttcttgctaagccgtaatgtttgaaaaactttgttgagatgtacaaactctcattcactgagctaaggagcattcttggaaatatatcattgaataatgtattacatttgggctataatgcacattattttatcatgtaaaaaaagaccttataattcaattgaagttcaaaatatgttacactttcattttgtttcagtctaccattggaataaaccagtttataaaattttttattgagatataacttacataccataaagttcacccactcaaagtgtgcaattcaatgctttttaatgtagtcacaaggttttgcaaccatcaccacaatctaagtttaggacgttttaatcagccgcataagaaaccctgtaactattgacagtcactttccaatcctccccaccccctggctcctataatcattaatctactttctgtctctatagatttgcctactctgcatatttcatacacaaggaatccaatacaatggtcaacacatagtttttgacatgaaaaacgatctgagctgtgtcatcttagaatcgtgtaataggagcatactacttgccaaataagaacaaatccagacttaagtaaggagaggctttattcagtagaactatttcaatagagagaacatgttgatttcagaaacctgaaagactgggctgggtgtggtggctcatgcacataatcccatcactttgagaggctgaggcaggaggatccctttaggccaggagttcaagaccagcctgggcaacatagtgagagcagcattctgagactgttccaatggcaatgatagaactggttaattttttttccattttatattgttaatctatatattaaagattctacaaaaaaataaaaaattagctgggtaggttggtggacgcctgtagtcccagctactcaaggggctaaggtgggaggagtgcttgaacccaggaggtcgaggctccagtgagctatgttggtgccactacaccagagcctgagtgacaaaagtgagatcccatctctaaaagatggggaaaaatgtgcaaaagtttcaaaatccaacagaaaagtcttagcagcaacttttaatgttgggcaagcacaagggcatgatcactggggattgacaggaaacacgtctggcagtggacagctggactctcaagataagctgcaacagaggcatgttctgcattttagggcttgcccaggactggggacaagccagagttcaggaacctgtgggaggagagaggcctgatggaagtgtggtcaagacaatgaagagggtagggaatgggcaattatgaattcttggtcatggtaattaactctaacggactcccaagcttccctgcctatggtgctgggtgataaagcctccttcccactgaaacatactgccaccttccaaaactttcagatatgaagaacaaatctagtaggtaagaatataaagcagaaggcaagctaaagggaagaaaggatcatgaaaagaagggattgtacaaatctagttggcagggaggtgactggaaagcttaataggatgaaagtgggcatcattattttttatcaagctattatggcttacttaatgtgagttttactagtttaaatggttagtttcttgtcagagaacttcatgtaacagtttgattctaaatgctgtgtttgggtttctaatacatttctccttctatttcccttaaatcactcaaaaagccaaaagtcttttagctttccttaagacagtctataagccacgatgagaaagtcacttattcttgttctgagctccaaaattcattataaaatccattcacttttggttggattcctacctagagatcagatttaagattataaaaataattgtgttgctgtaaataggtttcttccctacagacttttctattcctattttctttttatttaaaagataatttactcttgcgtttttgtcagtttcctttttcttgttttatttctgctttacttgttatttcaaaataaagaattgaaggattgtattttttttttaaggcaactgaatttagatgacagatacttgttctaatggagtcactctaaccagcctataaattctaatccagtcatttaaaagaaaattctttccatgggaaaaattgcttttaaatggaactccagtgcccctgcgtgcctaatgagttatttggagcaacatcgctgcagttgtcaggcccaggttgttcatcagtagcccgagatgctagtagctgagcagtgtcgcaccctagggagttatcagggaaagcgtaggtgttcggggtgtctgggatccagagatgagtcagtcgctgtgggagtttctttggcaggtaattttattttccccatggctggagataattactgtgctaaagttctgtgcaaatatggtattaaaaggctatgaaaatcagggtaagcagcctttctttcattccaagtaaaagccagttgtggggaggggatagagtggtatgacagtccaaagaatctttttaaaaaacatattacttactatagattaacccaatttctattccgtgaagctgaacattatttgctttttgttacagttaattgtgtgaggaacacgccggcctttttagccgaaagactgcatcgagccttgaaggttggtctggaaagttcatgtgcattcttagcgtcccttaattcccttgggaaagtatgcaaatagtagaacaaatatttaaaaattagttattttaatgtaatttaaacattttaagataaattatattacagcaaatcaaggtatgatacaatacactctttacacagacacctgattttctcttcaaaataaacagacctgggtttatgaaataatttttttctaagtaggtataatttgatttctatttaactaaaacattctcattttctctaatatgatgagtttaagtagatgctaatattccacttgtatgaaagatgaaaattcatgtataatattaaattttaaaagttcatcctctattttaaatagaaaatgagaaggcaggccaggcgcggtggctcacgcctgtaatcccagcattttaggaggcccaggcgggtggatcacaaggtcaggagttcaagaccagcctggccagacggtgaaaccctgtctctactaaaaatacaaaaattagccgggcgtggtagcagatgcactgtaatcccagctactcgcgaggctgaggcagagaattgcttgaacccaggaggcagaggttgcagtgagcctagattgcgccactgcactccagtctgggcgacagagtgagactctgtctcaaaaaaaaaaaaaaaaaaagaaaatgagaaggtaaaaatatggcttaatgttgatagaatgtcatatttcttttccacttagattagttttctacagtagctaatttgtctactgatttgcctcataggttaatagtattctaacccatatagagataggtacagagaagtattgaccacattattttcactgcttcacagtaagtgcaggcagtaaaacttgttttagaatgccaaacctcaagcttgagacccagtagatcctgtggcctctcaaactgccttgcttaaaataaaccaagctgagttggcagcctttaatgatgccgtaaccctgtgtttgcttgtctgtctttactgccagatggtgcgctccatgagtacagactcctgtttatcctcagaccctagggccttgtgcacagaagatgcttacctccatctctttaccagccattttctgtggtcccacacgtaccttcaaagtcatatcctaagtgaacacatcctttccttcatctcgcccagccccacatctgctccccttcccctgttcagtcatcccagagaatggccccaacaggaatttgcccaactctctgaagtcgtaccattcctccccagacttcttgactatgcctcagccaccccaggcttctttccattcctcaactgtggcaagtctattctcacatcacagtctttgcatccattccttctctggaatgctcatcctctagatctttacctagctgactccttctcatctttcaggtttcagctctcctcctgagagaggtctcccctaactgtaccaggccaattggttccctttcagtcactctccatgccatttccagctttcttttcttcatatttctgatcactatttacttaagcaatagttaatttgctttgctgtctgtctccatctactagaacataagctccatgcagacagagatataatctgttctgttcaccgccattggcacagcacatggaataatgcctggctatagtcgatgctcataagcatttgctggatgaattacatagatgaatggaatatcatttagtatgttggccatcattaggtcaaaatccacctaactgctcagctagaaattttacactatctctctttttcattatcctgtagcgatacatcattatgttttgtcaatccatttacataagcaactctcaaatcttcccattttctccatccctactgcctttattctaaggatggccatcatcatctcttaattactcagtctcctcaagatgagtctcaaagcctctagtcttaactcccttatcttccttctactcctaccttgcaatctgtttctcatgctgcagtcaaagtgattttctgaaaccacgaatttgatctgatctcaacattctcatgtttaaaatattacaagagctctccacacttaggataaagtcagaatttcatttcatggttaacaaggtctggcctttccagacacatttctttttatccctctttgttaacttacgtatccttgaacgtggcgttctttattgccctaaaccttcacgcctgctatttcctctataggaagtttctctcctccctacatgaacctactccttcctcttgttgactgtttagtccttgcttaaatgtcactttctcagacttttcctaatccctaatctttcttaggcccccctgaagtatgctcccatggtacccaatattttcaacatgtcagactgttttgcaatggcttactttcttgcctgtattctttacaaaactggaagcttaacatgggtatctcatctctgctttgcagcatttagcatgatgctgtcacagagtaggtgctcaacaaatatttcttgaataatgaatgatgagtttgataataaatgaaaaagaatcactatagttgaatattttgcacaccattatctgattcttataaatatagatctctatgttgctttgtgaccaatgacatttgtgttgtgaacacctgcattccttaacagggtattggaactgatgagtttactctgaaccgaataatggtgtccagatcagaaattgaccttttggacattcgaacagagttcaagaagcattatggctattccctatattcagcaattaaagtaagtctacttttaaaaatagcaaaacatattttgcccttctctacccatctccttactcttatatgccttaaaatataaagatatttgacttagatttctctctccttgtcaatgtataaatgtgttgtctgagcttaaaatagtagcagcaaaatatcccttattttcagctctaaaatcccaggcatataatagacactcaatatttttttaggtgtactagccactaatttttcttcttttgtgaattacatatgcaagttgtttacctgttttttatattgcactgtttttatttatttcagtctttatgacaatgtaagaaaagaaaaatacgtattttaaatttcctctctgttttacatgagacagcatggttctgcagcttagagtgcttttcatttcagtatataggaaactttctcattttatttaacagctgtatatcattccattgtttgtatatttgtacccaccacaacaaacagaggcttccagtttattgctattgcaaacaatgttgtataatgcatacacaacttcatcaggtacgagtgtatctttgggatgaattctcagaagtaggatttctgagacagatataaatgcattttaaattttgacaaatattactaattgaattccattttgcaattccatgaggaatgtatgagaacttctttctccatagctttggcacagagggtattttcaaacttttaggtttttaaaacattttttagagatggggtcttgctgtgttgcccaggctgaagtgctgtggctgttcacaggtgcgatcataatacattgtagcctagaactcctgggctcgagcagtcctcttgccttagcctccaagtagctgggactataggtaaacttttgggttttcataatctgataggtgaggaattgtatctcagtgtagttgtaatatacatttttcttagtataagtaaggctgaatatattttcatgtttgaaataacatttgtatttctctttctgtgatctgtctttttacattctttgtccacattcttttgggtttttgttctttttggtcagtttctaagacgtttttcacataaggtagattagccttttgtctggtcatattttcccagtccgttctttgtcctttgacttggccaaaagtatttttttccaagcagaggttgcacatcttatttaattaaatttatcaatctttcacagtattttagtttttaaaaaatctggtcccttctgtttctttcattctggatgagaatcttcctaaaatgggctccttcctttctcttttaaagcatgaaacccattttcattgttttcagatctcagttgatatattatacatagaaacttcaaataaattacaaattatttgaattaatagggcagtaagcctgacaaaaattgtacaagaggcttctgtaccttaagctcatggttcaaaagtcatagtcccaacaggaagatggcaactagttagtggagaactaaggggctagccccacacctgctcagtagccttccattgatttacttttctaccttgatgctccagaccacatatgaaagtctctagtaaatgagtgatagagagtgttagtccaagctggttccctggaacaaagtggaagctggggttggtgagtggagcaatccactgtccttgcctccaaggccacactgaccaggggaaaagacagagtcagggctgccttcgcagaggacttgcaggctatgcagacctctccgtctctttgctactccatctacccttgaatgtctcgaggaaatcagcactagagagtattggacccaggtgaactctccaaggtctaagctgagacttggggcctagaaggtgatccaggatgaagagggaagcagcagccaagcagagtgtttgctctgagtgctgagggtctaaaactgggaatggagtccatgctgattagaccccctaagctgtggatcattatgcaccatgcacatcctgatcctgggtagcagcaccctctctcaagcccctacaaggctggagcactacctctgtgggggagcttacactcagcgatgtcccctggggacacctggcttagaccacattccagtgtccctgccagcagctggagtctttggtccaaccttcgctatggccctacccacaatagccacccttgaacaggcacaaatattagcctgggtctttctgcagctatcttgggaaggtttctgcctctgactttacaaatggcctttgaatgaatgaatgaatgaatgaacatcaatcagtcaactagattcattcactaaaatctctctctctctctttttaatcagagtttttgtttttgcactaaacttttacagaaagagagctgagatgcatgcataagttgaaatcaggaacttactcaaaaaggcaattctcagactgtgcctgggacttagcacaaattgcatcaactgctcacactcaattctatttgaatcagtcctgacacatcacaatagtttcaatcatcagaggaagattcaataacattaaccatgttgtagctactaaggcagaaaaatagactcacacattttctaaagattgtcagtaacaaggttgagacataaagagggctttcagttcaccctcagcaaaccagaaaattaaattaaccagtggctctccgttccccagtggtctgggtaattgaggcttattgtattagaaaacatttaaactatttgtagtttgatagaaaagaaaaatccatcactgaaaacttcagtttgcagtttgaaatagtacaagatttctttatttctaccacctaacacatattattaagtaatctcattacatttttgctattgaagaacaggatctttttagatggttgtttctgaaattcatgggatagagttccattttgcatatcatctcagcctgtcatcctgcctgttttcttccttccacctattgtttagacatttctttgtccattgacacctttctcagggggtaaccggtgggaaggagaaggcaaggaagaacagaggtgaaaaaccaatgtgtacctcttactactttataagaagatattatggaaaatttagatgaaattatattttttggtagttttccttcatagacaaattctgtatttatttaataaatagcacaattccaagctttttatgggaaaatatagtagccactcacaatcaactcataatctatgtggagacttgaggtaggtatgaagaaacaattagaagataataattgaaacaacagacaattaaatactagattgttgaatatagagctagtactatcggaattgagaagaaaagaagtttggggttagagaaatgggtcttgagcctgcctttcaggtcaacaagcatgtgttgagtgtctcctgtgggccaggtgctctgctggagcatttacctttaagaccccagatcaatagggtcttaaaagtaaatgctctagagacagatatgggaagaagcaagagggaaagaagtaataaggcatttgtttgattagagggtctaccttggggaatattgagaaataaaatccaagtagcaagatgagttcagttgaaagagagctttgagatcagcgaattcactcattcaattaaaaatattatcaaatgcatattatgtgctaggctcagggttacaattataagcaaagggggtagggtgggggaagacattttctgcccttatggaattacaactatgttaaatgtaaaggaaagtgacattgtgctaaaagatcctacaatagtaggacttgacttagaggaaaggcttctatgagaaagtcatgattcagatctggaaaataagtagatattaataaggcaaaatgtatggaggtaagggagccagtagaacattctaataaaagaaatgacaaatggaaaggcctcatggtggaggaagcataatgaaaaatgaggatgtgggggccagatcatgcaggacctttttggcaatgtttaaggaattttggctttagcttaagagtaaggggaagccattgaagagttctgggcatgagctcttgaagagttagtatcaggatcatgaaaagatccctgtaagatcttcttattctggagaataagaagggctcaaaagatatttaggagttgaaacttaagggacttggtataatatcttggtgtgaggaaaggaagatagcaaggatgacactcaagttcctaacttggaaaacagacagtggcgccattccttgcaagaggatcaggttttaggttgtttgtttgtttgtttgtttccttttcttttgggggagtggggggaggtttatgagtttggttttacatgtattgagtttgagatgtctttgagccatgtaagacatgtggagaggtcaagtaagtcattagcggtgtaaatatactttgagttacttggatgtattttcttgactaactggtagaacgcctaattgtttacaactctgatcagagatgtctagaaggagctcttttaatacaaagctggagcattgttgacttgtcagctctgctattgcagagcaagacaggaaaaccaatagcataagaactaaaatctatataaaaacgaagaatattgtcatatattttgtgaaacagacaaatgaacaagaaataaagaaaacagaaaaatatatataaaggcctattgtgtcttactatgaaagtaatgcttaacttcttcactaaatgagccttctctgagacttcctttatattaccactttctctaatattcaccccagtaacagccattccaaatgtgaaacttaagtgataagaagagctcactggttgggttacctcaaataaaataaaaataatgtgagcatcttacacaatccaggttgaaagccaagttttacctcctgtgaagtcttttgcgttacaaacttggtatctttgccctttaagcctcaacctcacgtagtatcttttctggacaacagtctatttttggttggccttgggaaaaggaactgataaacatattctttaaaaatgtggttcatttcactttcctaagttaggcagtgtagcagggtattaaggagccaggatatagggattcaaatcctgcttttgtcacttattctcgataagatttgaggcaagtttcctaacctgtctttctcattttacttatctgttaaatgggggatacgtatagtacctattgcagagagcttttaaaagggttaaagtagttaatacacattaagccttttgaatagcaagtgttcgataaatattattaaaactaaaatttgaagtttttatagaaatcaatattatgtaagtgatgcaatcttattttattaaaccaaaattgaaatttaactgcagtatatcaggaagaatctaaatattacttacagtgaagaagatgctggtcagaacgtaattacactcaggtatgaatgaatgatggaattgcaggtatgttttactaaatggtatagctcatgagtctcacacccaggtgaattccctagtgctataggatttgattcatttatggtctcccattatttatactgtatttgttcttcattgattttattctttgcagtcggatacttctggagactatgaaatcacactcttaaaaatctgtggtggagatgactgaaccaagaagataatctccaaaggtccacgatgggctttcccaacagctccaccttacttcttctcatactatttaagagaacaagcaaatataaacagcaacttgtgttcctaacaggaattttcattgttctataacaacaacaacaaaagcgattattattttagagcatctcatttataatgtagcagctcataaatgaaattgaaaatggtattaaagatctgcaactactatccaacttatatttctgctttcaaagttaagaatctttatagttctaatccattaaatataaagcaagataataaaaattgttgcttttgttaaaagtaatttctttgtttgctttcagagcttgccaacattgtttgatgcctggtgccaacaactaatattttaaaacatgtttctgtatagaagctgttactgcttcagtttatcaccttgttaatcacacttttttgaaagaaaggaataagatgaagatgtatgtgaccctggcctaccctttgtagttgtgatcaagctataggagtggtaatgcatgataagttatttcagctttcagaaaacatctgctgaaggattaatctaaccacttcctgtctgaatggcaagcatgaattatggttgcttcatgctaaatactactttcccagaatgggcatttagaatcaagcctctaaggtttccttttctcttgagttggcaaaactatgcatttaaagaatccatcatgccatctttgagtgggacctaatatgaaataccttgactgatatgaaatagataaagtgaaaaaaattccagttagagttattttcctggaccagaatagaaatgatcgtactggccatgtgcagtggctcacgcctgtaatctcagcactttgggaggttagcaggcggactgcttgagcccaggagtttgagaccagcctgggcaacctagtgagaccctgtctctgccaaaaatacaaaaattagcctggcatggtggcacatgcctgtggtccaagctacttgggaggctgaggtgggaggattgcttgagtcaggaagctcatttggcaagttagttctgtaatcaatactataaatgtcagtcataactaagatgatggcaggagataatgaaaacaactacttaaatatttgggagataaaattgagtaaacatggtattcaaagttaccaagtgtcagtcaagtatgccttcacgattttagtgtaagtgatttagtgagtaagtatatcacgaagcaataaatcaatgttaatactcatagagtgcttactatgtattaggtactatgttaaacagtgtagtatattttaatttgttaatcctcaaggcatcttacaatgtagataccaacacagatatagaaatggaaatggaagcttagagaaattaagtaacttgtcactgtaagagccaggtagtccaactccagtgtccaggctcttaaccactgttttgccttagaatttatcccatcccagggccactgtagttttcaatgcctagtgcttagattagaacagtgctcagcacataaaaggcatttaatacagtgaatctttattttagatctcattcatcctcagagttgttataccacttatgtattaagtactttctgaaacaaagcatggttacatgtgtcaatatttcccctgttttgcaagtgaggaaaatgagactcaggttaggtatccagcccagggttacacagtggcaaagccaaggcttaagatccgggtcatctggactttaaaacttatctgtggctgggcaaagtggctcacacctctaatcccagcatgttgggaggctgagacagaaggatcacttgagcccaggggtttgagaccagtccaggaaacatcaggagactctgtctctacgaaaaatttaaaaattagctgggtgtggtagtgtgcacctatagtctcagctactcaagagactgaagtgggatgatcagttgagcccaggagtttgaggctgcagtaagctatgatcacaccaccgtactgcagcctgggtgacagagcaagaccccgtctcaaaaacaaaacaaaacaaaaaaaccttacctgtgcatgagtgagtttgaagaaggtgagaacttgaacacagtagtgatcacacaagagaattctgcagaaaaaaaaaaagccccaatgaggtaaccctctaacccttctactcacatctgttttgccttgtatgcattggacttcaggcaattacctttctaagccacatattcctcgtctttaaaatgggacaacaatagtacctacctcataagattgttttgaaaaataaatgaaaaaaaacacttaaaaggtattccacatagtgcatagcacatggtaagcccttaataaatgttagcctgtatcatataattattatagagtagtattcaatggccacattttttattgcctccaatttccacaaggtggcatgtcaagttcaaagtgaaccccacggccttgcatcccaatggcaaaacctacttaacttgcttcagaataacatggccaaatctaaactgttggaaacttcttctatagaaggtttgtcatggttcagaaatcttattgtcactgtaaactccttcttaaggaaacatgtggaacatttaatttaatcatctggcttctctggattcccaggaccatcttcatttacatgaatgtgcattagctctgacatggatcacctgcagaattgagtgcattcatgtcatctcattaagccctaagtttagtccctgaagattgaaagaagagaaaaatagccagctgcagagagtcctgggctctgtggttggtgagctgcagaagcagaaggtttgtacacttcacgctacagtaacagaatgtttggtctataaatcaggagctgcaaaaatggcaaatgaggatgttgaataggagattctctagcctatttgtaagaatgtattgaggaaatttttaaaatagtgtacagtagttcagacatttcttccatgtaccttcccctatttccatttccccaatttcatgccatatggataacccacagttttactttgtctttaaaacaataattttggggtcatatcaaactgggttcaaatcctggcttcaccacttatggcagcagcgtagataacagtgctcgacaaatacttaacctccatacaactcaattctttagctgacaataacagcacctaccttaaatatgtgcaaggatgaaatgaaataaagcatgtgaaaaatttaactcaataaaaattagttaccaataactgcattggcatggtgagttgccagtgaagagcagatagtaagtgttcaacaagcatttgtagaataaataagcgatacttgttttagtactactcagcgacagtaactctgaggccttggaagcttcagagaactgtcagctgaaatcagtgttattaatatgttgtcagtgtgtcctccaacgataagagccaactgtgttcacctcagtgatgaggttacaggatctgaagaaagtttcctagtcttatttcctgcccatcagttgacagtagtatgacatgtgagggagtgagtcgcttactctttctgtaccttagtttcctcacctgtaaagccaggatggccatgcaagtatcattcagagtaggcgtgaggtttcaataagccagattaggtgatgcacttaccacagtgcctgcacccgttaagtgctcaataaacattagccattattctctggctcagtttggaagacttacaattgcttatacagtgctctaatcacttgggggattttgagatgttgtaaagctacctcttctagtttgcaattaggaaagaagataaagcaaacttcttggcaatttcctgcctgtgaaaccttgtgttttatgagccacggaaagtaccccaaattttttttcaaccccacccccagcaaactgacaaactcagatctttcccacccactctgtatgtctcccgtgggactgtgagagtcaagcaagtacaggttgctgtgtgctgaagcctttttactggtgctatatttctttcagtttcatcaaactcagctttgtgccagttttacccaccagggccagccctcctctgaaaccaaagtttgcctatttctgtagagtttacaaagtcaacagtgagagagaggagaatttcaaatgaggaggagggttacagagtaggaggtaacattgaatggctgctgcagtaaactgttaaaagaaatcccaaacccagaataccagagcagcccattcagctgaaaggttttatgacacaaccatgcataagaaaaaactagctatcaaaatgtacatgtgacctctttgggcataaactttgtggaactggatgtggcaataaatagtggtccaggccaggcgtggtggctcacccctgtaatcccaacactctggaaaaccgaggaaggcagatcacctgaggtcaggagtttgagaccagcctggccaacatggtgaatccctgtctctactaaaagtacaaaaaaattagctgggcgtggtggcagatgcctgtaatcccagctactcaggaggctgaggcaggagaattcgcttgaacatgggagaaagaggttgcagtgagccgagatggtgccattgcattccagcctgggtgacaagagtgaaactctatctcaaaaaaaaaaatagtggtccaaggtgacctggcagagcatcagacttgctgtgaagcgacagatgtgatttgccaattgctacaatatcaaccaccagataaaaggaagttttgaaaaagaacattgggataaaatcagctcctacgaaaaagagcatgccacagtggggtagaaagtagagaagaacaaaggtcacaagggtagggagttggtgagaattagcccaaattcacccctccttttagagaactgcagcaatccacagcgtaactggcttgcattggtgcccctggccacagacctcagaagagtttagagatttccaaagttgcatttaaattttttgttttgttttgtgtcagagagccaagtccacaaagaaagttccagatcatgtctgcaaattctatttaaaccggtgttaaatagaatttgacatctgataacttcatgaaaaatatttttcttggtttttatcagtcaaaccaaactccttccaacctttattcttccaacatttattacatggtaactgtagtccagaaactacgccaggtgttggagttataaaagtgaagaaagctacacatttcctgacttcaaggagttgacgatctggggaataagcaaaggagaggaaagacagatacttggctaattggcaaggacagcatagtggtgatagcggtgggtgggtttggggattaagcaaatgtggcttccacacaaaattctcacactctttgcaacttgcagagttaaaggataagatatttgaagcaactgccaattactaggtgttcagttaaagactgttaaagttgtattgcacagtggttaaaagtctggagtcagcctagctggacaaattctagctctaacagctctaaagtctctagctgtgtgatcgtgggaaaattacttaagccctttatgtctcagattccttcatctgtgaaatttgagtgatagtagtaattagaccaaccacctaggattacaaagattaaatggatcgatgcatgtaagtacttagaatgacccagtacattgtaagcatatgtaaatgctagctacttaaaattaactatagtaaaatatgatatgtactgtaacaatgctagtaaaaatgctgcggactactaagtatcagaaatactgatagatatagaaatagatacagatacacacaaaagatgtttatgatattttgctaaatggaagaaaagttgcttgacgaaacagaaaaagaaaaccagtgtgagacaacatagcaaatgtaaggaggcatgtctgctcatttctgcatgccagcataatttcacgaagcctaactctgtgacgacgtgcagctctccggaaatatgctttgaaggcaaagcaggatagagcacatggccccatcatgtctcttgcctgagtcactaagttccttaaaagataaatgactctattccctgccttttcttacacgtaaggtaatatctgatggggttagtgatgatgcctctgtaatctataaccagctgtactcttacacccaaacttcgatgtgattctgctttaatgtaacttctgcacacatttgatgtgattttacaagtactaaaccttcacaactcatatataaactgtgagctaaaacaccatttcagagcagtctgacagaacctctttgaaggactgttcccaggctctaggcctcagtctatagtcctcagtaagacttctaaatacaaccacctttcattctttacaagcttgatttttttttctttagttgacaccagaagggctgggaaaatgtacatgaccatggtaactgtttatctctgggtagtagcattacagctgatgcatttttctttttttgtcaaagttgtgttttctaagtaaatttaaatttattgacttaataatttaagaatatctttacatgacatataagaaaatttggttattaaaaggcacctagaactcaaatgaaggattaattaagtatgcagggcaggattcaccaggaatgtcacctctgagctaggtattaaaggaattgattggtagggctttgaagatataaagattagtagagataagaacaagatccccgtatttgataatattggaaaataatgtatcaaatagtacatgagttaagtgagctgttaatccttttctgtttctttctttttttaaaaaatagcaacaaggtctcactgtgttgcccaggctggtctcgaactcctcggcctccccaagtgctaagattacaagtgtgagccaccacacccagccgagtgggctactaatcctcagtgaagaggccatcactgggcactgaatatcagagtccatccttattttttgtgtgtgttcctcttgtttctgaagtatctaatggaaagtctggcttctctgtttctctctttctctgatttcagaaatcttattacggtatcctatctattgaagataactagagatcagtttaagtcttctccatgctggagcttacagaatagatgctaattctattgcctgctttcccagatactgacaggtaataagagggccaagtagaccaccctgccatggattggagccatgtaagacccatcctgtgtacactcagagctgactctttcctaggaagtgagtggtatggatagacatgcgtcttttccaattcttcctgtgcctcacctcagtcttcaggactccaaggaggtaggaccaaaaagcacagggcccctgagtgttatttcagatcctctgtgtaaccagcccacacctgagccttctgtcaatggaaaactccattaggcagcaatgactggagaatgtctccaatttattcaaacatgtttctagagagaagacggtggtggggagaaaagcacttccttcctctctctacctcctgtctcttcctaacctcctctgctttaatttctggctaacctcagcactgttgacatgaaaaagaagcctttgcactgttaagtctactttgaattatttcaatatggggaccttccctggccaccaggcaacaaactgtccattcttgattttctcctctctctctcttctgggtattgaatatgtagtttggctggaccaggtgctgccaaaaacttcttgggaggcccacggcttcccagaatctagaatccacccagagaaagtccctgtgaggaaacttcacagatctttctctggttacgtctctgggaacactgcacttgcccggcttttcctgcactgcttttcttggcttcctcagtgtgatggtcctgtcttctttcttcaggaaaaacaggccccctggccttccctttcctagatgtgaaggaaagatgccagagccatacaatgttggtttcagtaccaccaacttgccgtgtaactttcggcaaattacttagcctcgctgatccatcatttccttttgtttctaagataggagtaataatttatcaattcatagtgccaggaagacccaggtgccaggaaggatggaatgcttagatctgtcatggaagatacaaggaattagatgaggaaacacaagtaaaggaattagcacaatatctgaaatatgtagtcattggctattatttacatctttccccaatttcccagtctcttttgctgttatcaagtatatgcataaggtcttttttattttgaaagacttagtcattatgggaaaattgacaaaggactgcaaattctgtataatcatgtggaactttcacaacttaaccaactgcaccacattcttgacctctctgtgcaggcagagagaattcagctccctttggactgtggctttataacctcacatgctcttctcagccaaccgacctgaagagccagtaggcattgacttgcattctttcagaggtcctcttgtttcaataataataagcaccatttcttaacactcactatgagcaattcatatattttgtctcattttgactttataacaacaccatgaggcaggtaaccttatctcaatttactagtctggaaagaggctcagaaacgttaagaccactctagatatagttctggagccacaaaacaaactgagatttctatacagtagatccaaaatctatacgcttgactctctcacgctgggaccatgatacagcagtagcaacagttacaaagctctttactttagaggcccgtttcttgggctctggggttgggaggtaggtctgaacacttgggtgtctcataaattctctgacttcacacactgagcaacttcaccacacatcactggcatctaacggtcagtaatactgaagtctaaataagtctctcagaagcttacatatcaataatataaagtcatctagtacaggacagaagccaccttgatagagccaagtcagtatctttcaatctgacaagactggtcaggaggctctcagaccagaaggtaatatcttcacttgctgagcactgtactatccgaagttcaaaactatagactgtgccacagcggggcacatgtgcaagggcagagttggagccctgaataaacagttcaccattacttacagaatttccctggttccatgtttccccctttcttttttggggggaaggatgtgaatttttcttctttttctccagcagtagcagtactgaaaccattcagcaacgaggatttggcagcttctaagggtcatgtcgttggtgggtgcagtttgagttgaagtgattgcagacgtgcagacaaacacacagaaatagaggttcagtagggcctgggcctaagccctggggaaagctacagttacttcagtggaaggggagtaggagccaacagagcaaatggaaggaagagcaggaagatgatgccgcactccggaggagaagcagcagagttgctctctgtacctgcaagccaatggagaagtttatcataagacagtaatgaactaataacacaccgctgaccggtgacacacagcaatagtggcaactgttgaagaactactgtgtgctcagcgtcacgctacatgctttagagaagcccttagggcacagtggagttagaagtacgttatttattaggaatgactgtacataggataaaaaaaaaagaaataggtcatttatcctaactcttagagcaactagctttgagaaagtgagcagcttattcaatctctctgagtattaatttcatctgagaaattggagtaataatatccatattactcatttagcctatcaatgtgaactgaaagcctactgtgtactaaacactactctaaaagctgcatatacatgtaaaaatttactacctgttcggctgggcgcggtggctcaagcctgtaatctcagcactttgggaggccgaggcggatgaatcacttgaagtcaagagttcgtgaccagcctgaccaacatggtgaaacccagtctctactaaaaatacaaaaattagccgggcatggtggcgcacactagtaatcccagctactcaagaggctgaggcaggagaattgcttgaacctgggaggcagaggttgcagtgagcctagataatgccactgcactctagcctgggtgacagagcg

SEQ ID NO: 47 - DNA, 1332 bp, Homo sapiens
taatagattagtgtgatctcagctcaaggcaaaggtgggatatcatggcatctatctgggttggacaccgaggaacagtaagagattatccagactttagcccatcagtggatgctgaagctattcagaaagcaatcagaggaattggaactgatgagaaaatgctcatcagcattctgactgagaggtcaaatgcacagcggcagctgattgttaaggaatatcaagcagcatatggaaaggagctgaaagatgacttgaagggtgatctctctggccactttgagcatctcatggtggccctagtgactccaccagcagtctttgatgcaaagcagctaaagaaatccatgaagggcgcgggaacaaacgaagatgccttgattgaaatcttaactaccaggacaagcaggcaaatgaaggatatctctcaagcctattatacagtatacaagaagagtcttggagatgacattagttccgaaacatctggtgacttccggaaagctctgttgactttggcagatggcagaagagatgaaagtctgaaagtggatgagcatctggccaaacaagatgcccagattctctataaagctggtgagaacagatggggcacggatgaagacaaattcactgagatcctgtgtttaaggagctttcctcaattaaaactaacatttgatgaatacagaaatatcagccaaaaggacattgtggacagcataaaaggagaattatctgggcattttgaagacttactgttggccatagttaattgtgtgaggaacacgccggcctttttagccgaaagactgcatcgagccttgaagggtattggaactgatgagtttactctgaaccgaataatggtgtccagatcagaaattgaccttttggacattcgaacagagttcaagaagcattatggctattccctatattcagcaattaaatcggatacttctggagactatgaaatcacactcttaaaaatctgtggtggagatgactgaaccaagaagataatctccaaaggtccacgatgggctttcccaacagctccaccttacttcttctcatactatttaagagaacaagcaaatataaacagcaacttgtgttcctaacaggaattttcattgttctataacaacaacaacaaaagcgattattattttagagcatctcatttataatgtagcagctcataaatgaaattgaaaatggtattaaagatctgcaactactatccaacttatatttctgctttcaaagttaagaatctttatagttctaatccattaaatataaagcaagataataaaaatt

SEQ ID NO: 48 - protein, 319 aa, Homo sapiens
MASIWVGHRGTVRDYPDFSPSVDAEAIQKAIRGIGTDEKMLISILTERSNAQRQLIVKEYQAAYGKELKDDLKGDLSGHFEHLMVVTPPAVFDAKQLKKSMKGAGTNEDALIEILTTRTSRQMKDISQAYYTVYKKSLGDDISSETSGDFRKALLTLADGRRDESLKVDEHLAKQDAQILYKAGENRWGTDEDKFTEILCLRSFPQLKLTFDEYRNISQKDIVDSIKGELSGHFEDLLLAIVNCVRNTPAFLAERLHRALKGIGTDEFTLNRIMVSRSEIDLLDIRTEFKKHYGYSKAIKSDTSGDYEITLLKICGGDD

SEQ ID NO: 49 - DNA, 1482 bp, Homo sapiens
gaggggcaggaggaaggggtgcggtcgcgatccggacccggagccagcgcggagcacctgcgcccgcggctgacaccttcgctcgcagtttgttcgcagtttactcgcacaccagtttcccccaccgcgctttggattagtgtgatctcagctcaaggcaaaggtgggatatcatggcatctatctgggttggacaccgaggaacagtaagagattatccagactttagcccatcagtggatgctgaagctattcagaaagcaatcagaggaattggaactgatgagaaaatgctcatcagcattctgactgagaggtcaaatgcacagcggcagctgattgttaaggaatatcaagcagcatatggaaaggagctgaaagatgacttgaagggtgatctctctggccactttgagcatctcatggtggccctagtgactccaccagcagtctttgatgcaaagcagctaaagaaatccatgaagggcgcgggaacaaacgaagatgccttgattgaaatcttaactaccaggacaagcaggcaaatgaaggatatctctcaagcctattatacagtatacaagaagagtcttggagatgacattagttccgaaacatctggtgacttccggaaagctctgttgactttggcagatggcagaagagatgaaagtctgaaagtggatgagcatctggccaaacaagatgcccagattctctataaagctggtgagaacagatggggcacggatgaagacaaattcactgagatcctgtgtttaaggagctttcctcaattaaaactaacatttgatgaatacagaaatatcagccaaaaggacattgtggacagcataaaaggagaattatctgggcattttgaagacttactgttggccatagttaattgtgtgaggaacacgccggcctttttagccgaaagactgcatcgagccttgaagggtattggaactgatgagtttactctgaaccgaataatggtgtccagatcagaaattgaccttttggacattcgaacagagttcaagaagcattatggctattccctatattcagcaattaaatcggatacttctggagactatgaaatcacactcttaaaaatctgtggtggagatgactgaaccaagaagataatctccaaaggtccacgatgggctttcccaacagctccaccttacttcttctcatactatttaagagaacaagcaaatataaacagcaacttgtgttcctaacaggaattttcattgttctataacaacaacaacaaaagcgattattattttagagcatctcatttataatgtagcagctcataaatgaaattgaaaatggtattaaagatctgcaactactatccaacttatatttctgctttcaaagttaagaatctttatagttctaatccattaaatataaagcaagataataaaaattgttgcttttgttaaaagtaat

SEQ ID NO: 50 - protein, 319 aa, Homo sapiens; identical to SEQ ID NO: 48

SEQ ID NO: 51 - DNA, 27705 bp, Mus musculus
  misc_feature (1)...(27705): n = A,T,C or G
gccaaaaaacacatgtaagaaagatggccagggctggagaggaggtcagaggttacaaagcacttgctgttcttacagagggcccaagttcagtccccagcacccacatgatggtacacggccatctacaggcacgtatatggtgcatatgcacacacatgcaggcaaacactctataaaataaaatagttctataaaaaagaaaggaaggaatggagagagagagagagggagggagggaggaaggggagtagggagaaggggagggaaagagggcctctttaacacattgtactgagatttcagtatccaaacacacataactgacatcagacctgttttttactctggacaaaggtcagttttgaatgggttaaagaccttaacaaacttggaaacaataaaatatagggaaagggtttaagatgcagatattgacaacttggtgaataagactctagtatctcaggaagtaattgcaagagctgatgggcagggccatatcaaattaaaagcctctgaacagaacgaaacgcttgccagagtaaggagagtgcctatgttctaggagaaatcctgccagccttttatctgaccaaaattaacatccatcatctctaaagaaccaaccaatgaaatagaacaagaagactcagtcaagtcagcaaatgacaagtgaataaacctctcacaaaaggagctgtgtaaactcaattattatgtgggaaagttcggcccctttaatgacaagagaaatacaaatcaaaactacattgaaaatctctttcactctgattacaatggctgccatcaagataacaaaaacaagaaaaatactggcaagcatttcctttaggaaccaggaacacttaggactattggtcggagtgtggattagcttacctgctgtggaattcagtatggaggtgcctccacaaactaaaacagaactaccttaggatccagccataccattcctgcaaatacgtcagaagcaataaaagctatcgcacaacagagacgcccacacacacatgcttattgatccaacgtccacagtagccaattgtggaattggtgtgggtgttcatcgatgagttaaaaaaaatgtgttagaattttaccatggaatactactcagtcgtaaagaggactaaaactgtgtcacatgcagaaaggtggatggaacgggagataattacattaggcaaatggaactacagttagaaaacaagcatttctgttttctttcacatgtggaatcacgacataaaggcaaaagggagattatgtgggaagaggaagggaccaatgggggctaagagagaacagcaggtataggaatatgatccaagtatattatgtacaggtatatgtgtgtgtgtgtgtgtgtgtgtgtgtgtgtgtgtgtgtgtaaatgtcacgaggctcataaaaatagaaaaaggaatatttaaattctactttcaaacaaactcaagtacaatttttaaaagtcacagtataatttggagtggataaaagaggcagacagacagacagacagagattataacctcctggtaacaataaaatcacagcatatcatcaagatggacaatgatttaatatagccagagcgtgggagataagcacccgggtgtttttataaagaccacacttcaaaatgtccctggtttactaacatggtggaaatggatgtagatgggtgtatgttttaaattttcttttctctttgaaaatgttttactggtgttcaggatgtgcttgcctagtgctcaaagagttctgggttcaatgtccagtaccacacaaagccaagcatggtggtgcatgcctgcaatcccacccgaaggtagacgcaggaggatcagaagtttatggtcatactcaggcacacagcgtatctaatggcagcctgggcttcagaagaccttgttggaaaaatgtgaagaaaataaaagtttgtttgtttgtttatttttcaaagaaagtaacaaagagaatgtttatcagccctgctgcttcagggactttagtgctattattttctgacctcctgttgagagtagaccaaagaaacctgcactgctggggtggcgggtctttgggagaggggagaaaagactatctcctcctagtttcagctcccttcacatctctctctgccagcttaaagctcaaagcttttccactccagtgcaaagagatgagattttgaatcaacagaatttgttggacttaaatgtcattttaattttttaactgatctagaaaagcacaaaggtgcacgtgtttctggggcagcatgtgtgtgtcaatatgcaaacctgggctaattagaccacttcacttcactgaaacagaaaccactagattccctgtgaatccctctcttcaggaggccatgggggcagggagcacccctacatctgtgggggcactggaccccctaagttcctctactccaggattcccttctgaaggccagctcggggcatggaaagattaccagggctggtccccagcttcacctcagagttcccagaacccctaggttctacctccctctagatactgggtcagacattccttccagagctgggttttgtgagtaatttttaaaagttatgatacatagactctttcatttagaataaagtgtttcacctaacatcctgtaggaagtgatgaaactaaaaagaaaaataaacgcattttctctttctctcgttactttttccattcactaaataaaattgacttttttttttccatgagagttcacactgggtctgtctcagtaagagtcacactgttcagcccacacacgctgtgatatgttatttactcattctcttctcaggaaccactctcacatgtgaaccctgaataccagctccctccctcttcagatctgtgaaatctgtcctgtaaaaacgaacatcttagtgatactatattttataaagtagtgcaattttaacatgccagccagaaaaggatcattaaaggaagataacattttctttgtgtttagaagattcttagcattaatatatgagagggtctcgctcagcctggtgtctggtcaaacgataccagcccttgagattgactgctcaaggatcatcagcagttctgaagacagtttggtctacagagcagcttccagcactactagggctacttagtaaaaacttgtcttaaaaaaaggagctggcagagctctgttatacaaacgaattttaagatttataaatgggaaaagctaagatttatcagcaaataaaagctaatgctaggggctgaagagatggctcagtggttaagagcactagctactcttccagaggtcctggtttcaattcctagcaaccatatggtggctccaaacatctgtaatgggatctgatgctctcttttggtgttcatgaagacagagctctcatgtgtatataaaatgaataaataaatctttttttaaagttgattctgtgtaacagaggacaaaagggaacaagggagagaagttctaagatggctcagtgggtgaaaatatttgatactctgaaggtattccatacacacaggagaggcaggagtctctcatgtacgcacacagggtggagtctcccatacacacatacaagtctcttatgaacacaaatggggagagtcatgtacacacacaggggttgggtctctcatgaacacacatgggggtggggcctctcatgtacacacactgggtctcttgtgtgtatacacatggggggctcttttgaatacacacaggagtctctcctgaacccacacacagatggagtcacaggggtggggactctcacgaacacacattgggggagaaccatggagtacagtaaaacgttttaagagaggcaggttttactcatagtggacatagtatgtcaatttgtttgttgctgaatttctccttaacttactctcaggcttttgtgttgcctattgacatgagtgatggccatcaaatcatactttgactgatgtcattatttgaatattgttttgatcagttgctactcataaaaggaagatttttattttaattgtatatttgggggtgagcatttggaagtcagttatctccttccccacctaagttcctggagattgaactctggctgtggggtttgctggccagcacatttacccattgcccagagataattacttatctcattggcaagttcagatgtcacacaattatcactttgtatttgtttgaatttaaatattttagaaaaaaaaaagcactccttcttctttcctctgcactcactaagatgattcctccaaagataaaaatcaaatagacttatattttttaataccagaaaaatactgtgacatgacagggtgtgtccactgttctaaagaacacttctactaaaataaagaccagttctacaatggccccttccagtctttttagctatttattgatatgaattccctgccttatgtatcatccaggattctacctaaaatagttccaataagtatcaaggaccactcaaatattcactattggacttagaagctccactcttaaaaatagattctatagaaagagcctgaaatgggggcatgaaatgggtccatctccagcgtcacgcacacatgaacaaagaaaaggaggaaatggtgttaagaaaacttacatcatactatttaaaaataaggaggaaggagggaggaagagaaagagagaaagctcaatgcttaggcaagagtgcttaagaaaattacagttaacagatcatttacagcatttaaaatggcaaaagattattataattctaaaaatgtattttgctgacataaaacattatacatacaataataatactatgtagtgttttaatgtcgtgattttcccccctgaagtaaagtttactatagaaagtatgtgttctataaaataaatatgctatcaaaaacaataaacaattatagctatgattttttaaaaaagttatagctatgagattgctttcttttttcaataagactaaaacacctggaaagttttgggtgggtattttttccttatcagaggggaagtaatacactttataatactctaaaaaatctccataagcctcaggtctcttacctacttcagtctcatatcccagatgaatctgtgaagaggaacactgaaggacttccccaccgccattctgcagtgcaggctgattgatggttggactcctggtgagaaacagctggcaaaattgatctagcttgcccatggtcatgggttgggttttggcagaacacagactgataatcatatctaccttcaaagtcatgaagcccatttccctcctggtaacatctctgagcaactcaaaagaggcaaacactaccagaatgcatgctgggagtgcgagtagcgccctctctgggctttcccaagccccagtcttcccaaaccctgcaagagaacattatagatagccttcccatggaaaaaaataagtagccaggattaatatcatctcatcatctttattcacatttcaagtcttttgttgtttatgtgtggccttcctgcctcggcctctcaagtgctcaggagatttccgtcaagtgagtacccatcgtctttatcaatagctatgcgagatggtcctgcagataaataggtgactagcaaataatgtttggaaggtgagagtatttggcattaggcatctacaggtgcattattaatattactttaaaaaaaacccagtatactgcttgaaaacagtgaatgcaatgggttctcattcaccttcctgctctcaatcaatctccatctctaaagcaagaagcggggcccttctggctgagcgaggggtaaagggaggggtaaagggaggggtaaagggaggggaagagatctcctggcaccttggttctctctttacctccagtttagcaataaaataagcaagaggcatgtgagactgctgagcctgagagacaggtcttcctaacatctctgagcctggctccctgctcctccttgtaaacctcttaacctttctgggtccccttctcccttccctgccttcctcctatgctccccaagtatgggaatcactccccaacacctcgatatatctcagagatgtcccatcctcacttactaactgctttgatgtgtatttacttagtttaatcacgggattcaacaaccatctgcctctgacctgctccagttcttactggtcaagtcagaaatcccaagaggccacaacagcaagtagaaagtgagatgattagggttagtcagagaagggcttagtgttcagtgctggtgccttcacagagcctccagcagcacttaaactgctcactagtcacagagcctaggtgggaaaatttgactgagcttctattgaaaacaaaaacaaaaacaaacaaaaaaaactgttttactctatgttttgcttaataagaaatttaattgtattattctttttaattttcttttgaattttttattttccctgttaaaaagaatagaagataacaaggtaaagatttgcgttgggactattttgagatagtcacaacaggacacgacaaagcacacaataagtgaattgttcatagaatatgccgttagctaatacagtgtgtgcagcccctctaaaattgcatgcctctgcattcatctataaagaaagggtgtgttgagaatcctgcatctgaggactggttaacagacaggatgtgtgtcatagcacatagcagtgatatataggccctatggataaaatgccaaatttattaaaaatcttaaagaaatgctatgctagtcaaatattttgcataaattcagattttttttacagttaaaaatatcactgactttttttccccacagaaagggctttttcttataacgattttgactaatctaaactataatagttgcagggctagttcattgtcaggtgcgtggcgaaagagtgcaaatcccgggggttctttcttcagaatcaacgaggcaatacacttgaacatgtatgtttttgtaatctgcggggcatcacccgtcctccaggatctcatttcataattttggttcacgaaataacgctcaaaatccagcccaactcatttggaagaggactgtgctgacaatggcttcacccctgcgaggagagggtgcacacccacagacacacagcacaatagtggttggattttttatttgcagaagagtgaggtttgagctcctctccccgccctgccatcaatagtgttaatcccacgcctccattgagggcaagaccacggtgggcattattctgaagccttcattttgcaatgactccaaaagtccacatggcctagtaccctgctgcagccccaggcgccacgcctcccaccccaccccaacctggaccaagcaagactcagctgagccgcagctccgaagtcgcctttaatttcccagctccgaccaccggaagcgagcgcgaggcgggggccgggtggggaggacgcgcccaccgatgccgccggcgcccgcgggacgcgccaccagcccggcccttgttcgctgggctcgacgctcgcccacctcttccaaatttaaccgttacctaaatccgaagggaaatgagcaaacctctgggattgggtgtcaaggtattttcagcttcgttgggcgtatttatcctcaagtgtttccacaacaagttatttcggggcccgaggcgcaggtttctttctgcggacgcggtggccagtggccggactccaggccggtggcaccggggtccggtgattcacggccgcgatcggggcgatgctgcccaaacagtcgacaggattggggtgcccacgggagccgtgcgagctgcctgctaccagcgcccgcagctcctgtcaatctgtgtcctgaatctgtgacttctcgctgcggaagtctccaggagccaagaatacttcgattttctttctagtcatttctagtgctgatttctcagacatcccggggactctatagatagccccgcgatcccacagacaaacaaattgggggctgctcaggggtgcccaaggagttggcaaggatacccccttcctgtcacctcctgaccccttgcgcaaaggaggctcgtggcccgctgtcccactgggggatggggctggggttgagaaggctagtgagcgcctctaacgctcaggaagtgaagtttgtggttttgggggctgagctccgaaggagattaaaaaaaaaaaaaaaaaaaaagtcagagagacagatcagtctctcccgaaagcaagattcagtttgcacactctcagagctcggtgcccgcgccctgaccccgaaggtaggtttgctgaactgctgtgcctcccgctcaggcgggggtggcctcgaggactggtaggagtacattgacactgtggggacgtcccgagggcgcaggcgggtccccacctgctgcagagcatcggctgctgggttctggagccacccaagcggtggagcgaaagatctggaatagaggggcacacagtttagcggttagatagcagagtgggatccacgcaggaagaaaacatctggtgggcatgtggcggcagcgggcttctggaggcctccttctgagcgccttgccttcagctcccgaatttccagcctcagatgaccaggggaagcctggcgggccgctgtgccaggagcgtgccgccccgccccctggacgccagctgcagcacgaggttgccttcccacgcgctgggcctccttgccatccccttacccctcctacccggaacccagcaaagccctccgaagcgtaggtttgtggcctgggcgaggacgccacctctgtgtctaccctgtcccgcgtggtgctgacgcgcagacccagcgcgggaccagacagccctgcttcccacgggtcccgttcttggctatcgcaggaccgaacctcatcgaggcctccagaactcttgccctgttttcttgctcttcatgcttgctttaagaattgtcctctggttggagcgtctggctgtacagacagggagtgcgggaaaattaaagcgccggagcctgggttctgggagccaaacccgaccaaggcgtgtgactatacattatgactgggaatctgaagcaggagtccttgggctccttttaagtgggtacaacagggtgtgttctgtacgcgctcctgggggggggtggcgaagaggctcgggttcctcagtctgaactgcacgaagcccaaagacccggggcgtgcgccggcctgtgccccagtctttgagcccgccgccgccgttcagcctctattgccttggaccttggaggcaggcggattcgtttcaccctaggcctccctagggtcgcccccggagcgggccaggagctgggacgcagtctcagccccgcctcctgcagggctcaggtttcgacccgagattaggtgaactgattgggggttaaagagagcgacgccagctctcggtcatgctcagggaccctggcctcctggccaggccttctggccactgctcactcgtgcgcgctccggtttcatcttgctggcccgcgaagtcgttggcactcattaaatttgggcaccgcgtgtttgccagtaagcacgcagtttaaactcaacttccctaggacaagatttttggtgagcagatcagaaaataattctttctgggacttagtttctgaagcaaggcctacaggtctggaatgtttctcagtggtcgccgtcctggccggtgccacaccactattccagtgggcgtttctcctgggacaagtgttggtcctttgccactcccacctcactttcctgtgcctctggcttcctgacttctgctccagccactgcagcacatagtccctaggcaaaccagtccctagtacgcccctctttcgcttctgttcgtcgcggggctcctggaggttttggctccaagccccttccgggtcccaaacactgatgccccctgactggctaaactaagccacgcatccctggcgtgagccacaacccagaagggagcaggtgggcttgcagggttgacttgggataacggaccagttgtggactactgctctcaggagagtgatgatctagctttggtagggaaggggaggggctgaggcgtgggcagggcagagcaaagggaccagagccagagcctggggacaggttttaccactgagctgttgcagtggcggcggaggccgggattcgtgccacctgtccgagtgccacctggtgagcgtggcgcctgggtccaggcccctcctcccgcggcttccctctctcctccctggcccacactcttccttggcctgggaacctaccacaaccgccatcggtgctgaccctcgtttccacccaattttcccccttctctcagaactcagagtatccgagggtccaaacattcgtccagcggctgaccaccatgccgcgctcattcctggtcaagagcaagaaggcgcacagctatcaccagccgcgttctccggggccggactactccctgcgcctggagaccgtgcctgcgccgggcagagcaggtgcgaagcgcgcagaggccgggtagggcagctgccgaggacaccgactctgctccaagccacctcgtttcctaggaatcgggggaggctatcctaacgcccctcgggtgcttttttgtttttgtttttgtttcccggtgctcagatttgctgagcttgccagagatgcccctggcgctcgcagtcggctcttgaattcgggagggagggctcccggttgggtcagagtggacagaggaggacacgggcgccacggtggaaccacttcagttcggccaggtttaggtttatttctctcctgaatcttttccgcagagggcggcgctgtgagtgcaggcgagtcgaaaatggagccccgagagcgtttgtcccccgactctcagcttaccgaggctcccgacagggcctccgcgtcccccaacagctgcgaaggcagcgtttgtgacccctgctccgagttcgaggacttttggaggcccccttctccctccgtgtctccaggtaagccttgattcgaggtcttgtggcagagttctggagtcgcagcacggagggaagcccgcacaagggatgcagagggtcggcctagggatctggctcctaagggaacagggttcaggggaggcatccagcttttgtgctggacaccttgcccaaagtgtcctctgcctccttctaagtcccttagctccaggctggcccttaattcgtttgcctggaactaacaggcgaggtcaaacgaactggtccttctctggctggcatttcttttatgtccagaattcattgtttagaaattgtcagatcccagaatccaggacccagacctgaatacttcaaacaagagacctgggcagtctgagcgggacagaactgggcaccacactggagtgcaaggctgctgctgaaaatctcagctcgctagctctgtcttcaaaagtttcattttctccccttctgctaagagggcccaggcaggggcaccagcatgctccggctcatttccagggagcaattgactagagttgatgggggtggggtgggggtgggnnnnnnnnnnnnnnnnnnnnnnnnnnnnggtggggtgggggtggaggtggggggggatatactcgggtcacagcagaagtagaaaggagaccaatccaaattctactaagagcaggctatttccctttcacactattagctcattcacccccacaagcagagggttggttcttcctagctgtgtgaccaagctgctatgggacaggtccgcccagaatggagtgtgcatttacttgcattcattcaatatccaattttagcaaaattcacgtgtgtgaagggagaggagttcttctgaaggtagtgtaatttttaactgtaatttttcatcagaaatttatcagggatgggcatacttcgcgcccttgtctgctgccccttgcgtcatagctttgagaaatcttggggacattccagtttgtttagtctgatactcctagataacctggactcaacgtggatcggccttctccgttcttcctaatctattgcaaagagaaaggaattgagtagaggagtacttgaaaggagtcaggaccctagacctaagttctcctgtctgtctcaatctttctagcaggttctggggactgggggtgggtggggtccagccagagaaccatcaaaacgaatttacccacctcttcaacctgtatcattttaagtatcactttactgctctgtcactggtcctggaagccccgcgggcctacctgagtttcaccccgggtgtcgggggtacttggctttctaatcagctagggcgcctgacaatagtgatggtgcactgcgggctccgcccagcagcctcgaacttgactcaatggcctcctgtgccttcacagcgtcggagaagtcactgtgccgctctctggacgaagcccagccctacacgctgcctttcaagccctatgcatggagcggtcttgctgggtctgacctgcggcacctggtgcagagctatcggcagtgcagcgcgctggagcgcagcgcgggcctgagcctcttctgcgagcgcggctcggagccgggccgcccggcagcgcgctacggccccgagcaggctgcgggcggagccggtgcgggacagccagggagctgcggggtcgccgggggcgccaccagcgctgcgggcctggggctttacggcgacttcgcgcctgcggcggccgggctgtacgagcggccgagcacagcagcaggccggctgtaccaagatcatggccacgagctgcacgcggacaagagcgtgggcgtcaaggtggagtcggagctgctttgcacccgtctgctgctgggcggcggctcctacaaatgcatcaaatgcagcaaggtgaggctcgcgcgcgcctggcctcatcagccctgtgtccccagcccgtgaccctccagcatgcgcaccccgcgacccccctcagcggccttctccctggccccccactcgccctcaggtgttctccacaccgcacgggctggaggtgcacgtgcgccggtcccacagcggcacaagaccctttgcgtgcgagatgtgcggcaagaccttcgggcacgcggtgagcctggagcaacacaaggcagtgcactcccaggtaagatcggcgctggcggcctgacgctgcactggggacctttcagcttgtcctccgaatcggcaccagccattttcccactgcctcccggtgccccctctgcttgctcctatttgggggtgcagagaaacctgggtgacagaagtcctggagtgtgctgcaatcttagattgcagtgtcgcaccgctgtgagtctccagcagtggaattctgttggagatttgttgacatttgctgctaatgcactgactttactgtttatgttcccttcatccttcctgactggcaagggagggtctcagttcatgcgcagcgtccagtagcgaatgctggtcattcattcattcattcattcattgctttataacttgcctaaatctaaggctttaggcacctgagaatcctgtagcacagcaggtcctgtatggtggattaaagagagggagataagcaaaatactacacaagtgtctgtgacagcagcccatctggtccaaaccccacagtgactggggaggaggggcaatctaagtggctgaggtcctgctgaggagggtgtcaatgggtgtcaaaaatgcagggcggagctacgcttttgtcctggggtgtggagggttgtggctgtaaagtgttttagtagttaatcagtaggtgttgaatgatggggtggagggagagaggagagggtttctggctctgggagatcagtagatgttggagagagagagagagagagagagagagagagagagagagagagcacaagcgccaaggaggctgctgaaggagcggcacatttcttcctcctctcttcctctctgctctgcaggaacgcagctttgactgtaagatctgtggcaagagcttcaagaggtcatccacgctgtccacacatctgctcattcactcggacacccggccctatccctgtcagtactgtggcaaaagattccaccagaagtcagatatgaagaaacacaccttcatccacacaggtgagctaaacctgggcttgtaggagatgcttgaaggacatgactcccctctgatagtctacctccaatgagtggtagatgagttctcccccagagtgaatctggtttgtccttgagtctgaaggagtatcttcctctatgtcaacagctgtgcggcatcaagccctcccagagggtcaatgtaaatatttactagagatatgggtattcatatgtgtcaactaaacttcatttttataagagcttcctttgtttgagcaggaaaagaaaggcaaatgttaccaagtttcctgctgagtctgtgttgacaactccagagacagtaactgtttctttagcctcattttaaaaatgagatgaggaaatcaaggctcagaacgtatccaggattacagggctcaagttcaggtttgttggtctgagctcccaaattcatagtcgtgacttgttccttgtgtagtagaggtttacagccgtgggaaggtggttaatgaggaaactcctattcgtttggtgttctttttgaaatgccaaaattttgttccctaacagtgacaattccttaactatacaatgctttaagaacacccaagtgtttcagattgctcatttcccttggtcctttcctcctgctccacacagtaaattgggatcctcttactcagacagcaagtcagtttcagtaaatttcaattctctctagcttccagcctggacgcctgccttccttaacacttcaggaacaaatgtgcaggcttactgtcaggagcttgtcaactaaagtgattcccttgccccaaaagcatttcctgtaaccgtcaacatgacagttatatgagaccacaacttctgactttaggaacatttctttaaatcaaatcacagctggatacagtggcacataggaggcagagacagatgagatggaggctagcctcggctacatagagagtcctaggccagctaggacaatacagcaagatcctgtatttaaaaaaacacagtgccttccaggatcccacaattaatgtttgtaaatatttgtgagcagtgtagacatttgtatcagaaaactcaggaaaaaaagcctcactttaatcatgccccctgtctgaaatgtccatgtaattcactctttataagttgtttgagacacttatcaaaatgcaaatagaatcttgactgaatgacacatttaagtctttactaaacatttatttaattaaacaattattaacgcattttattaaatcttggctagaattaatttcacagacatatttgactctagagggacagggtaatttttgtgaagtgagtctttatcaagaaatcttaagcacaaggagagatggaagttccttagaaacaagcaaacagatacttggttgttgttgatttgtttgatcccataaggccgagtaccaaccggagagccatgaggggattagttgggaatgtgtgccatttactcacattttaaccagagcacaagaccaggaaagacaaaacctgttggttttcttcctgttgcctgctttaaaaatttttttagtttattgttctgttgtgaagtgttggcatattaagaatcctgtagtttaaaacctcaaaggaagaaagaaagaagtaaaagttagaatagacaaccttaacaaattatttgtggctcgaatgtggatttaaaaaaaaatagacattggacaaacctgtgttcttcaagagcaagaaggaagacaacttcagtggccacacaaaacaacacccacttggaaactcagatttgaaaacttcctctgacgaaagcagtcatagggtctgtaggacagcccctcccacctcctgctgaacatctgctctgggggccctgtgcttctaaaagtcagcaggctagtcctcgggggtgaattcagctggggagggcacgtggcctttactcagtttccgtttagcaggaaaccgtttgagacctttggctgggagcctccactcaaaaagtctcccttccacctggtatacccgtggcttactggtaccaagttgcaggccaggagttggttcgtgttgcaacctatcactccccagcgtgaaagtcttagccagctgttagcaagagcatgtgggtcgcaacgggtctctcccagctttatcataggctcatacttcctgcccttggtcttccatccttgcaggtgagaagccccacaaatgccaggtgtgcggcaaagccttcagtcagagctccaacctcatcactcatagcagaaagcacacaggcttcaagccctttggctgtgacctgtgtgggaagggcttccagaggaaggtggatctcaggaggcaccgagagactcagcatggactcaaatgagtaccctggcagcccgcaacaccagctgtgtaacactaccgtgagggatgtcttccctgcctccctccagccccttctcaggccctgagtccagtgtgcaaagctcatcatggttagtccccttcaccttccttcccggagctgctggaggagatgaactcccgtttctaaggtcaacccagagtgggaaccgcagcagcagcagcagtcgtctgtgctttgggcttccctacagctgaagatggggatcaaatgagatcttgcacctcccagttcttcccttttttgctgtctcacaggccagaatgaactctgggcagctgctacaagaggaggcatcacctcttaagctttgagcgccactgatgcatttattgagaacgaatgaacattaattttctcttctggggagactgctgactcctttatcctccaccagactctggtttagggaaggaacctcgttcctttgaaatcatcagatgcaccatcaagcctgccacgagaagaaggggacttggtgatgagagggagtcagaggtcctgtggtgccatcagaggaggtgaagctgtggagcagctccggggaacagggtcttcacttactcagcgagtgattattggccgcaggttatcagagtaaggaactgtgctaggtatgggagagccagagattaaagtcataggccctaacccccaaaagctatcagttggacttcaacatagctagagcctgtgttctgtgcttccaagggagttctgaagaaggccacacaaacattgggacttctttttgacacttacggagtttttcaagtgtaaacaaataggaactggaggattatttctaaagttcatgagtaaatccagcttttattgttaggtgggactttattagatgcctgcgctgggagatgtggggtgaaggctatggcctcagctcctgccccttatcatcttaggaacaacttatttttcctgtgagggttgtagacgttcctaaatcttcttgagtgcattatgtattagcataatcatatttattagaatgttgttttaacttaataaagtattaagattattacagcttgtctttcatcaggccaggaatttcgtgggaaggccgttggtgtgtttgcttattttttcttttccctgtgggatacaccaggacaggagaactgcagaggaaaaccagagtaaatcacagtttctccagtttccatattttcctccttcttttattcctgagaactttttaaatgatttaattttttgttagttttaattatgtgtccatgtgtccctatttgtgtgtgtggatatgtgcacatgagaggctagcgagggcgttggatctcctaaggctggagtagttttgggccattacaagctaccagacatgtgtgctaataaccaaacgcaggtcctctgaaagagcaggaagcaactctaagctgctgagctagctctccagccccccatctatctatctatctatctatctatctatctatctatctatctatctatctatctatacctatgatcttcctttccttttaaaaacagggtttcactatatctatatagtgaactcatagagatttatctacctcctaagtgctgggattaaaggtgtatgcctttaatacctggctaatgaaaacttaggaggtatgtaaaactcaactcctatagccttatagagtcctggatggatccacagggatatcaattcttacctttgagaatttcatcttttgtgtgtgtgtgtgtgtgtgtgtgtgtgtgtgtgtgtgtgtgtgtgtttcatttacacagtttactattcagctattaagaacgttgacatcatgannnnnnnnnnnnnnnnnnnnaacgttgacatcatgattttctaggcaaatgcgtgggactagcaaaatatcatcctgagtgaagtaactcagacccaaaagaacaagcatagtatgtactcagtaataagttgatatcagcccccaaattacagaataactatgatacagtccattttttgtgtctatttttttattacgtattttcctcaattacatttccaatgctatcccaaaagtcccccacaccctccccccacactcccctacccacccattcccattttttggccctggtgttcccctgtattggggcatataagtttgcctgtccaatgggcctctctttccagtgatggccgactaggccatcttttgatacatatgcagctagagtcaagagctccggggtactggttagttcataatgttgcacctacagggttgcagatctcatcttaacaaaaacaaacacacaaacaaaaaccaaaccaaaccaaataaaaccacacaaagctaaacaaaatcaaaccaggacctagacttctagatgaaagcatagacctttaattcagagatctgaatgctttaaaaatatttatgtatgtatatatgtatttacttgtgtgttggtatgtgtaaacatgtatgtaataagtgtgcagatgcctgagatggccaggaaagggagtgggagtccttgaagctggagttataggcagatgtgagctgtctgacataggagctgagctcaactcacgagctctgtgagtagcaggtgcttctgcgccgcctcttcagcccagatttgagtctcagtgtaggctctgtcactgatgcattctgcgtcttggcaaatgttattacttcctagtttccttaaccatacagcatagctgtggtccttcaccccaacctaattctgactactcagactccttggaagctggagagaaggggagaaagagggaggggaggggaagagagagatcgattggctggccactgtgtggaagggaaattacaatcctaaaatgtgagtgaaatgtgaaatggggcttggagcttgtcttggggtcaccctgtgattatcacatgtcacattctgctatgacttggataccccaagttccatattccagggcaggaactcagccccgaggcaggagctgatgcagaggccatggagaacactgcctacagacttgctctccatggcttgttcaacctgctttcttatagcacccaggaccacaacccacaatgggctgggccctccctgtcaatcactagttaagaaaatgcaccacagcctgatgttatggagatgttttctcaactgatgttccctcctctgagacaactccaacttgtgtcaagttgacataaaactagccagcatagggttattctgttctggtcccaaaagactgaaaccaggataaagtcctagccttctctactacctgtgcgctgaaggcttctagccagagcttcagcccacgtggcccaggggaccagacaacactatttctagtgatcaatttctcacatgtcaactgaatacccagcctgtgtttgggaacacagaagtgagggcaagtcccacggagctgcattaggcactaggtggtacgaagccacctgcttcctccacagccagctgcatccaggaatcacacaaagctttctcattgtaggatggggaggttgaacctctcaaatataagtccttggcttatattcttgttggttttccatgactaactctttccatgtcagttaattcaaagtttactccagtagaggtttgaaggtagcatctcagaaactgtgggtgataaagtagcccaagcttaggggaatcacttcacaaaatcctaggaggcaaagccctatggaatgaagacaagaaggcatctcgctcacaagtcagtgtgtgcaccgctctcttagttccaacctgattgaaaagtaaaattataatgaaggaggagtcaagctgattgaaacccgtgggttctgtcttctccccatcttgcctgcctgatgacattggaatatttgctccactttcatgggttttgattaagttattaggagttgttctcccccgccctctctcttcctctctcttctgtttgttttgtttgtttgctttgagatcttactatgtagctcagtctgggcttgaactcacaattcttactctttagctactcaagtagttgggataacaggtatgtcccactatgttaaatctagaaattataattttggcgttcattttttttaaatgtgaaaaacatttgtctctgtatccctcagtttagaatcaaaacaaattactgtgccagttgccctgtgaaatttgaagattgaaaatatctctcttaatgttattacttggctccattaaaaatggattgtgaatattccatgttgcattattcacgaggtgggctctatgccttttgtctgccagagtaacagtagaaagggtaacgggagacacccagcgcacctttgtttcttccactaaatttttaataacacctccagctagccagttggtgaagctcagctcttgcacaaaagtggaaaagcgcagctaaccctgttagctgagtctttcaggagctaatttgagtttgtgttcatctacaccagacatgattagattacctatcaagtgtgctgagctatcaggattcaagcccagtaaaaggtgaattccatctgattgatttgagacacaagtggaacaactgaggtctcataagcaccaccttcattaaaggggcagcagagcatcaccccgtgcctgcccccgcccctgaaaactgcgcgtgcatagtgatttgacccatgtcattctgctgggagcctttttgtttaacctggtcatctaacagaaagaagtaagctaagagcgaggaagccaaaaggtcttcatgcactttctttgcatgtcaagagttctgtttggttcaatctgcacttttgagttattgccaaagtcaaaactttctatggagttcattatatatttatttaaatgttatttatcattaagtcagattaaaacataaaaacttcagagacatttcacccagcacctttctaactttaaagtccgtgggttaatttttaatttgtttgtcaatcctttatccataggcttatatacttatacatttttaaaaaaattttgtggtcagagtacttataatttgtatcaaagtacttcattcatttacttgcagtatagacatatgcttaaaactgaaatatgtctcacaatgagaattttggaccttgttttttctttattttgagacaggttaggctctgagttaggaagattgtctctgcctccagagggctagatttacaggtgagttctagcaatccttgcttggacaatttttgtggttaaggttttttgttttttgttttttgatgtcttagtacttatttataaaatttcatcatttttgaagacttcttaggaaaaatgaaaacttttgtattgcagggctttttcactctaagcaaaacatttaaaccacacgggaagttacagagaagaaataatacttcaggtacacccaccattctgttgtatttacttcatgagctattttattcatttaaagttttttgttatatctttatttctatatctgaggggcatattatgactggtacattcagtttgtccttaaaccctttagattctggacaccaggcttggttggcaagccccataactcactttattttgaaatagaacaagtttctatccccaagacagcaagggagaattcttgccccacatcttccaagcctaaaaaatgtttggaaattgggtgtaaatgctgttgtaatttgtatttcatggttatctcttcacaagtttatgggcttgatgggtctccctctctgtgaaatgtttgctcatgtacttttttttctgccagctttttatcagcttgttctttctgtgtgtactaatcactcacttgctagaacacaggctataggatgaaaggagtctgtcagcctacatgccgtgcacgtctcccactgtccttcctcttttttaccctttgtttgttttttgatattttcaagatagagcttctttgtgtagtcctggctatcctggagctctatctgtagaccaggctggcctaaatttcagagatctgcctgtctctgcctccggagtgctgggattaaaggtgcgggccaccacctggtgtcctttgccttttcactttgatgagaaggtcagtttggtttgggtttttgtgttattgtagtcagatgtactggcgtgttcctgcgctggttagtattttgtcaacttgacacaagcttgggtcgtctgggaagaggggacctcaattgagaatatgcctgtaccagattgggctgtaggcacgtctgtgggtgcattttcttgactggcgatgaatgtgggtggtgccacctgggcaggtggttctggattgtaggaactcaggctgcacaaatcatcggtagaaatccgggaagcagattttcttcctggtctttgccttgagttcctgatttgcttgagggaagccttggcttcccttaaggatgtgctctgatcctgacttgtaagccaaattaaccctgtccttcccaagctgcttttggtccagatttttttttttttagcaacagaaagtgaatcannnnnnnnnnnnnnnnnnnnnnnnnnnnnnnnnnnnnnnnnnnnnnnnnnnnnnnnnnnnnnnnnnnnnnnnnnnnnnnnnnnnnnnnnnnnnnnnnnnnnnnnnnnnnnnnnnnnnnnnnnnnnnnnnnnnnnnnnnnnnnnnnnnnnnnnnnnnnnnnnnnnnnnnnnnnnnnnnnnnnnnnnnnnnnnnnnnnnnnnnnnnnnnnnnnnnnnnnnnnnnnnnnnnnnnnnnnnnnnnnnnnnnnnnnnnnnnnnnnnnnnnnnnnnnnnnnnnnnnnnnnnnnnnnnnnnnnnnnnnnnnnnnnnnnnnnnnnnnnnnnnnnnnnnnnnnnncccctcccctcctctcctctcttctcttctcttctcttctcttctcttctcttctcttctcttctcttctcttctcttctcttcttttcttttcttttcttttcttttttccctcgagacagggtttctctgtgtagccttggctgtcctggaactcactctgtagactaggctggcctcgaactcagaaatctgcctggctctgcctcctgagtgctgggattaaaagacttgtgccacaccacctggccgttgttgcttttcttaacttaagaatctctggggctggagagatggctcagtgcttaagagtacttgcttctcttgcaggggatctgggttcagttcccttcccttctgattgtggtagcttctatttccttccttccttgtttttcacctttccttttgtacttccaggatcacatttatctacctgcccagcccaagtttctgttctacatggttctctctatggatctgccaccggtcctactgtctacttctccttaagccacagttccataaataattagaataaaagttagtttctaatgactaatagaggaggcttccctctgacctgcttcattctcttcagaatatctactcgtggcctttattcttgcacatgattttggcgtgtgttactgtcatgactctgagtctagcaacttccatctttgggggttcagttatatcccttggcaaaggtttatcccacctgagcttgttgactccccctcccccgcatggaactgtgggaagggtcataactgagtatcctgttatctgtggtttgcgactctgtcttaattgctcctgggccctgggaatataggaggagctagagtgtatgggtaccaaagacgaggggaaatgagctcagctagggaaaagcatcacccctgctgggggaagactttccagtgtggaggattgcggaggagcatcggtaacccctcttattgtgctctgtaaattcactagacttgttgatttcccaaagtgacctgtggtagaatctggcctcagtttgttagtttgttgttgggactttagggagaagagtaagtgttgtttatggctacccgggaaagaatttattaacagagacattgtttactttgaatagagtaggacttattttgatactaaatataacatagcaattatttatttggttttaaaaaagtctttaaagtttctttgtcatattctccctacataaatatatacctctatatatttatttataaacatgtttgtaggcatgctgatcttaaaaactctgttaaaacttttacatttgctatatataattttaaatagcctgtataagataataatactaagataggaaaatgattatagctttttatccccctccttttaagttattcttcctgtctttgtggtagcaatggccaatactgtgttgaatgggagtagtgaatgcttttaattttttaaatttagcgtgatgtttttggtagggtgctggtaaccagcttttaaggaatcaagctcagggatggagagatggctcagttgggaaagtgcttgttttgtaagcataaggagttgaatttggatcccaaaaaaagcatgggaaaagctggtggatctctgccagttctagtctagccagagtgagctggtgaaagcctgcttcaaaaaaaaaaaaattctacttgtattagggtaagatttctatttccctcccttctttgttagatgcgactagaacctggggccgttcatctgcagcatccactgctgagctacacctgggccctgtagtgaatgctttcctcctctggttatatttttgcagataagatcttactgtgtagcccatctgcctttgtctctcaagtgctgaaagttcaggtgtacaattacccagatacatgagtttttctaatagttattaagtatttattcttattgtatgcttttcaaatttcttggaaagttttccagctcttttctttaatttgtttatttggcaaatatttacatttaaaagatgtgttaaattatccctacttcattatgaccacccaaatgctgggacttaggggtgggctactatggcccactaagtgttagatttttactttgttagattgcctatatgtttgctgttctctgatttctaataagcatttatcaataaaatttacatgtgtatgaaagacatctcatcatgggatgagaaggagaaagagagaaagattgagactgaattattctgccaggttccaaacattgacatactgtgttagtatgtccgtccattttctggtattttggggaggatcctaacttgcaaggctctttaaagcctgatttgtaactgtggggaagaagtgaaatcaggaagccagatttacttcttaaagctttacacacttcattgagaaatttctgattttgttaaattaagaagcctagtttcaattctgtttttttttttttgacattttttttttcacatgaatcagacattccctggttgtcctttctgagaagtccattgagctggtctaaggtctgtagagacaagtgtagtcatgaggaccagccgggtcagagcagaacacccacgtgacttgtgggtagtcgggagccattctttctttaacatttagtagactcctgtatatttcacctcttgactttaccttccctgagatttcacagaaactcaacttcctctttccctgcactgaaaccactattcatggatgataagaatcccaccctcccctcgctgagggagaacggccacagcatagtgtttctgcactgcgcgtttgtggccacagcatagtgcttctgtactgcacgtttgtgacttgcttttgcctggtttttggttatgccatgcagtatataaaagaatgcataaaaattaaaataaaggtagaactagataatgttcaaaactcctttatttgtaaatcctcctctttaaaaaaaaatctaaacatgacaactatcaaagcttgcttgagatgtaactagccaagtcctttcactccagaagatgtggaaaaagagatttacattattcctccattgtgcttgatcctctttctctccatgtggttcatagaacagctgtagtcagtagatggttatacatttttgtgaaaggattttgtcctgtgcatgcatttgcacactccttactgaattttcaaaagtagggttaaaagttagcaaagtcggacagcactgaacatgtactcagtattggaagattcatagttcagtctgtcgagtgatttctcctgagaagctctgagcaagcatctgttcacccagatggacgccaatgacagtccacagaaaagaagtctaccaattctagtagcctagcgaaccaatgagcccgttgcatgagcatgggtgacttgggcagctgcatcactgaaaagcccaacccagcatgggtggactatgctttaaagctgtatccctggaatttcctgcacagttggtgggcgggcggctccatgaaagagccctcattcctcccccaaatcacttactgcttataggacctctgggggggggggctggggggggggatcannnnnnnnnnnnnnnnnnnnactgtcttgtgagttcacagaacctttctccctttgtcttctctgtttggggatgtttcacccagaaggaagtggccgcccagtgttttttcaagcccccgttcattttcaggtaggccaagcaccattcaggggaggttttggctgacagacctgtaggtatttcttttcttttctttctttctttcttttttttttttttttggtttttcgagacagggtttctctgtgtagccctggctgtcctggaactcactttgtagaccaggctggcctcgaactcagaaatccacctgcctctgcctcccaagtgctgggattaaaggcgtgcaccaccacgcctcggatggtacttattttcatattgggtagatggaaggtaagtcagcagtggactgggagatatgtaggagccccaaaattagggccaaacatctaactagtccaggaaacccaccaatgcgctctgcgcaccatagcaatgccctaatagtttcttggaggactgtcttctgctagtcattgttggt

SEQ ID NO: 52 - DNA, 2858 bp, Mus musculus
gctccaagccccttccgggtcccaaacactgatgccccctgactggctaaactaagccacgcatccctggcgtgagccacaacccagaagggagcaggtgggcttgcagggttgacttgggataacggaccagttgtggactactgctctcaggagagtgatgatctagctttggtagggaaggggaggggctgaggcgtgggcagggcagagcaaagggaccagagccagagcctggggacaggttttaccactgagctgttgcagtggcggcggaggccgggattcgtgccacctgtccgagtgccacctggtgagcgtggcgcctgggtccaggcccctcctcccgcggcttccctctctcctccctggcccacactcttccttggcctgggaacctaccacaaccgccatcggtgctgaccctcgtttccacccaattttcccccttctctcagaactcagagtatccgagggtccaaacattcgtccagcggctgaccaccatgccgcgctcattcctggtcaagagcaagaaggcgcacagctatcaccagccgcgttctccggggccggactactccctgcgcctggagaccgtgcctgcgccgggcagagcagagggcggcgctgtgagtgcaggcgagtcgaaaatggagccccgagagcgtttgtcccccgactctcagcttaccgaggctcccgacagggcctccgcgtcccccaacagctgcgaaggcagcgtttgtgacccctgctccgagttcgaggacttttggaggcccccttctccctccgtgtctccagcgtcggagaagtcactgtgccgctctctggacgaagcccagccctacacgctgcctttcaagccctatgcatggagcggtcttgctgggtctgacctgcggcacctggtgcagagctatcggcagtgcagcgcgctggagcgcagcgcgggcctgagcctcttctgcgagcgcggctcggagccgggccgcccggcagcgcgctacggccccgagcaggctgcgggcggagccggtgcgggacagccagggagctgcggggtcgccgggggcgccaccagcgctgcgggcctggggctttacggcgacttcgcgcctgcggcggccgggctgtacgagcggccgagcacagcagcaggccggctgtaccaagatcatggccacgagctgcacgcggacaagagcgtgggcgtcaaggtggagtcggagctgctttgcacccgtctgctgctgggcggcggctcctacaaatgcatcaaatgcagcaaggtgttctccacaccgcacgggctggaggtgcacgtgcgccggtcccacagcggcacaagaccctttgcgtgcgagatgtgcggcaagaccttcgggcacgcggtgagcctggagcaacacaaggcagtgcactcccaggaacgcagctttgactgtaagatctgtggcaagagcttcaagaggtcatccacgctgtccacacatctgctcattcactcggacacccggccctatccctgtcagtactgtggcaaaagattccaccagaagtcagatatgaagaaacacaccttcatccacacaggtgagaagccccacaaatgccaggtgtgcggcaaagccttcagtcagagctccaacctcatcactcatagcagaaagcacacaggcttcaagccctttggctgtgacctgtgtgggaagggcttccagaggaaggtggatctcaggaggcaccgagagactcagcatggactcaaatgagtaccctggcagcccgcaacaccagctgtgtaacactaccgtgagggatgtcttccctgcctccctccagccccttctcaggccctgagtccagtgtgcaaagctcatcatggttagtccccttcaccttccttcccggagctgctggaggagatgaactcccgtttctaaggtcaacccagagtgggaaccgcagcagcagcagcagtcgtctgtgctttgggcttccctacagctgaagatggggatcaaatgagatcttgcacctcccagttcttcccttttttgctgtctcacaggccagaatgaactctgggcagctgctacaagaggaggcatcacctcttaagctttgagcgccactgatgcatttattgagaacgaatgaacattaattttctcttctggggagactgctgactcctttatcctccaccagactctggtttagggaaggaacctcgttcctttgaaatcatcagatgcaccatcaagcctgccacgagaagaaggggacttggtgatgagagggagtcagaggtcctgtggtgccatcagaggaggtgaagctgtggagcagctccggggaacagggtcttcacttactcagcgagtgattattggccgcaggttatcagagtaaggaactgtgctaggtatgggagagccagagattaaagtcataggccctaacccccaaaagctatcagttggacttcaacatagctagagcctgtgttctgtgcttccaagggagttctgaagaaggccacacaaacattgggacttctttttgacacttacggagtttttcaagtgtaaacaaataggaactggaggattatttctaaagttcatgagtaaatccagcttttattgttaggtgggactttattagatgcctgcgctgggagatgtggggtgaaggctatggcctcagctcctgccccttatcatcttaggaacaacttatttttcctgtgagggttgtagacgttcctaaatcttcttgagtgcattatgtattagcataatcatatttattagaatgttgttttaacttaataaagtattaagatt

SEQ ID NO: 53 - protein, 476 aa, Mus musculus
AWRLGPGPSSRGFPLSSLAHTLPWPGNLPQPPSVLTLVSTQFSPFSQNSEYPRVQTFVQRLTTMPRSFLVKSKKAHSYHQPRSPGPDYSLRLETVPAPGRAEGGAVSAGESKMEPRERLSPDSQLTEAPDRASDNSCEGSVCDPCSEFEDFWRPPSPSVSPASEKSLCRSLDEAQPYTLPFKPYAWSGLAGSDLRHLVQSYRQCSALERSAGLSLFCERGSEPGRPAARYGPEQAAGGAGAGQPGSCGVAGGATSAAGLGGDFAPAAAGERPSTAAGRLYQDHGHELHADKSVGVKVESELLCTRLLLGGGSYKCIKCSKVFSTPHGLEVHVRRSHSGWFACEMCGKTFGHAVSLEQHKAVHSQERSFDCKICGKSFKRSSTLSTHLLIHSDWYPCQYCGKRFHQKSDMKKHTFIHTGEKPHKCQVCGKAFSQSSNLITHSRKHTGFKPFGCDLCGKGFQRKVDLRRHRETQHGLK

SEQ ID NO: 54 - DNA, 31050 bp, Homo sapiens
  misc_feature (1)...(31050): n = A,T,C or G
attttggtcctgttctatggatgtgaccttgtagggtctcatttgtgtgctatgcagactcaaaacaatttcctggggtaaagcttacacctgactttggttttcccttgtgggtgagaaagcctttgatacaaccagctgttcttaggtacctcagctttcacaacaggtcaaacctacgtttgaattgtctattaaggcatatggatctgaattttaaacaacacagaatagaattccaggatttcgctgagagtataatctcatcctgtcatcaaatatttattaaaaactcagtaaggagaagcaattttcagagaggattatttgaagcatataaggattatttcagacagtctagtctcaaacacatccatggattaaaccagatcagtagacagctggtaccttgctagacagtgtcatagtttcccaaagtatagtttttatcaaattgcacttttgtgtgatgtcaacaatgtatattgagtgttatgggaaataacatttgttgcatttattttaagattgtgtaagaacactattaatttctatcacaataactactttttaggatcgcagtgggaaatatgtctgttcttcctggtaccaagaacagttaatagtcatagttatctcaattttgtgattaaggagagaagtggggaaaggagggagggaagagagggtaagaggaagggagggagggaggaaaggagggaggaaggcaaggaaggaaggaaggaaggaaggaaagaaggaaaacatttccacctgccctccaacttcctcctcaaagaatcccagcaaannnnnnnnnnnnnnnnnnnnnnnnnnnnnnnnnnnnnnnnnnnnnnnnnnnnnnnnnnncaatgagtagtttgggttagagaagcattgtggaatatgccaaatgctttctacaatccaaactgctaaatgcttctcaaaccagaggcaaaaatatctttgtgcaaaaagtagatctcgttattctgcagccggtagaatattttgatgctgcaaaatcctaaccccaagcctcatatcaggtgggtttcagaactatagtggcaactgtgcaaagtgctgactggtcaaaagaaaagtcttgtatcccaggccagacagccatctcagaggcctgggataggagggaaacattctttatttatttgctcctttattcaccttccttgctacattcacttctgagtgagttgaaggagagcagagaccccatatccaatctatgtacctcacatctggcatggcgtatgacaaagattgttcagtaaatatttgttgacttgaactgtacaactgagtccacaaactctgtcctcctttaggacatgtgccagcactgggactttccattcctcaggcctcagtgactgcttttaaaccaacctccacactggtcacccctgggtcagcatcctgagcagagtttatgcctggtgtttccttgtctccaccaccccattatttcttccactatcgaacaaagtgactgtgaggtacatgagcaaatctctgatttgtacagaagctctgttcattctccagctgatgaggggtggggggtatgtgtacgtgtgtgtgtgtaggtggcgtgtatgttcatgtgggttttttgtttgtttgttttttgtgttttttgttttgttttgtttttttcagatggagtctcgctctgtcatccaggctggagtgcagtggcacgatcttagctcactgcaacctccacctcccagtttcaagcgattctcctgcctcagcctgccaagtagctgggactacaggtgtgcaccaccacacctggctactttttgtatttttagtagatacagggtttcaccatgttggccaggctggtctcaaactcctgacctcaggtgatccacccaccttggcctcccaaagtgctgggattataggcttgagccactgcgcctggcccttcatgtgttttaattaaagctcaaatgaaaactcatgacagtccctactgataaattgctccttgccagacagtaagaacagttgagaatattttaggaagaggcaatgatcccctagcacttctctaccagcctcagctcagatgaactgcttggctttatggggacacagaccatgacagttggaagtgatccttggaaagcctcctgtgggagataaggtccaggagctcaggaagggagcctgagtctctcaggtctaattgggatatcagaaatccatataaaaatggccggtcatggtggctcacgcctgtaatgccagcactttgggaggccgaggtggatggatcacctgaggtcaggagttcgagaccagcctggctaacatggtgaaaccccctctctactaaaaatacaaaaattagctggacgtggtggcaggcgcctgtaatcctagctactcaggaggctaaggcatgacaatcgctggaacccaggaggcggaggttgcagtgagccaagatcgcaccactgcactccagcctaggtgacagagcgagactctgtctcaaaaaataaaaaataaaaaaaaaaagaaatccacataaaaatgcttcctggcaagtctcaggggctgcctgcagtgcacaaagctactgcccctacaatgggaggccttgaggcctacctcctgcagcagtccagggtcaggagtcaggctggcctgcgttggaatcaggactctgtccttctctggctatgtgatctggggaaggcaagcctctctgagtctattcccacagcctgttcattgggatggttagagataatgtacataaaaagggccgccaatagtgcctgttgtaatagtgacaataactaacacttagtaaatgcctactctatgctttacatgtattaactcattgaatctgttccagaatctatgaagtaggtgttgttattgtaaccatgtttgcagatgaagaaactgaagtacagagaggttaaggaacttgtttaaggatagaagaaggcagagccagaatttccagacattagaaatctggcttagagtccatgctcttaattgctacactcttctgcctcttagctactgtggtatttataatttttcttggcaggggtgtaattattacaatcattcaggaaaataatttctcaatatgtgtccatagacttgaaaatgttcctagcctttagctgggcatggatgctcacacctgtaatcccagcagtttgggagtccaaggcaggaggatcaccttgaggccaggagttcaagaccagcttgggcaacatagtgggcctacctctacaaaacaaacatacaaacacataaaaaacaaaacacaacaaaaaggaggttcctaacctttgatccaggaggggaatcacttctggttatgaatcctaaagaaagaatcctacatatagaaaaacccaggtacaattaaaaaaaaaatcacagcatcatttatagtagggaaaaagggaaataatccaactgtccagtaacataataaataagatcacagcacatcatctaaatggacaattatacaatatcatcatagtagactctttttttaagactggggggaaaacactctgaaatattactagaggttgaactaaggtagtgagatatggagctgtatttttactttttattttgtctactttacaaatgttctattgaattaacataactatgctgctttcagcaacttaaatactattattttctgacctttggatgagcagcatgcctgccaagtccacactgttgggagtgatgggttgggccttgcagcaggagaggagggaatgtgtctctcctccaccatcccatccttactacctctcaagtctgtgacaggcacgtgacttttggctccaggcttttctaccctatgctggatgtgaaacaagtaatgtgatttggtggaaagaaacaatatttggaatcaacagatttggttggaataagaaagctgctagttatcagaacctgggcttcttaaaccactggtgtctcccccttttttttttcccttcctttcccacgtatggaccactggtgtccttatccataaaacagaaatgaccagaatgcctgccttggagaactcccagcatttctttctcttctatgaagcccaggatagcagctgaggtggaacatccagtgggctgcatctacctatcatcagttcatgctgtccttctgtctgtctctttgggcgagcctgaggttgttcatgtgggatgatcctccaagccccgcctcatgcagacagcagcggccagagattttcagaagcctcaactcccaccttacctccagatatggggtcatatatttcctttaagggagttgtgttttgtgagtaatttttaaaatttacaatatataggctgtactattttaaagtgaagtgtttcatctggggtagggtgaactaatcaccaaacatactggaggaaatggtgaaaaactcaaaagaaagataatttttgcattttctctcgtttgattttccattcacaaagcaaactatactccttttttttcctataaaagttcacactggctgtgtttctatgaggagtcatatcacatagctcacagtaagatgacacttcgttcaatctattcttaggaacaatgtaaaaatacgtatgtggtgagattaacaattttcttatttgaactctgaacaccaaagctgacagtctcctccctcttcagatgtttgaaatcctttatgtaaaagcctaatttaaactttatagtaatagataatatttttaaatgtaatgagatttaaatatatcagtcccaaaatgtttattaaaagcaaatgtttttcttcatgtttgaaaagtaaaaaatattaatacaaagttggttcttataccttaagtcttctattaacttatctccatgtttctcctttacttaatttcccaatttttgcatgagctggtacaaaaaacattacccacttcccacaaatgatggtaccattaaatcgtattctgacttatggtgtcagtggaattctattttgatagcctgcttcttataagattagaaggggataattatattacctgtcattcaagttaaggcatcacacagttatcagtttgcatttattttctttgaattaatacaattaaaatatatgtaattcttatttcagtttgactacacctatcatgacacctaatccaaagacaaaaattaaatagtttgttagtatacatgaggataaaaccatggcaatatgacagggtgtggttctaacaagtacttcctgtacataaaataaagaccagttctatatctggtctttaatccaagtcaaacttttccttagtttatttttgtagtcttttaactgttaagtggtatgaattcttttggcttatgcattacataagcgccatccataaaacttgttctggtatgtatcaaggaccgtacaaataatcattgttggatctagaaatttcacccctaaaaatatatcctaaggaaataattccaaatgtagggaaagctatattcaaaaatcttttcattgtattacttaaaatagtaaaaactcgaaacaagctaaatagtaagatgagagtgattgagtaaattatagtaaactagctgatagaacttttttatagcaattgaaaatgaaagattgtatataaaaagcaaggaagatgattgtcatgatttttatttaaataatttttactataaaaagtttatattccatttaagaaaacaggaaaataaagagaatagaaaaaagaaaaataattataatattcgggaagaaaagcagactactcagttgtatctgtaatacgattataatttttgttaaataatagagcaagaatacttgaaagttgttttacagagttttattcttttcttatcagatatatgtagcataatttgtaatatagtcttatttatattattatttataatatacaaataatatagcataatttcttatacgtttatatttaaaactcagaaaccctcatttggagcattctcccattcttgctgcccaaatgaacaggtaaagagtgcaaattaaaagattgttccagctgggcattgtggctcatgcctgtaatcccagcactttgggaggctgaggcaagtggatcacgaggtcaagagttcaataccagcctagccaacatggtaaaaccccgtctctactaaaaatacaaaaattagctgggcgtggtggtgcatgcctgtaatcccagctactcggcaggctgaggcaggagaatcgcttgaacccggtaggtggaggttgcagtgagcagagatcacgccactgcactccaacctgagcaaaagagcaatacttcatctcaaaaaaaaaaaaaaaaaaaaggttgctccacagtcttgcgtggtaggtaccagtattccgactttacaggtgagaaacaggctgagagttgagctaacttatccaaggtctcaaagctggtactagcagaacagagattgacaatcacatcttactagcttttgaatgcctgaactcttttttcccttcctggtatcatcatggtgagaatcaaatgaggcaaacatagaaatgtattctggaaatgggggtattgcccctccctggggtttcaggatcacccacttttcccatgccgtcccacaaaggacagagatcataattgtaaagctttgtgaaaaaataaacaagatactggtaatatcctgttacaattttctttttgaaaatgtctcagccaggcacagtggttcacgcctgtaatcccagcattttgggaggctgaggcaggaggatcatttgaggccaggagtttgagaccagcctaggcaacataacgagactccatctccactttttttttttaatgtctcaaatcttctgttgtagggaaattctgatctatgagaggctgcttgaaataaatgggctactggccaaggcttggaaatgtttgtggtatgagaaggtcagttgttatttggcatcgacagatacattattattgctatttagaaacaattagtttctaaatatttgaaacaattagtttcaaattattgaaaaggcagtaaatgtaaaattattcctttggaaagaccctatttatagaaaattgtgcctcaggtatacattttgcttaccattagatctatttcaattccaaaggaatatatggagggagagggagtatttgtagcttctaaaaatgttcatggaggggtggcttattctctttgcccttagtttaatagaagcaagaggtagtttggagtagcaggaagtcagagatgggttcattgtatcgttatttctagtcctagctcttcactgtccttggcaaggttcttaacctctctgggttcccctcttcttacctttctcctattcttccccaagtgtgggagtcacacttcaacactatacacccgggagtgttgtgttgttaaaaagtattgttaaatactttttaaacgtgttgaatacttgttaaatactttttaaatgtgtatttatttatttgagttagtactacatacacatggttcaacatgtaaaagacataaagggaaattcagtgccatctccctcccacctgctcctttctgcgtgtccctgttccagttctcagttttctttttcaaactcagaaatcccaagaatctgtgaagggcaaatgaaaagcaaaatgactagactaaatctgaatgaaagggatttattctaaggtgatactgctcactgctcaaggtgcttatctgcccccttcatgggctccctcaagttttctgagacttcaaacagcaacactcaactaaactataaaatagtcacagcaccttttcgagaaattttgactttgaacttgctaatatgcaaaggaaatagtccaaccatttctctagaacttggttgataagaaattttattttgtcccatttataattttattctaaaaatttgtttttttctgctatcgagtaggagagaagggaataagggaaagatttgtttttgcactactgtgagatttttataccttaggccaggacaaagcacacaagaaataaaatattaacaaaatgtccttaattttcctttctgaccaaaattgcttgcctctgcatttatatataaagaagggatgtgttgagcaaatgaaggaggacagctaggcagacaagatttgcccagcgcctggcatacaataggggcacaggtcattgcttaacaaaacgtataatttattaatacatgctcgaagcactgctatactaaccaaatattccctgcaaaattttaaatttacagtgcaaaataagaataatttaaaaactgtttctagaaaaagagctttaagggcttcccccccataacaatttaagattaacctagaacatggtagttattttgcaagaactggggagcaccactctcttctccttgtgcatgtctgacattggaggcctattgtgcacgaagttgtgatcaaaatccaagtcaattcattttgaaaagtaacatgactacaacatccatccactccaatgagcaaagggtgtaggctttgagtatacacagcaggccacacactatgggtcatggcatacagtctagcgttggaggttgctgcatttgttcatgtatctatgagttaggttttaagttttttccccctgttctattaatataattaattagttaattaaccccactcattcatttactcagtccacagccttttgttaagagcccgcctaggacataaagatgaagatccagtgcctaccctcatgaaacatagaatccgagcgaagaaggcttactttgcaatagtcatccaagtggtgcttttatggcgctttactgctcccgccaacacccagtgcctgggtatgacctcaggcggtggcagagcccgcgtgcgaggtcccgctctccctggcttgccccggcagggcggagtcagcctagcagccgccggcgctgcccccgcgcggcctttaattttgcagctccgaccaccggaaattagtcgaaggctgagcggacccggtcgagagccggcgagctccgcgcagggagggtgcgcccaccggtcccgccgggcgcccgcgggacgcgccgccagggccctctccgccgggggctcggcgctcgcccacctcttccaaatttaaccattacctaaatccgaagggaaatgagcaaacctctcggattgggtgtcaaggtattttcagcctcgttgggcgtatttatccccaagtgtttccacaacaagctatttcggggccgcggggcaggtttcgctctgnnnnnnnnnnnnnnnnnnnnnnnnnnnnnnnnnnnnnnnnnnnnnnnnnnnnnnnnnnnnnnnnnnnnnnnnnnnnnnnnnnnnnnnnnnnnnnnnnnnnnnnnnnnnnnnnnnnnnnnnnnnnnnnnnnnnnnnnnnnnnnnnnnnnnnnnnnnnnnnnnnnnnnnnnnnnncgccccccacccctctctcgccagtcaatctgtgtcctcaatctgtggcttctctcgctgcggaagtctccctggagccaagaatagttcattttctttcaagtcatttctagtgcctaagtgtccggacctccaatttcccccatcccctgccgacccacagggagagaactgggaggactactaaggggcgcgcgggacgggctggaaaggccaggccccccaccgcctggccacttgcgcaaaggagcgcgcccggccgcccgacgggggttgggagcaggtctgggagggctatgcgagcgactcagtaacgctcaggaagtgaagcttgtggttttgggggctgagctcggaaggagaattttttttttttttaagtcagagagatagagcggtctctcccgaaagcaagattccgtttgaaaactctcctagcgcggtgcccgcgccgtgactccgcaggtaggtccgccgagcctgttctgcgcctcctgccctggtgggggcggccgcggggactcgcagagcactggcactgcgggggcgatcagagggcgcgggcggtttcccacctgctgcggaccgccgtgcgggagcccagagagctccggcagctgggttagggcgcgacccgcgcagtgtgactggaaatctggagctgggggcgcgcagcaggcggtctggtggttcggcaggggagccaaatccaccagggaaggaaacatctggtggggaggcggcggcagctgcgctcgggaggacgcccccttagcgccctcggctccctccttcctgggcccggacggtgaggagaggcctgagcgcgcggaggggccgccccacctcccgcgccagctgcagcgcggggttgccttcccacgcgctcggcccaggccccggggcccctatctcctccaaactctgtcgctccccacaggaaccagcaaagcgggccggggtgcgagagaggcgtgggcttacagcccgggtggggaggcggcctccgcgtccgcctggtctctggtggcgccagcccagacccagctccggcgctgacagttaccccgcccccatctgtcccgctcccagccaacgtgggtccaagctgcagcgggaccctcgggacaacgccactccgtttttcttttcttccgagtttcgtggctgtttaaagaattgggtttggggtttgtggcgtctaattgtacggacgagaagtgcaggaagcgacaaagctctagccctaggagccaccccggagggaggcggatggcactctcacccctaggggcattctggcgcttgggtagcgggaaacttcgcgggagccccgcgacacgtcccaggcgtcttttctcccaggtctattcccattcctccggagaaggggacacaatggggctggggatctggagcagggggcctgcaccctacagggaccaaggcctgtaggactcgtttgagctgagagcgccaacggacagacgtagactgtgtggcctgcatcttgcctaggaagccgaggggctcctagtccggcagtggaaacagcgcgaagccggaggactgcaggtcctgccccggcccagagttcccagcaccctcgtttctgaaccagccgaggccacggagaactgctgtactgcagctcacgtgtgaacccggtcaccatcgccttcaccccgggaggaaggcagattcgtttactccagaccacctcgactgtggggtaccgcccccggagccggctggagcctagcggcaggcgcagccacgccctcccgctgcgctcagatttcgacctggtattaggtgaactgattgggggttaatgagagcgacgccccgggcagctagttccctcccgggcccgggcccgacccccgctctctgctaatgcagcctgcgcgctctggcgtcctgtcttttttgtctgctaaattgtcggtgcactaccgactcgggacacctagcatttcccagtcaacgttcgtggatcgggctccacctccctaggacaagattttttggtgagcagaacggaaagtgcttttttcccgggacctgattcccgaggttaggtctccatggtctgggatggctcgccgcagcctcgaccggtgcccgccgcagccgggagtccaagggcaaagtttctcctacgtggggcactagtgaggggcgagtgggatcacccagatgcgagtttctcctggggcgggggttggtcgtctgttgttcccctcactttcctgtccctttgctctcccacctcctttctctggcctctgctgtccccaatccctctgctgctgtcctcccgccgccccacagttttatcttgtgttctgttcccccctccccccggtcctttcactccagttggtagctggctcttggaggtcttggctccttgccccttccgggtcctcgaccactgggcatccccggcccctaaaccgatccgcgtgtccccgccctccctcgccagccgtaaagcacagccaggcaggcgatgagtagctgagttggggtaacccacccgatgggaactacagctctccagggagtttgattgccggagcgagcttcgctaggaaaggggaggagctggggggcgtgggcagggaggaggaaaggggcctgagacagggccccgggacaggttttaccgctgagctgtgtcagtggcggcggcggcaacgacggcgggttcgcgccacctgtccaagtgccacctggtaagcgcggcgcagcagggtcaagcccctcctcccgtgggccctctgcgcgcctccctggcccgcgctctccctccgcctgggtgcccagtccgccgcaccggagagtactgacccacgtctccacctggttttctttccctctcaggtctcctccgggctggggctgagcaagccctcggagtgaccgtgggtgacagcggctccagggactcttggggcgcagtggggaaagtgccggaccaccatgccgcgctcatttctcgtcaaaagcaagaaggctcacagctaccaccagccgcgctccccaggaccagactattccctccgtttagagaatgtaccggcgcctagccgagcaggtgcgaggcgcgcgcgggccaggcggggctgctcccccggatgcctactgcacctcggcacaccattagtccggagctgggaggggctgccccaacgtcccttttgctgctgtttttgtttcctactgtcctggttcctccgggtttgtctnnnnnnnnnnnnnnnnnnnnnnnnnnnnnnnnnnnnnnnnnnnnnnnnnnnnnnnnnnnnnnnnnnnnnnnnnnnnnnnnnnnnnnnnnnnnnnnnnnnnnnnnnnnnnnnnnnnnnnnnnnnnnnnnnnnnnnnnnnnnnnnnnnnnnnnnnnnnnnnnnnnnnnnnnnnnnnnnnnnnnnnnnnnnnnnnnnnnnnnnnnnnnnnnnnnnnnnnnnnnnnnnnnnnnnnnnnnnnnnnnnnnnnnnnnnnnnnnnnnnnnnnnnnnnnnnnnnnnnnnnnnnnnnnnnnnnnnnnnnnnnnnnnnnnnnnnnnnnnnnnnnnnnnnnnnnnnnnnnnnnnnnnnnnnnnnnnnnnnnnnnnnnnnnnnnnnnnnnnnnnnnnnnnnnnnnnnnnnnnnnnnnnnnnnnnnnnnnnnnnnnnnnnnnnnnnnnnnnnnnnnnnnnnnnnnnnnnnnnnnnnnnnnnnnnnnnnnnnnnnnnnnnnnnnnnnnnnnnnnnnnnnnnnnnnnnnnnnnnnnnnnnnnnnnnnnnnnnnnnnnnnnnnnnnnnnnnnnnnnnnnnnnnnnnnnnnnnnnnnnnnnnnnnnnnnnnnnnnnnnnnnnnnnnnnnnnnnnnnnnnnnnnnnnnnnnnnnnnnnnnnnnnnnnnnnnnnnnnnnnnnnnnnnnnnnnnnnnnnnnnnnnnnnnnnnnnnnnnnnnnnnnnnnnnnnnnnnnnnnnnnnnnnnnnnnnnnnnnnnnnnnnnnnnnnnnnnnnnnnnnnnnnnnnnnnnnnnnnnnnnnnnnnnnnnnnnnnnnnnnnnnnnnnnnnnnnnnnnnnnnnnnnnnnnnnnnnnnnnnnnnnnnnnnnnnnnnnnnnnnnnnnnnnnnnnnnnnnnnnnnnnnnnnnnnnnnnnnnnnnnnnnnnnnnnnnnnnnnnnnnnnnnnnnnnnnnnnnnnnnnnnnnnnnnnnnnnnnnnnnnnnnnnnnnnnnnnnnnnnnnnnnnnnnnnnnnnnnnnnnnnnnnnnnnnnnnnnnnnnnnnnnnnnnnnnnnnnnnnnnnnnnnnnnnnnnnnnnnnnnnnnnnnnnnnnnnnnnnnnnnnnnnnnnnnnnnnnnnnnnnnnnnnnnnnnnnnnnnnnnnnnnnnnnnnnnnnnnnnnnnnnnnnnnnnnnnnnnnnnnnnnnnnnnnnnnnnnnnnnnnnnnnnnnnnnnnnnnnnnnnnnnnnnnnnnnnnnnnnnnnnnnnnnnnnnnnnnnnnnnnnnnnnnnnnnnnnnnnnnnnnnnnnnnnnnnnnnnnnnnnnnnnnnnnnnnnnnnnnnnnnnnnnnnnnnnnnnnnnnnnnnnnnnnnnnnnnnnnnnnnnnnnnnnnnnnnnnnnnnnnnnnnnnnnnnnnnnnnnnnnnnnnnnnnnnnnnnnnnnnnnnnnnnnnnnnnnnnnnnnnnnnnnnnnnnnnnnnnnnnnnnnnnnnnnnnnnnnnnnnnnnnnnnnnnnnnnnnnnnnnnnnnnnnnnnnnnnnnnnnnnnnnnnnnnnnnnnnnnnnnnnnnnnnnnnnnnnnnnnnnnnnnnnnnnnnnnnnnnnnnnnnnnnnnnnnnnnnnnnnnnnnnnnnnnnnnnnnnnnnnnnnnnnnnnnnnnnnnnnnnnnnnnnnnnnnnnnnnnnnnnnnnnnnnnnnnnnnnnnnnnnnnnnnnnnnnnnnnnnnnnnnnnnnnnnnnnnnnnnnnnnnnnnnnnnnnnnnnnnnnnnnnnnnnnnnnnnnnnnnnnnnnnnnnnnnnnnnnnnnnnnnnnnnnnnnnnnnnnnnnnnnnnnnnnnnnnnnnnnnnnnnnnnnnnnnnnnnnnnnnnnnnnnnnnnnnnnnnnnnnnnnnnnnnnnnnnnnnnnnnnnnnnnnnnnnnnnnnnnnnnnnnnnnnnnnnnnnnnnnnnnnnnnnnnnnnnnnnnnnnnnnnnnnnnnnnnnnnnnnnnnnnnnnnnnnnnnnnnnnnnnnnnnnnnnnnnnnnnnnnnnnnnnnnnnnnnnnnnnnnnnnnnnnnnnnnnnnnnnnnnnnnnnnnnnnnnnnnnnnnnnnnnnnnnnnnnnnnnnnnnnnnnnnnnnnnnnnnnnnnnnnnnnnnnnnnnnnnnnnnnnnnnnnnnnnnnnnnnnnnnnnnnnnnnnnnnnnnnnnnnnnnnnnnnnnnnnnnnnnnnnnnnnnnnnnnnnnnnnnnnnnnnnnnnnnnnnnnnnnnnnnnnnnnnnnnnnnnnnnnnnnnnnnnnnnnnnnnnnnnnnnnnnnnnnnnnnnnnnnnnnnnnnnnnnnnnnnnnnnnnnnnnnnnnnnnnnnnnnnnnnnnnnnnnnnnnnnnnnnnnnnnnnnnnnnnnnnnnnnnnnnnnnnnnnnnnnnnnnnnnnnnnnnnnnnnnnnnnnnnnnnnnnnnnnnnnnnnnnnnnnnnnnnnnnnnnnnnnnnnnnnnnnnnnnnnnnnnnnnnnnnnnnnnnnnnnnnnnnnnnnnnnnnnnnnnnnnnnnnnnnnnnnnnnnnnnnnnnnnnnnnnnnnnnnnnnnnnnnnnnnnnnnnnnnnnnnnnnnnnnnnnnnnnnnnnnnnnnnnnnnnnnnnnnnnnnnnnnnnnnnnnnnnnnnnnnnnnnnnnnnnnnnnnnnnnnnnnnnnnnnnnnnnnnnnnnnnnnnnnnnnnnnnnnnnnnnnnnnnnnnnnnnnnnnnnnnnnnnnnnnnnnnnnnnnnnnnnnnnnnnnnnnnnnnnnnnnnnnnnnnnnnnnnnnnnnnnnnnnnnnnnnnnnnnnnnnnnnnnnnnnnnnnnnnnnnnnnnnnnnnnnnnnnnnnnnnnnnnnnnnnnnnnnnnnnnnnnnnnnnnnnnnnnnnnnnnnnnnnnnnnnnnnnnnnnnnnnnnnnnnnnnnnnnnnnnnnnnnnnnnnnnnnnnnnnnnnnnnnnnnnnnnnnnnnnnnnnnnnnnnnnnnnnnnnnnnnnnnnnnnnnnnnnnnnnnnnnnnnnnnnnnnnnnnnnnnnnnnnnnnnnnnnnnnnnnnnnnnnnnnnnnnnnnnnnnnnnnnnnnnnnnnnnnnnnnnnnnnnnnnnnnnnnnnnnnnnnnnnnnnnnnnnnnnnnnnnnnnnnnnnnnnnnnnnnnnnnnnnnnnnnnnnnnnnnnnnnnnnnnnnnnnnnnnnnnnnnnnnnnnnnnnnnnnnnnnnnnnnnnnnnnnnnnnnnnnnnnnnnnnnnnnnnnnnnnnnnnnnnnnnnnnnnnnnnnnnnnnnnnnnnnnnnnnnnnnnnnnnnnnnnnnnnnnnnnnnnnnnnnnnnnnnnnnnnnnnnnnnnnnnnnnnnnnnnnnnnnnnnnnnnnnnnnnnnnnnnnnnnnnnnnnnnnnnnnnnnnnnnnnnnnnnnnnnnnnnnnnnnnnnnnnnnnnnnnnnnnnnnnnnnnnnnnnnnnnnnnnnnnnnnnnnnnnnnnnnnnnnnnnnnnnnnnnnnnnnnnnnnnnnnnnnnnnnnnnnnnnnnnnnnnnnnnnnnnnnnnnnnnnnnnnnnnnnnnnnnnnnnnnnnnnnnnnnnnnnnnnnnnnnnnnnnnnnnnnnnnnnnnnnnnnnnnnnnnnnnnnnnnnnnnnnnnnnnnnnnnnnnnnnnnnnnnnnnnnnnnnnnnnnnnnnnnnnnnnnnnnnnnnnnnnnnnnnnnnnnnnnnnnnnnnnnnnnnnnnnnnnnnnnnnnnnnnnnnnnnnnnnnnnnnnnnnnnnnnnnnnnnnnnnnnnnnnnnnnnnnnnnnnnnnnnnnnnnnnnnnnnnnnnnnnnnnnnnnnnnnnnnnnnnnnnnnnnnnnnnnnnnnnnnnnnnnnnnnnnnnnnnnnnnnnnnnnnnnnnnnnnnnnnnnnnnnnnnnnnnnnnnnnnnnnnnnnnnnnnnnnnnnnnnnnnnnnnnnnnnnnnnnnnnnnnnnnnnnnnnnnnnnnnnnnnnnnnnnnnnnnnnnnnnnnnnnnnnnnnnnnnnnnnnnnnnnnnnnnnnnnnnnnnnnnnnnnnnnnnnnnnnnnnnnnnnnnnnnnnnnnnnnnnnnnnnnnnnnnnnnnnnnnnnnnnnnnnnnnnnnnnnnnnnnnnnnnnnnnnnnnnnnnnnnnnnnnnnnnnnnnnnnnnnnnnnnnnnnnnnnnnnnnnnnnnnnnnnnnnnnnnnnnnnnnnnnnnnnnnnnnnnnnnnnnnnnnnnnnnnnnnnnnnnnnnnnnnnnnnnnnnnnnnnnnnnnnnnnnnnnnnnnnnnnnnnnnnnnnnnnnnnnnnnnnnnnnnnnnnnnnnnnnnnnnnnnnnnnnnnnnnnnnnnnnnnnnnnnnnnnnnnnnnnnnnnnnnnnnnnnnnnnnnnnnnnnnnnnnnnnnnnnnnnnnnnnnnnnnnnnnnnnnnnnnnnnnnnnnnnnnnnnnnnnnnnnnnnnnnnnnnnnnnnnnnnnnnnnnnnnnnnnnnnnnnnnnnnnnnnnnnnnnnnnnnnnnnnnnnnnnnnnnnnnnnnnnnnnnnnnnnnnnnnnnnnnnnnnnnnnnnnnnnnnnnnnnnnnnnnnnnnnnnnnnnnnnnnnnnnnnnnnnnnnnnnnnnnnnnnnnnnnnnnnnnnnnnnnnnnnnnnnnnnnnnnnnnnnnnnnnnnnnnnnnnnnnnnnnnnnnnnnnnnnnnnnnnnnnnnnnnnnnnnnnnnnnnnnnnnnnnnnnnnnnnnnnnnnnnnnnnnnnnnnnnnnnnnnnnnnnnnnnnnnnnnnnnnnnnnnnnnnnnnnnnnnnnnnnnnnnnnnnnnnnnnnnnnnnnnnnnnnnnnnnnnnnnnnnnnnnnnnnnnnnnnnnnnnnnnnnnnnnnnnnnnnnnnnnnnnnnnnnnnnnnnnnnnnnnnnnnnnnnnnnnnnnnnnnnnnnnnnnnnnnnnnnnnnnnnnnnnnnnnnnnnnnnnnnnnnnnnnnnnnnnnnnnnnnnnnnnnnnnnnnnnnnnnnnnnnnnnnnnnnnnnnnnnnnnnnnnnnnnnnnnnnnnnnnnnnnnnnnnnnnnnnnnnnnnnnnnnnnnnnnnnnnnnnnnnnnnnnnnnnnnnnnnnnnnnnnnnnnnnnnnnnnnnnnnnnnnnnnnnnnnnnnnnnnnnnnnnnnnnnnnnnnnnnnnnnnnnnnnnnnnnnnnnnnnnnnnnnnnnnnnnnnnnnnnnnnnnnnnnnnnnnnnnnnnnnnnnnnnnnnnnnnnnnnnnnnnnnnnnnnnnnnnnnnnnnnnnnnnnnnnnnnnnnnnnnnnnnnnnnnnnnnnnnnnnnnnnnnnnnnnnnnnnnnnnnnnnnnnnnnnnnnnnnnnnnnnnnnnnnnnnnnnnnnnnnnnnnnnnnnnnnnnnnnnnnnnnnnnnnnnnnnnnnnnnnnnnnnnnnnnnnnnnnnnnnnnnnnnnnnaagtaagactgaatgaataatgtagccatgtaatgctctggcttttaatcctggactgtttgtctaacactttatgtgcgggtgggagttttaatgccaagaacactctaatagtcaaaaggacatttacatgagacccagaatttctgaaaattttattgcagaatatgagtactgatttagaacaaatcacagtgtattctaaacacccacccttgatgtttataaatatacttgggtaatgtatatatttccattgaaaacccagaaaagtattctactttaatcattccctcttacctgaaatttccatgtaattcactccttataagtaaggtattcaggacacttatcaaaatgcaactaggatcttgactgaataaaacattaagcccttatcaaacatttacgttatacctagaatttgttttctcagatttgtttgaccctaaagggatagaatacattttgatgggtggtttcttatcaaggaaatctgaagcatgaaaacagaaaagagtttttagcaaggaggacagagggttcctcaaaaacaaacttcatctattttatactttttccaaggctgagccctgactataatgccatgctgggctattggaaattcatgccatttacccaacaacacatgagatggggaacaagacaaaaccttcttgtgttctcttatttattaatttgtggtgaagaattgctggtatataaagaatcatgtgattaacctcataaaattaaggaaaaatcaagacagtaaagtatcagctgccttaatcctttgtggcccaaatgtggatttttaaaataagatattgaaaaacgtatcctgcacatgtaccccggaacttagaaagaaagagagagagagagagaaataaagaaagaaagaaagtccatgttaagatgttttttcagatataatctgctgtccttcaagaacaagaaagaagacgggctcactgatccatacaaactaacacccacttggaaattcagatttgaaaacttcctctgaattagaacggagtcacacggttttaggacagcttccccctccccttcctgttgaacatctgctctgagtgttcatggcttataaagtcaggggagtcctcccggggtagattcagctggggagggcacgtggcctttgctctgtttccgtttagcaggaaaccgtttgaggcctttggctgggaaccccccttcagaaagtctccctttcacctggtgcccccatggtgcttccagggactcgcattgcaggctgggagtcagttcaggttgcaacacgtcaccctccaagttgcttgaaggccttagactgtggtgcaaccagctgctgccaagagcatgtgggtcacagtgggtcccctctagctttatcatagactcatactttctcccctccccctcccatccccacaggtgagaagcctcacaagtgccaggtgtgcggcaaggcattcagccagagctccaacctcatcacccacagccgcaaacacacaggcttcaagcccttcggctgcgacctctgtgggaagggtttccagaggaaggtggacctccgaaggcaccgggagacgcagcatgggctcaaatgagcaccctggctggctgcaagcagcagctacacaacactacagagggcagcctccctgcttgccaccactctgctccctgcttgcctccactcccttctgactttccagaccccaggtccagtctgcagatcctaccaggttgctcctccttcgccttacctcctggagctgccagaagaaatgaggtaccttttcaaagtgcagccgagagtgagaaccaagtgactctctaggcttcggacacaaataggctcctctacacctgaagacaaaggcaaagtcaaatggggaccagaataaatcttagaccccacagtccttcccatttccagccctaatctacagacaggaatgcccttcaggtttcttccctcccccctcttgacctaccccagatatttgtgtggaagaggaggaatcaccatttacaaggtggacaaatgctaatatttttatctagaaagaagagtgagtgttaacttttatttttttccttctggggggtctgttgactcctttcttttgggtgctgcctataaatcttggaggaatcatttctcctcctcaaaaactgattcagaaactgacttggggaaggaatttaatactttgaagtcatgagatgcaccatcgaggctacccccaagaagaagcagaagagaagttggtaatgagaggggattagaggtcctcccttcagtagggctgtgaaaacctcatcactggaggtaaaagcacaagcaatgcctgtggacaagatgtcattcattcactcagcaaatgttcatggatcaccggctaccaaggtaccaggcaccatgctaggtattggggaagagagactgaagtcacaacccctgactgctcctcaaaagctaacggttgcacctccaagtggctgggtctgttcttactcttggagggaattctgagaagacagcacagaattgtaaaccttcccttttgacccttttggattttatcaggtgtaaacaaaaagctgaacagttacttcaaagatatgtgtgtatattcagttttttattgttaagctgatattttaaagatttctgagctagcaggcatgtgggaaggaaggctctgtcttcaactctttgaccctccatgtgtaccatagaggggggaaaggtggtattttcactttgatgaggttggtaaatgtttttagatcttctggtaagcattatgtttgttaatacatatttattagagtgatgttttaagttaataaagtattaagagtattacagattgcctttcctttaggcagggaatttggggaagacctttgttttagtctgtagggggaaagctggcactgaaggaaactgcaatggagtataaaagtgaagcacacaagctaatatccagaagagtaaaatccaattgctcgggtttccatatactttctcctttgctgctacacctcagagatacttctttcatcttctttcataagagaaaaactaggaggtgtacaaaactaagctactaccttgtagagcccctgatggttccacaggcacgtaagtaagctctttcctctgaaaatgtcaacatatttttttaggggcctgaaggctcccagatgaataaagaaatcacaggtcttaggtctaggttttagttttagtcacagctctgtcaccaacacatcatgtgacttgtgtaaatcttttgacttccccgatactggtttccttgatcaagtaatacggagacagctctgtcattcctgtccaaccctgaccgctttgattctgtggagactggaaaggaaaaaaagtgtgagattggttagctgcctcccctaatgcaagtcacaaatctaaaggcccatgaggatctgggttatttctggttctgtcccacctgtgggagttttttgcataagtcaatcctttaagagaatgaaaccagaataaaatcctggccaaaatccctactactagtgctttaacacctcccagccagacattcagggtatgcatgccccatggtgagaaccagcagattgcccatttccaactcaaattgatttcacacatataattgagcacccagtatgtgctgggcattcttctagggggtggagatatagcagtgaggacaatgtcttacgaagctttatttattcattgttgaatcctcagttcccagaatagtgcctggcacacagtaggagattaataaatatttactgagatgttaagtgaataaacagaaaataagctcctgcttcatcctagggcctggctctgctctctacagcacaaagggaagagagattgcttgacagcctgggaaacaaatagaatccacacgactttctctccaggttggcaggaaaggggggcttgaatgctgcttttctctggtttctccaaatctcagtccttggctgtcctcacctgatttccagcaccatgtctttccatgtcagtttactctcattcagaatttaaattcgtttactctgtaatggagtttaagatagtttttcagaactgatggatgatgaacagttgcagcgtccaggaaccacttcctagtgtcctgggagacaatcctcccagtgaatgaaaatgacaaaaacatccttcccacagaagtcaccctgtgtactggttggttatttccaacctggtttgaaaagtaaagaagttgcactgaggggtaagtagaactgattgaaatctaggtgcctgtgctgtcctgctcttcccttatgacgtttagaacatttggtccatttttgttatccctgtttatgctctaagtgaggaattgtaattttgatgttaactgtatgccttttttttttttttttggtaaaaaatgtatcttgatatccccagttcagaatcaaaacaaattactgtgcctgttaccgtgtgaaatttgaagattgcaaatatctctcttaatgttattacttgactccattaaaaatagattgtgaatattccatgtcacattattcatgaggcaggctctatgccttttgtctgctggagtaacagtagaaagggtaacaagagacaccagagcacacctttgtttctttcactaaatttttaataacacctccagctagccagttggtgaagctcagctcttgcataaaagtggaaaagcacagctatctctgagaagaccaactctttcagcagctaatttgagtttgcgttcatctacaccagacgtgattaaattacctatcaagtgtgctgagctatcaggattcaggccacgtaaaaggtgaatttcatctgattgatttgagacacggatggaacaattgagttttaaaagccccgccttaattaaagggatagaagagtatcactccccggcgacttcttgactgccattgcccttgaaaactgggtggtgatagtgatttgacccaagtcactttgttgtgtgcctgtttgttcaacctgatcatttcacagaaagaaatgaactcagaggaaaacctgaaaggacttcactactttttactgggcatttctacagaaatgccattattatttctacagaaaaaactttttaggaagtatataatacgtttattttaacccccttttcccattcattaagtcagattttaaaaattaaaaagttaaagaaattgcaccctaaatccttctagcttaaaagcttatgttctttttgtatgcgttcctttctagtttgttcctttctagtctttaggcacatgtgcgtatatttatattttataatttttgtctagatagctcttttattatatggacacatacttaaaacagatatttcacaatgagaatttggacaattttatgaccaaattttattgaaatcttagtattttattgggaatcttatcaatcattgagaaaaagtcttttctgaagtttaatgttatcactttttgaataaaacattttaggcatactggaaattgcagagaataataaacatcagtgtacccaccattctgccatatttacttcagattttatttttgaaataacatgttacaggtatagttgaatttcttctgggatatattcctctctagccccatttcctttcttttctcctcagaggcatccattataccaaaatcagtatatataattgccacgaatatttgtatgcctttaatttatacataattccataaataatatataatcatataaatatataattaatataaaaatataattgtatttatatataaatatataattatgtaaatatataatttagcatattaacttcatgtaaatggatcatagtttatacttctgcacttttctggtttttttgcttaacacattgtttttgagatttatccatgttgatatgtgcagtttagttcctttattttaaccactgcatatggaattccatgggatgaatgcttggtaatttattctcctgttgggagagtttgggtcatttccagtttttcctattacaaatgattctgaagcaaacaaccttttatgtatctcttttgtgagagattctttaggatgtattcctgggaatgaaaatgctggatattatcaaactgctcttcaaaatggttgttccaattgacagtctccccagcaatgtagaattcctgttactccaaatcttaccaacacttggtattgtcaaactttaaacatgtctgccaatcagatggatgtgaatgtcattgtaatttgcatttcctgattcctagtgaggttgagtatctttttataagttgatgggcctgacagatttcctttcctatgaaatgcctcttcatgtactttgtccatttttctgttggttgtttgctttttatcaatttgttctttaaatatattctaaacgctcactgttatgttagttaaatgtgttgcatacttatcccagtctatggtttgccttttcactttgaagagaggattgtttgcttgttttgtttttgtgtgtaatcaaatgtattagtcttttcctcaatggtttatgcttcttacatatcatttacactctttccctagctggtggtcattagattccctatattttcttctaaaagtgtttaaatttctgtttgtaacattaggttttcttttttttttttttttttaggtggagtctcactctgtcacccaggctggagtgcagtggcgcaatcttggctcactgcaaactctgcctcccgggttcaagcgattctcctgcctcagcctcccaagtagctgagactacaggcatgtgccaccacacctggctaattttttatttttagtagagacagggtttcaacatgttggccaggctggtctcgaactcctgatctcaggtgatccacccacctcggcctcacaaagtgctgggattacaggcgtgaaacattagctttttaatccacttgtgtgtgtatagtataaagtaggacctaattttaaaaattttcttcaccattagtaatggataaccaattatcccaacattatgtattgctattttcatccttttccctctgattgtaatgccacctctgtcatatgtcaagtttctatttctgtatggttctatttccaggcttgctgatctgttccactggtcattttgtctatctctatgccaaagccatagtgtcttaaataatttaagttacaataaactcttaatagctagtagggaaggctgccttgtgacctgtttcatcctcttcaggagtatcctggctacctttggcccttcgttcttgcatgtgaaaaactctattggaatttaggtttgtattacatttattatttaatttggggagaattgaaattattttgctattgattcttcctatacataaatatggtatattgattacttatttaatcttcttttatggctttcaataacactttgtcattgtctgcataatttaattactttttaaacttattttcttagttctttttttgaaaattgaattttgtcattgctgctgatgtatgggaacaaaattaatttttctatatgttgatcttgtatcctgcaactttgctgaaccctcttttttggtttttgcagattattttagattttcagagtaagatagccataagatattcaagtgattatagctttatttcattctttccatcttattattgcctcactgcactggccagggctatactgaataggggctgaataatagtcatctttgtcttattcccttattccagggaaatatttttagtttttcacaacttcatgtgatgtttttggtaggtttttggtagataacttgttaaaaatgagattaggaatttctgtttctatttggtaagaatttccacttgtgtatgtgtgtttttaatcaatgggtatttaattatttttgtgtgatttttctgcatctattgagagaataaatatatttttaatcttttatcctttgtcaacatgcaaattatatttataattttctctaatgttttaaattatccttgtattatttggggaaaaaacccccacctagagggaataaattccaacttagtcatttaaacaacattgctgatttggtttgctgacctttacttaggatttttgcattatacttactagtgaaattggcttataatttttatttcttatgctgcccaaggtttaacatgtttcaaaatgaacagggtaacatttcttcttcttctgttttctggatcaatttgtgaaggactggaattatatgttctctgaatgtttgatagaactcacctgggatttttttgatgaaggctagcaaagaggagggtatatttaagttttagttactataggtctattcaggtttttaattttttcttaaatatgctgtatcatggctgggcacggtggctcatgcctgtaatcccagcactttgggaggccgagacggctggatcacgaggtcaggagttcgagaccatcctggctaacatggtgaaaccctgtctctactaaaaatacaaaaaaattagccgggcgtggtggcgggcatctgtggtcccagctacttgggaggctgaggcgggagaatggcatgaaccagggaggtggagcttgcagtgagccgagatcgccccactgcactccagcctgggtgacagagcaagactccatctcaaaaaaaaaatgctgtatcatatatatatatcagcatatttataagtatccaaattaattgccacagacatttcatagagttctctgatttttaaaaaatgtctactccacctataattatgttcaatttttctttctgatattgttcatttgtacctttatcttttttctttaatattgccaaaggtccctattttattagtttttgcagcatattttcattgtcattcatttctatatcttatctaacaatatttcttatttgacagatgtattatttagaagtacatttaaaatttctaaacatctctggcttagagttgcaaaataaaattctaaacatgttttttcagtaatttttgtaagtgatttataatttaattatattttgatcagagaacctgacttgcataatattaattctctaatatttgttgagatttattttgtggccttctccatggtcaatttttatagataatgtgtgcttgaaaagaatgtatatattctaattgccaagtgcaagttccactatgattaagcttgtgattatattgttcgaattttctatatcctaaataattttggtctgcttaatcaaccaatcactgagagagataggttttactttctcatggtgattattaagttataaatttttcctttaagttcttttttttttttccatgtgagcttgagaaaaatctcctttgaattctgttaactctttttcttttacctattttgagggttgttattaggtgcataaaattttgaactatttcgtattcctggtgaattattccttttttaatcatcattctattgtactcattgcctttagttttttgtttggttggttggttgttttttttttaagtttttttttttccttagagacagggttgcctaggctggagtgcagtggtgctatctcggctcactgcagccctgacctccctggctcaggtgattcttctaccttagcctcctgagtggctgggaccacaggcacataccaccacacccttctaatttttgtagtttttgtagagatggggttgcaccatatttcccacactggtcttgagctgctggcctcaagcaatccatctaccttgggccttcaaaatgctgcgattacaagtgtgagccactatggctggcctatttttacatggtatttttaatgtccttttatttttaatctttttatgttcttatgctttaggaatatatctttgtaaatagcattaattcaatattatttacctttttaaagtcagacataagtaaaataaaatttccaattgaaaatataatttctgatactgtttcactatatgtatgtgtggtgtacatgtacctgatcttttcatctctaagcaacttaatctaataggaatctgttgctgttttctcatttccaatgagcttttactgataaaaaagaattacacacacacacaggagagaaaagtactcactctgcccaaaacaatatgatgcttactgctttactctgctagtccattttttggtattcaaggaaggattctatcttgcaaggttttttaaagcttgcatttgttttaactgtaaaggagacccaaaagcaggaagttaggtttgtttcttgatgctagttttacaaacttcattgagaagttttttaatttttggtaaagtaggaagcctagtttcaattctgtcttttaacatgaattagacaatttcctaggttgccctttctgagaagaactgattggcacgcctttataagatttgctgcaatagcagttcttcagtttttcttagagtaaggaaaatctgagtggatgcctcttgtgactttttgggagagccagaaaccatcctttcattaacctttagtagaattgtctgtgtttcacctcttggatataccttcccagagacatcacacaaactcaacttcctctttccctgtactaaaaaccactgttcatgggactctaataaacaagagtaacaggttcttaactgggctgagggagtcccaccacagtgtaatatttttgcatgtcatctttgcatggttattgtttacatgatatatttaggtactatataaaataacataaaataaaaagtttaaaataaaggtagaaccagatgaccttcaaaactctttcaatccaggagctgggcattgtggctcatgcctgtaattccagtgactcgggagactgaagtgggagaattcttgaggcaaagagttcgtgaccggcctggacaacataatgagacctggtccctgatatttttttttttttaattccctgggcaataaagtgagaccctgtctccaaacaaacagacaaacaaacaaaaaaaccagtgggcagtgaactggaagactctttgcaatccaaatgctagtgtcaaaggtttagctgatttgatttcagggcacccacaacacttattctttgtacatcactaaggaccccctggggtctatatggaggtttattttccactggtcactgttggtccaagactggcaggttccaggtgtgagaaatggatctgaactttcctagggaaccttctattagcttggagaagcagaactgtttagttaaaaactgcattgaatttggaggtcaggagatccttaaatatggtatattgattacttatctgcatatagttccagttcaagaccaggagaagacaaagacagatgtcccagatcaagcagtcagacaggcaaagttccctgttagcctttttgttctgttcagatctacagttgattggatgaggcccacctacattagggaaggcagtctactttactcagtctactgatttaaatgttaatctcatccagaaacaccctcagagacataccaagcaagaatgtttaaccaactttctgggcacctgaggcccagtcaaactgacacaaaaactaaccatcatggtctccaaattgccagtatatttatcagagtaaagagcactagtgctgtaacgaataactccaaaattgcagtagcttacataataaataaataattaacatatcacagtgaatttgagtgtgttcaggctgctttcttcactggtgattgagagctcccaattccttctatcttgcaatgctgccatcttccagggatttcttgttctcttctgcattgtctgcatttagctggctgatgaatgaagacagaaggtgtgtagaggatcatatgggacctttgtaaagccagactgggcaatgtatagattgcttctgttcactttcctttgatcagatctcaacacaaaatcccaaccttgctgcaaagaatgctgggaaatgtaattttcctttctgttaaggaagaaaaaatggtgagcctctagtgagtcttttttttttttttttttaaagagacaggatcttgttttgtcacccaggctagactggaattacaccattatggctcactgcagcctcaacaccctgggctcaagcagtccccctgcttcagcctcccaagtaactaagactacagatgtgcaccatcatcccccgctaatttttttattttttgtagagacagggtctcctcttacccaggctggcctggagctcctggcctcaagcaatcctcccaccttggcctctcaaagtgctgggattacaggtgtgagccaccatgcctggtccctagctagcttttaaacttggggttatcctgtctctgagtttgttttcttctttgtaaagtgaggaggatgtgtcaaatgctctcgaagggactttccagctctgaccatctaagtcctatgattctatcaaaaccttggctgggccctggaaacacccagcttggaggtggtctctcccagcccaagagggaagaacaagaatcagagttcccccaaggattttctaaccgacacctgcagtgcctgggaaattcattcacttcctcatgttcccaagaatcaggatgacagccacacccctacagagtatagccttaccctaggtcatagtgccggcaccccttcctgggtgtgtgtgtgcgaacactaatgtggccatgacat

SEQ ID NO: 55 - DNA, 1680 bp, Homo sapiens
gcccgcgccgtgactccgcaggtctcctccgggctggggctgagcaagccctcggagtgaccgtgggtgacagcggctccagggactcttggggcgcagtggggaaagtgccggaccaccatgccgcgctcatttctcgtcaaaagcaagaaggctcacagctaccaccagccgcgctccccaggaccagactattccctccgtttagagaatgtaccggcgcctagccgagcagggtgagaagcctcacaagtgccaggtgtgcggcaaggcattcagccagagctccaacctcatcacccacagccgcaaacacacaggcttcaagcccttcggctgcgacctctgtgggaagggtttccagaggaaggtggacctccgaaggcaccgggagacgcagcatgggctcaaatgagcaccctggctggctgcaagcagcagctacacaacactacagagggcagcctccctgcttgccaccactctgctccctgcttgcctccactcccttctgactttccagaccccaggtccagtctgcagatcctaccaggttgctcctccttcgccttacctcctggagctgccagaagaaatgaggtaccttttcaaagtgcagccgagagtgagaaccaagtgactctctaggcttcggacacaaataggctcctctacacctgaagacaaaggcaaagtcaaatggggaccagaataaatcttagaccccacagtccttcccatttccagccctaatctacagacaggaatgcccttcaggtttcttccctcccccctcttgacctaccccagatatttgtgtggaagaggaggaatcaccatttacaaggtggacaaatgctaatatttttatctagaaagaagagtgagtgttaacttttatttttttccttctggggggtctgttgactcctttcttttgggtgctgcctataaatcttggaggaatcatttctcctcctcaaaaactgattcagaaactgacttggggaaggaatttaatactttgaagtcatgagatgcaccatcgaggctacccccaagaagaagcagaagagaagttggtaatgagaggggattagaggtcctcccttcagtagggctgtgaaaacctcatcactggaggtaaaagcacaagcaatgcctgtggacaagatgtcattcattcactcagcaaatgttcatggatcaccggctaccaaggtaccaggcaccatgctaggtattggggaagagagactgaagtcacaacccctgactgctcctcaaaagctaacggttgcacctccaagtggctgggtctgttcttactcttggagggaattctgagaagacagcacagaattgtaaaccttcccttttgacccttttggattttatcaggtgtaaacaaaaagctgaacagttacttcaaagatatgtgtgtatattcagttttttattgttaagctgatattttaaagatttctgagctagcaggcatgtgggaaggaaggctctgtcttcaactctttgaccctccatgtgtaccatagaggggggaaaggtggtattttcactttgatgaggttggtaaatgtttttagatcttctggtaagcattatgtttgttaatacatatttattagagtgatgttttaagttaataaagtattaagagta

SEQ ID NO: 56 - protein, 39 aa, Homo sapiens
MPRSFLVKSKKAHSYHQPRSPGPDYSLRLENVPAPSRAG

SEQ ID NO: 57 - DNA, 63411 bp, Mus musculus
  misc_feature (1)...(63411): n = A,T,C or G
aattcagcttgatcagtgaaaataggacatcccagcaaggagaatctatcctctttccagacctccggacagaaggtctgcccatagatggctgacgaggaggcataaggaggaggcgcagaagctaattcacctcctcctctgcctcgactctgttgtcctgtcctttctgtccacctgataacactgtgtctcctttctttttcctttttctttttaagcccttttcctcttctgacatactttcttgttgctctgtaaggattttctgacctgtcttgactgcctctacacacagtttcaaacagtaacagagtccatatatcagaacaaacaagaccaaaactatcagacctacccacaaagggtcaatgggagaaaaaagcataactacacagcgaggatctattgatcactacactgaggttatcatagttccttaacttgtccccaaaccgggaaccttaacttgtcccaaagccaggaacctttcattaccttgtgcctgcttcctggcaactttatattcccctctattttatccgaggtccttcccaaactcctgggttactttgtgcctacttcctggcaactttatgctcacctctattttatccgaggtccttcccaaactcctggggtcgcaagtttcactcaccgtgaacttaccctgccggcaaccactgactgctgaaagttctgaactcggtgggggagtcggttccccgtacgggccaccaattgttgcgtctgctctcgaccagcaagaacgacgcgaccaccagtccttctaacagcagtttattcagtcctgattcttcttgtttatatctcccccgaaccctgggcctctcactccttttatactctctctcatccacgcaccgcaggccacgccccctcgccagtcacgaggcttcagctaatcagggcagcaggggcaaatctccaccaaattggattcacctgtatcctggtacacctgcgcagcactcaagatgtttgtgtcttatatgaggaagtcaggtgcaagtcatatgacttagctgcagtccctggcgcctttgggactgccgccacaaccgctctccacatttccccttttttagtttggtggcatcgtagatagaacctcaagcctcattcacacctgcattcagtccctgagtgcctgaaagtcacaggatagacaaggtgggcccagaaagagaaacttgatccaggcagctagcctcgggtatctcaagggtctcaggatacaccatagagcaggaaagggtcatggggagggaaggcaggccacaatgccactctcctacggagacttctgatgagagaaccccactggacctagtgtgggtgggattcagcctgcctcacccaccacccaaggggcatcctctcctcagattcccatttactgtgtttcaggttcccaggatgatgccagcaaggaggatgaacctgtagccaccaagatggcggaagcggctgctctctgatcgcttccccttccagcaacgggctcctctcacagttcacatttagaatttttgcacatttgcaactttttactgttacgaatattgtgtttttacgtagttcagatttagatattttggcacgtttgcaactttttaccattatactctgtttctaacgttcactatttaagattgtaaataggtttctcctacattggtacatattgtatagtaaaagaaaattgactctcccgccagtctggagtaagaccttttcctgtaacgtaagcacttctagaagaaacccctaaagaggagttgattttcgacatacttacccacagccactccctcaacccgggccctgtgtcataaccgcccagtgggcacttgtcacctgtctcatgtcgctgttgctctagacactttggtgacaggagtcagtttgtccctccttctggaaggcgtcacggcagcagtatgacccaaggttgtccgtgatcactcagatgtcagcccttcacacctccgagccagcatgctggtatagagtccacactccctgtgccctccctgaggctcgtcagtgcgctgctccgtttccatcgggaaggctctacttccgctctctcccctgttctgttaccatcgtggaagcccggcttattcctttgccctggagtccagggtctcccaagaatacactgtgatccggcagctccagtcagcacccagtgtgtcctagaaacatagattgtcagcaatgactgccacccttaggaaacatgtggaaaaataaaataattattagtgaagttacgttgaaatgtttttactatcagctcttttgtagaaaatcttagtaaacaatttaaagttcagaaaggcacattatttttggttttgtttttttgatttttcgagacagggtttctctgtgtagccctggctgtcctggaactcactctgtagaccaggctggcctcaaactcagaaatccacctgcctctgcctcccaagtgctgggattaaaggcgtgcgccaccaccgcccggctagaaaggcacactcttattggttaagctagggaccctttatggtcagcgaacaagaacaatgacagcacgggctgaggcaactctcactgaggctggactgggggtgactgatttcttatacacatttttgcacccagctttctgatgggatttattaactgcagatgattggatatgcattctgaggatataaaataaatatgactgatttttatgtaaaagtttaaatctgtgattctttttaagattcttccaagattacttttaaagataaataataattactcctgtctttgtaacggccaatgcctgcctgccaagaggagacactggctgaggaagggaagtaccttgcttgctgacacttggttagtctgtaacaagttgcttagttacgaatgtacataaacaatgaacgtgggttcttagaaataatttgttttctttacctgtgctacataatgttatttcttataaaggtgttggggaacacacccctcccatgctgaggttctcagatccccaatttacttcccaaataaaagtgtgaaactaagagtgtgttcggagggagaacatgcatgtagcatgcgctgtctctgtacctttaaactgtatttgagagtgtaagagagttactgtcaatgcgtcaatgcataggattttatttctaacttaaataacgttttccaattaagtcctgctgattacccataaaatgttctggcagtttaagcagaccactgagaacagcaagccacagagattcaaggcaatacctgcgagaatttcctctaggttgttttctcagtacacaggcagagattccagttagcatacttcctagatgtccaatgtgaccatactgggaagaggaaccaaaaacaaccattaatcctctaaccccagagcatcttcaggactgcggcgtggggtttccagttaaaacagttacacagtcctgacctaggcacgtcaagaccattgaccaaccgacccatcattgtcctggctgcagcctgtcctgccagaaaagtcccagtactcagacagcaaggagctggcttctcgggagcgagggcaagttcctactctggctcccgtcaggcctttccactccctagtgttagatttctggagaaattacaactcttcggcatttattgtttcataaatgtctctcttcagaatagctcagcagttcagggtgctaactgctcttacaggggatctggagtcggttccccagcgtgcacgccaggaggcttcacagctgccttaaccccagctgaatgggacacaaagcccccttcagacttctgtaggcaaaatatcagtgtgtacaaattctctctctctctctctctctctctctcacacacacacacacacacacacacacacacacacacttttttgtttgtttttgttttttcgagacggtttctctgtatagccctggctgtcctggaactcactcggtagaccaggctggcctcgaactcagaaatccacctgcttctgcctcccaagtgctgggatcacaggtgtgtacacatttttgtacacatgctgggattaaaggcgtgcgccaccaccaggcagctgaaactcatttcttatagcccccaggcccacttgcccaggggtcacagggcccacagtgagcttccacaggaagtcactaactgagacagcacagtatctctacagacttgcctacaggccactcctaggaggcttttttttttttttaattaagaatctctcttcccagaaatgtctaggtttgagaagctgacaaaagccaactagccacaatatcttccctcagagagacttgtgtaaacgtggctctgactgctctgttcacaacaggacagaaatggaagcagcccagatgtccaccagcagatgaatggatagcaaaatgcacagtacatgtgcacaatagaattttattcagtggtttgaaagaaagagccgggcatggtggtgcatgtctttaatcccagcacttgggaggcagaggcaggcagatttctgagttcaaggccagcctggtctacaaagtgagttctaggacagccagggctacacagagaaaccctgtctcaaaaaaaaaaaagaaagaaagaaagaaagaaagatagaaagggaaaaaggaaaaaaactttcaactgctacatccagcccagtagtgccaagcgcaacaggccctgaaaacctggccgctgtcctgaggtgaaaagttcacagaaactttgtctcctggaatcatggcatcctgtataaagaatgctccaatgtccttgcttttgttggtaaacggatctgtgtgctttcccttaatattgctttattacaagtgctcctaaggattgatattttgacatatagctaagttagattctaggcagtccttgatccaaccttgggcatgaagagctaagtcactgccctacccagaaatttaccattatctaggaagaaggaagtttgtgacctaaagaggaaccagagtagatacttagaactataggtatgagttacacccatacacaaacaaatatttacaatggcctagggggaacgtggactatacaatagactagagtaggaactatgtcaagggcacaaagcccttgcccctggcttctaagattaaatggaccttaggttgagctgtttttgatcccagttgttaactttgagttttaccccagttggttcctgccagttcttctgtgtttgcattcctctgttttgtgaaagaatccagtaacctcttcgtacctttgcggtgtgtcacccaacttccctattttcttctgtataaaaagtttgatgcttggtttgacaaattacattcaaatccacactcccttctgttgagtctatctgccaattcccgctgactccttgcccacctgcaccagagactcgttctctggtgcagagaaccagagggtctgcggcatgcaaggaactggatagaactggaattcattttcttcagcacagtaaccaagactcaagagagcaagtagggtgtcctcgtgttcacgtgtgaatcccagcttctgattatcacatgtgtgcatgtgtacgggagtgtgtagggactgggaagcaagccaggtgcctgtggtgtggaaaaaggtgaaagttgaatggggaacactatgaaaggaacaatatcgtggagactggggccaggtggaggaggaggagaaaggaggggaggggaggagggtgataagaggaaggagaagggaggggggaggaagggaaagaggggagaaagggagaggaggggcaggaggatcaaataaaactaagtatatatatgaacagaccatgaggaaatacatgactgtgtattgatttaaaatttaattaaataaatgggtctagagagctagcttagcagttgtaagaactagctgctcttgcaaaagaccaggtttccatttccagcacccacatgacagctcacaaccatgttacttccaggagatctaatggcctcttctggcctctaccagcactgcacacacaatggggcacgcacgcacacacacacatatctttaaataattaaggaaaaagagaacaaaaagccaagtcaatcctgggaagcgttggcttagtccagccccagctgatcctcagcactcagcagtcagccattgtgactgactccgggagcagacatgtctagctcctgcatctcctccaggtctctctcctgtggcccagattttgctactttgaaggtttttctttaccccaccctttatccccctggttttgaaagatcctgacagaatgtaaaaggtcacagaagccctgaaattggcaagatagatgtcactgttagcagaactagcttcactgatttagaaaaatagaggtgcacaatgctctggccactccttgaacctgtgtgtctgccaatgttttgaccgttccttgaacccatgtgtgtgctcagtgatgaagctcattgccaggtgttggtgatattggttgctgagaaagagtcagaaaatctccccagcaaccacagnnnnnnnnnnnnnnnnnnnnctgttgacatctgcagagaaagacctaagatgctgtggctaaaagaaatcagatggcaaatctaaccgcccaggcatcctaaagagcaatgatcctgacagtctgaagactatcaagttatagacaaattaagactggtaaaagaaaccctgtataaaatagtaaaaactgaaaaaagaaaaactagtcctctcatgagaagacagacctgacatctactgaaaaatagactttactgaaaaaatatgtgtatgaataccttctggtttttgtgaacgttctcaagatagataaaagcttttccttgtaaaaaactgagactactcagatagtcatcaagaagattattaaaaattttccaaggttcggagtgccaaaagcaatactgtcagataatggtcctgcctttgttgcccaggtaagtcagggtgtggccaagtatttagaggtcaaatgaaaattccattgtgtgtacagacctcagagctcaggaaagataaaaaagaataaataaaactctaaagagaccttgacaaaattaatcctagagactggcacagacttacttggtgccccttccccttgccctatttaaaactgagaatactccctcttgattcagttttactctttttgagatcctttatggggctcctgtgcccatcactgtcttaaatgatgtgtttaaacctatgttgttataataatgatctgtatactaagttaaaaggcttacaggtggtgcagaaagaagtctggtcacaactggctacagtgaacgagctgggtaccccaaggacatcttaccagttccagccaaagatctgatctacgtaccttattctgtttctgttcccatgttaaagatagagtaaatgcagtattctccacatagagatatagacttctgaaattctaagattagaattacttacaagaagaagtggggaatgaagaatagaaaattactggcctcttgtgaaaacatgaattttttacctcggagcccaccccctcccatctagagattgtaacactcctaaacttttcaccccaaaactcctcaccctaaagttcgaaccctcccaactaaaaactgttccaagaacatttttgagataaaggcctcctggaacaacctcaaaatgaaccaggtactccttagttacgtaggttccttgataggacatgactccttagttacgtagattcctttggcagaactccctagtgatgtaaacttgtactttccctgcccagttctccccctttgagttttactatataagcctgtaaaaaatttttgctgaccgtcgagactcctctaccctgtgcaaaggtgtatgaatttcgaccccagagctctggtctctgtgctttcatgttgctgctttatttcgaccccagagctctggtctgtgtgctttcatgtcgctgctttattaaatcttgccttctacattttatgtatggtctcagtgtcttcttgggtacgcggctgtcccgggacttgagtgtctgagtgagggtctcccctcgagggtctttcagcaccagacatgaacatggtgcacagacatgcaggcaggcaacctgctcacatttttttttttttttttggcttttcaagacagggtttctctgtgtagccccggctgtcctggaactcactttgtagaccaggctggcctcgaactcagaaatcctcctgcctctgcctcccaagtgctgggattaaaggcgtgcgccaccacgcccggccctcacatttttaaaagagaaataaacctttaaaaaaaattgtaatggaaatcagaaaagggagatgtactcagtgtggcgaccttgttaaggaccaagagatcaagcagacctagacccctccccccaaaggccatctctggggtcctgaggtgagattaaagtctgaataacagacagcatccccttcaagctgtggtcccggttcaccatcgaccccctccttgcctgggcttcgtcttatcctgaaggcactctgacaagatgttagacttgtgtgaaatctgtttttaggagacaagatttccctctggctgcccccctttcctctcccagcatgagatttttggggaaattaccatttctttgggacccatcatttcaattatagtagtctgatgggttaagagacacaaagtatatgtttagactatcttcagtttccaccagactacttacaacgtcatctgacacctgaggcatggcacccgggacccacaagcacaggactccttcctcaatgtttctggggctctgtttcaactcagtgaccccttgttgacatggtctccttgaccccaatggccatccacctttacacaggtggacaggagagttaacacgttacttggttattttgtaagcaagcttactagtaaatccttactagcatctgtgtcaagcaagcacctcaaacctcaatccaagcttccttcttctgagaagagagaatctcaactgagaaaatacttccataaaactggcctttagccgggcagtggtggcgcacacctttgatcccagcacttgggaggcagaggcaggcagatttctaagttcgaggccagcctggtctacagagtgagttccaggacagccagggctacatagagaaaccctgtctcgggaaaaacaaaacaaaacaaaacaaaacaaaaactggcctttaggcaagcctgtgaggcatttgctaaattagtgattgatgggggagggtcccgcccccttcccccccccccccccccgtccattctgggtcatgccaaccctgggggggcagtcctggggtgtatgaaaaagcagactgagcaagccataaggagcaaaccaataagcagcacacactcatccaccgcctctgttcttgacttgagttcctgccctgacttccctgcatggtaggcaatctcgaagatgcaacaaaaaaaacctttcctccgctgggcggtggtggcgcacgcctttgatcccagcacttgagaggcagaggcaggtggatttctgagttccaggccagcctgatctagagagtgagttccaggacagccagggttacacagagaaaccctgtctcaaaaaacaaaaacaaaaccaaaccaaaccaaacaaacaaacaaaattcttccccaggacatggtatttatagcagagataggaaccctaaccaagacaggatatatagatgtgtttcctgggtagtgtgatatgaaagttactatttgtggtgactgtggcaaaagttgccttttaggcatgaaaaaaaaaaaaaagcttagtcaggaacctaatcctacacccaaggctgcacctgataaccagaacacgtcactcactgaagataactagacagaaaacttcgtgagactacctcacgctgtccattgaccaggagcaatcctttgtgcctcacatctttgggactgcggtaggcatcagagaaatgtcacctcgatgggccctgcagctggagagtctgaccctggatatggccttcagctaagacacctgcacagatgatgagcagcctcggggagactagctgaggtcggtagttaggaatgtggagtgtggatgttgtgaccctcagcataagcaggaataacctagcctaaccctatcgctcgagacgccactagtaacggagacactatgcgtgattaagaatgaaataaatgcatttgccactgccagatcaccaggcagatgagattatgtggccaaatcgctgccactgaaactgctgaatcttactctgttgtggtaaacaacatcctgtgctcacaacagagccggtggggagactgcatccttaactcctgttcccttctgccttgaagaaggtaaactggatctccctgcagtttcactttcaattcttgtcaaagcttggtttctgtttccagtttctccaaggagggaggggcagagcgcttttcttctttccatgcaactctccatcccattgtctcctccagagaacgctgcaggaagcttctcccatcagagctgagcagaagctcagaggatttatctagaggacaggctggcccagctgaaatggacccgttccccgacctgtatgcgacccctggggacagtctagaccacttcctggaacacagccttcagccccagagggactggaaagaggaagggcaggatgcctgggagagaatcgagaggttctttcgggaacagtgcttccgtgatgagctgctcctggaccaagaagtcagggtgattaaggtggtgaaggtaagcacacagggttctgagtttaaagctcacctctgccctgtggggcttgtgaacttgagaggtgggccatttcaccccctctgagtctgtgtcctcttcttaagatgggtttagtagaagcagtaaatgggataaagcatagaaaatttctgtgcatttaaaattagccttgcaatgctgaaggacagaggtggtaatgataatttgggattctggttcctgaatggaccatagtcaccggtttccataaaatgtgtgcctttgcttcctgtctaagaaataatacttggccaggcgtgtgtggtcctgcatgcttttaatcccatcactcaagaggtagaggcaggcagatttctgagttcgaggccagcctgatatagagtgagttccagggcagccagggctgcatagagaaaccctgtctggagaaagggaagggaagggaaaaagggaaaggaggaaaagggaaagggggaaaggataggaaagaaaaaaaaaaagactactactttacttctgagtgaaggaaacctattgttctctaagttagtagtattggtcatgttagaaattacctagcaagactacttggtaaaccattgggattctaagggctgcctgtgtaagtaattctacggctagctgtttctcccagaaaaacacaaacttacagcccaccccctccaatcaagaccatttggatcagagctctgggtgttgtttattctgctaaaatgaatgacaacttaagtggtttttttttttttgttttttttgtttttgtttttcgagacagggtttctctgtatagtcttggctgtcctggaactcactttgtagaccaggctggcctcgaactcagaaatccgcctgtctctgcctcccaagtgctgggattaaaggcatgcgccaccaccacccggcatgacaacttaagttaacttgagtaagtcaactttacctgggaactctgagccatggtagcagaggttaagacgggagagaaagagcttttgatgaagaaaaatctcaacaaaccttcaaaaccagagatcagggagggttcttagccaaaaagctttgaagacagaaatggaaactcccacagctgctgcaaaaggatacatcgtatcccatttgtgttctggttcctgcaaatttctgcctgacctaggtcgattgcttgtagcagcctcttggcttctgggacttgaaagaaacaaacaacaaaaaaaggaagtccagagctgggtgtggtagcgttcacctgtaaccccagcagtcgggaggttgaggcaggaggattaccagtttaagactgttaaacctgttcttatagcaagttccaggccagccgtgactgcatcagtgaggcactgtcgaggggtcaagaggaggagctgaggtttagactctctcatcttctttggttttacctttttttttttttaaactagcagaaaaaggattttgtttcattatagcatttttcaagtagcaatttgttttgggctagggatgtagttctgaggttggtatgttttgtgcctagaatggtggctacctgtaacttaactccagaggcgctcccttccacctctcttctggcttctgaggatagacaccaggcacacctatggtgtatgtgtacatgccgacaaagcagccatacacataaagtgttgcccttgttgagatttcagaacatttgggtctctcagttttggatcagggatgctcagcccataacgcccacagcacaggtctctcttaaaggactgtacagagaacttaccatgaatgggtctggcttaactctcaacttcaaagcatcaaatctcaggagaggtaaatctgccattgtcaccttccacagggaggctcctcgggaaaggggacaacgctgaaccacagatctgaccaagacatgattctgttcttaagctgcttttccagtttcgaagagcaggcgagaaaccgggaggtcgtcatcagcttcattaagaagaggctgattcattgtagcagaagcctggcctacaacatcattgtccttacccacagagagggcaaaagggcccctcgctccctcaccctaaaggttcagtcccggaagactgatgacattatttggatggatatcctcccagcttacgatgctttgggtaaatccagtggaagtttcagtttaaagaaagaattctggggtcttcctctagcaagattcctctggaagattgctttgtagatagataggtgggactgaaatcatactgtgaagatggatagacttccataataaataaatatccttgcatgggttcccatgtcccagtgttacatggggaggaaggatttatcataaagaatgaattcctacccaccctctggaaaacaccaggttaggcaaacattccaaggtctttagggtccaacagaactgtattagaccctttaaaacaaggctctcaagctgggtggtgatggagcaagcctttattcccagcacttggaaagcagaggcaggtggatctttgtgagtttgagaccagcctggtctacagagcaagttccaggacagtcagggctacacagagaaaccctgtctcaaaaagtaagtaagtaaatgaaataaataagcaaacaaataaataacaagactctcgtattttacaacttgtattcctcttgggcccacaccttagcatgctcaaaatcgagcatactaacttactacatgggataatgttgagtcatcagaactgatatttgctcacatttgagataccagacggcgattgcctgtgcttgcctttaagtttacctccttaatggagccgatctgaggatttcatgagcctgaaggtctacctgaccatcccggcctctattaatttagctttgaggtgggggagggggcgaggtaaggaaggcatagaaaacaatgactgtgatcccagctctcaggaagccaaggcaggcagaccacaagcctaatgacagcccaggatccatcacagagagaccctgtcaacgaagaagaggggctgatgagatggctcagcggttaagagcactgactgctcttccaaaggtcctaagttcaattcctagcaaccacatggtggctcacaaccatctgtaatgagatctgacgccctcttctggtgtgtctgaagacaactacagtgtactcacacannnnnnnnnnnnnnnnnnnntcttttctatgatttaagcctgggaccctaatcgcctttcttcaaggatatgcaccaactgtacctggttatctaggagagtgctagccttggcaccactgaagctgagcgttctgaggggcaatgtagaggcaagccccagacacaagccttgcagcgcttgctgtgggagaagcctagggaaagggggtgggggggacttctgcaggagagtgcagaagcaagccgcctgtgcacctcagggccatgtatttaggtatcaaagcccagtttctatctataaacacccaggcctcagttcattcatcggtaagatgggcagacaatctgccctgttctatagtcacctcagagacagagtctaagaatttacctctagcctggatctagagtaatattttctcatttggtggatcatcgtcactgttttagtcagggtctctattcctgcacaaatatcatgaccaagaagcaagttggggaggaaagggtttattcggcttacacttccatactgctgtttatcaccaaggaagtcaggactggaactcaagcaggtcaggaagcaggagctgatgcagacgccatggagggatgttttttactggcttgcttcccctggctttctcagcctgctctcttatggaaccaagactaccagcccagagatggtcccacccacaaggggcctttcccccttgatcactaattgagaaaatgccttacagttggacctcatggaggcatttcctcaactgaagctcctttctctgtgataaccccagctgtgtcaagttgacacaaaactagccagtacaatcgcttactatttaaatagtaagtgtaatatgttttttaaaaattaagtgagtcttctacaactcactgcagacagtaagtccactgcacagccttgccccataggccaccaccatcttggatctgaatgcaaatccaatgtttggattcaagaattggactgagaggtttcccgaggaagctgtttccctaacttgctaaacccacagaaatcctgtcccttggacatggcccatttcttattttcttcgggaaaagttgtgatttgtcctcaaaagtggccccacagcaaatgaaacaaggtagacagatagagtctgaaagggacctgccatctggccatcaagtgccaatagctgagaatgccccccccgccccccccaaaaaaaaaaaacaaaaaacaaaaaacaaagggctcttgggaagcaaggaaaaatgaaataaaaaaaaaaaaaactacttatgtactcttgtctcagttagggtttctactgnnnnnnnnnnnnnnnnnnnnacctatttccagagactcaaaaccagcaccggcaatctacgagactctgataagaagtaagggctaccctggtgacttctcaccaagcttcacagagttacagagacattttgtgaaaactcgcccagttaaactgaagaaccttcctccggttggtgaagttctggtacctgcaggtaagagctgggaggaggcggagcagagggtacgcacgcatctgtagcccaagcttctcttagaaattggggctggaggtgtggcttgttggcaaggtacttgcttgggatgcgtaaggtcctgggttcaatcctccgcaacagcaagagagatcgagtggggatacaagaagtgggtgagaggcaggataaacagtgagtgacctgcagggccctggaccatctaagaacccagcatccctgtcggtgagagcgtctgcatcttgtgacacctgcttgcagtgaaaccttcccccaagtgcgattaagtgctcactcagatgaggacaggctgccttcaacaagcctcagatgtgtggcattttgataacaataataaagccaccattgtgtcagactaattgggtcccatgatctaggctatacatgccaagggaccccgttttgccttccttcctgtttctttactttttttaattggttattttatttacatttcaaatgttatccccctttcccagtttcccctctggaaaccccctatcccaccccctccctccttctgctgtttctaatggcatgtatccccgccctcaccctggaggtgagaaaactgagctgagatttgaacacgagtccctgactctagaatctgtgctcgtaagcagtcccaggaaatgttcttcagtttagcatttctttcttgctatctgactaattgcaaagaactcattaaaaaaaaaaaaagtcgaaaaatgcttaaggaagaaggagagatttgcacacggtccccagataaacctgcgacagtactttggcttttctttcatgttttaccgtcatctgtattcccgcagcccatacctggatgttagataactggagttaccatgccaactcaccgcagttttggtccaccctttaaacacacacacgagctgttgtccttgagtcgatggtgagagctccgtccattcatgttgtccacacactttactttgtgtcttccagtgaactgtaagacctcccaggctacaggtatttacctcccttcccatcagggctacaaacattttcatccagccaccagccacgtactggctttaaccaggccagctctgaaaacagtaggctggagagaaggctcaacagttaagagcacccacccttgcaccagacccactttgggcagctcatagccactgtcactccagctccaagggatccagcaccctcttctggcctctacttgcattgcatgcacatagacacagacacataatttaagaacagtgatttctttctttttttctttttttgcaaattatgtgtatagtgtgtatgtatatgtatgtatctgtgtgtatctgtgtctgtgtgtaggtctcaggatggttgtctttctcaatctcctccatatatactaggacaaagtctttcagttgaccttagaccctagacttgtctgcatggctgtctaactagctagctttctctggagagcccctgattctgcctccaaagtactagaattataggcaggcatgatacccatatcattatgagacttctaaggctctttttcccacctccctggctcatatttctgtacatgaatatttctgtcattctctaatagattttacttatctggaccccccctctctcccatagaaaaatatatgtggttatttaaatattgcaatggacccataataaaaacttcaaatagcataaaaatgtataaaaatgaaggtaaacatctttgtgtgtatgcatgtgtgcatatcagtgtgaaaatagtgcatatcagtgtgaaaatagtgcatatcagtgtgaaaagctgcatccacactcataaggggaactccgattggactcagtgtgtgtgtacatgttcacatgtgtgtgcatgtgcatgcgtttatgcaggcgtgtgcttgtgtgtgtgcatgtgtgtgaggggtaaatttgcagccacctaatttttcttatatgtttaatatatacttaattccatttttaacttcttgtatatgacgtgactttggcaacacctttatttcctttcaaataactaacaagttgtccatcacatcttgaactatgcatcctttctcgctgaactaaaatattacatttgctaaaactattaaagccacaaatctaatgagaactaattctaaacagtctacgctgttatacttggcttcctttgtaagtcctgagggattgaacccaggaccttatgcaagctcgataagtaccaggctgttaagccacatccccaactcgtgactcttgtttattcttatgccagaaactgcttcttccaagtagaaggtgaggattcacttccaaagttggcctgtgacatccacatgtgcacaccctcctctctctctctctctctttctctctctctctctctctctctctctctctcacacacacacacacacacacacacacacacatcactgggagccatgtatggttgacatacctgtattcccaacacctggagggctgaggctgaaaaactgcaagtttcagcctagcctgggctacacaacaagattccatctaaaaaataaaactcatcaggattttaactagcatctactactgctgtttcgcccagtggacacggtgtcaaactgtcatctagattctcacattcaactcacaggttagtgtgtacctctgttcttggcagagaagcactccttccccctgcccccctccccagtgcacaggatgtcacagacagcagagtactgggcaaacattgtgggaaaggaggtaagaggagcctaagaaccagcaatgggaaggatggctacaaaatagcatcttatgggcatgtcggtctcactgccaaggtgcccacagcagcatctggctgcaggagacctgtgcaagattaagctagttagtgttctagcatccatagggaaagcagagagctactggccatcagtggctgctgggagagggattttcctcagagatgtggttcccgacctgtgcctactctggaggatggccctacacccatgcacacaaggagagctccaactgaactccaagggacataaagagaaggaaaagaggactggagaaagatgggggcatgaggaggaagggtggagggacgtggctatgatcaaaatacactctatactagtatagaatttcaaatataccgcattgcctcctccattctaactggaaactgtagattgattgatactcggacggtccgcaaggaaacccccgtgccatcagcccatgtagacctaccatgtcctggctgtgtcacataaagtaacaagggaacctgaaaattcctagagcatcaatcacatgaaattcttattcactctctccctctccctctctctctctctacccccccccccccagtgcctgagacgtaaatatggaagaggtgcagtgttgccctcaaaatatgctctggagctgctgaccatctacgcctgggagatgggtacagagagcagtgatagcttcaatctggatgaagggttcgtagccgtgatggagctcctcgtaaactaccgcgacatctgcatctactggaccaagtactacaatttccaaaacgaggtcgtcaggaactttctgaagaaacagctgaagggagaccggtgagtctatcaaccacgtgacttacggctctgaggcctagaaaccctgactggagtggcttggggaaaataaagggtttcacgtactcgaaaacattcaggggtcaccaagtcaccaagtatggcctccacatcaccaaggtcttgtaagaccccaactcaatgtgtttcttagacccctagaaacgaaacccagcatggagttctttgttctttcgccttcagcctgagagaacgatgaccactgggtgacccacccaggcgcctgacccatagtgtaagggaacaagaatgtttgccaaagatagcctgtaacctttccgtgggagatgagctgtaattcactatccccattcttacgatgtttactcagcttccccattctttgtggtcttatcctcccctcactttgtggtttattctttaaaaaccctcgactgcaactgctgggggtcgatctcctctgcccctgtgtgggttatgagctcggcctcagcatgctgattcccgaataaacctcatgcgatattgcatcaagaacagtttctctcgagttattgggatgttggctcatcccgggacttgagcgaggttctccccgaaacgggggtctttcagtctctgtctgtgagtggttcaacccttccctacccagggtcttccagtcaagttccgatttatcgcttcaaggttgcaatggttctagctttctcctctagacacctagttgccagtataagattgcttatgtctagtaaactctcagagattcattttctggagcttgctgaggttatatctccaatatctccaatcctccccctctcccaccccctttccgttcaccctcttgctacagctccacttgctccggcccgcttgctccagggccctctatctccaatcctaatggaagggctttgcttgcaggggttgcttctactgggccatctgaagaatgctctctgttggccccaccttcagttttaaatgagggagttaattatggagtatactgcaagcagaaataaaggaaaagtaacacgcatcaagagagagactttgcccttagcaaaataatgtcatcaaatccagcagagacaattgagtagcctcagcaggagagagtcagcttccaccccacctactcatggcgctcacaacatcctgcagaggtcaactggggaagctgaggcagtcagctggagttcccactttttctccaaggatgtagctcccctaccctccgagtctgtacttccagctttctgttcccactgtagcatggggtaacaaaattgcccctccccgctctttggggaggggagagggggaaatgacaaggatggtaaccatggtgacaacactggcagacacaagacagccttgcaagaaaagtttgagatccacgtttggctctgaaacagtggaggctgcagaggcccgcctccagagacagctttttagtgatcttaaacatcccgtgacaatttgcccttataatgcgttttatggttccacagagacgagggcccagaggccagtatcctgactgtaaccgagatctgccattttctcccccccaggcccatcatcctagacccagctgaccccaccaacaacctgggaagaagaaagggatgggaacaggtggctgcagaagctgctttctgcctgctgcaggtctgttgcacgactgtaggccccagcgagcgctggaatgtacaggtactatgcatactatctcctggtgagaactcacgctaacactcatttagatcacgctcttcccaaggcatcccagcaagggctgttatgccttgattcctcaggaaaccggaagagctnnnnnnnnnnnnnnnnnnnncccacccccacccccccagcttagcacttatatacagagcagttagaacatctttgaatgcttagggtgaaggggaggtaattcagacacgataccatttggtggggcgggactgccaggctgggagggggattaaagattgtcttttgtggggctatcaggaactagttttatggcgggcaataactgtgtgtgacctctgattacttcttttctatgatttaagcatgggacccgaatctcctttcttcaaggataggcaccaactgtacctggttatctaggagagtgctagccttggcaccactgaagctgagcttctgaggggcaatgtagaggcaagccccagacacaagccttgcagcgcttgctgtgggagaagcctagggaaaggggtggggggacttctgcaggagagtgcagaagcaagcagcctgtgcacctcagggccgtgtatttaggtatcaaagcccagtttctatctataaacacccaggcctcagttcattcatcggtaagatgggcagacaatctgccctggtctatagtcacctcagagacagagtctaataatttacctctagcttggatctagagtaatattttctcatttggtggatcatcgtcactgttttagtcagggtctctattcctgcacaaatatcatgaccaagaagcaagttggggaggaaagggtttattgggcttacacttccatgctgctgttcatcaccaaggaagtcaggactggaactcaagcaggtcaggaagcaggagctgatgcagaggtcatggagggatgttctttactggcttgcttcccctggctttctcagcctgctctcttatggaaccaagactaccagcccagaaatggtcccacccacaaggggcctttcccccttgattactaattgagaaaatgccttacagttggacctcatggaggcatctccccaactgaagctcctttctctgtgataaccccagctgtgtcaagttgacacaaaactagccagtacaatcgcttactatttaaatagtaagtgtaatatgttttttaaaaattaagtgagtcttctacagctcactgcagacagtaagtccactgtacagccttgccccataggccaccaccatcttggatctgaatgcaaatccaatgtttggattcaagaattggactgagaggtttcccgaggaagctgtttccctaacttgctaaacccacagaaatcctgtcccttggcccatttcttattttcttcgggaaaagttgtgatttgtcctcaaaagtggccccacagcaaatgaaacaaggtagacagatagagtctgaaagggacctgccatctggccatcaagtgccaatagctgagaatgccccccccccccaaaaaaaaaaaaacaaaaacaaaaaacaaaaaacaaaggaccctttgggaagcaaggaaaaatgaaaaaaaaaaaaaaaactacttatgtctcttgtctcagttagggtttctactgctgtgaacagacaccatgactacagagcagctcttaaaaaggaaaacactggggctggcttacagggtctgagaatcattccattatcgtcaggcgggaagcatggcagtgtgcaggcagacatggtgctggagaaggggctgagagtccttgatccgcaggcagcaggcagagacctggctggagcttctgagacctcaaagcccacctccataaagatacatttcttccagcaaggccacactcactcccggaagccacacccactctagcaaggccacacctcctgctagagccattccctacggtgcggggatggggagcgatttttattcaaaccaccagtctctctccatctcagaccccagtttctcagaaattccattttccagagaccagctctcagcctcttacctccctctgtgaatagcgcctccgctgagcgtgtgtggtccctctgcgtgttctcacttcacttaagttattgttcagtgggttattctgttactaaattatcttaacagacaattccctagtcgcaaaaacagatccagaagggaccacggtggagtacaagtcagagcacttctgagcatcacctgggggtgaggttgattatagcagctcaaaggaccagtgccaggattgtgctcaacaaatatgaggaaaaaaaaaaaacatttctgttacttttctgtgtggtagaaaactatttaaaccccgggccatagactatttatgttccttgttattctttactttattatattttttaaaagatttatttagccgggcggtggtggggcacgcctttaatcccagcacttgggaggcagaggcaggcggatttctgagttcaaggacagcctggtctacagagtgagttccaggacagccagggctatacagagaaaccctgtctcgaaaaacaaaacaaaacaaaacaaaacaaaaaagatttatttattatatgtaagtaaactatagatgccttcagacataccagaagagggcgtcagatcttcctatggctggttgtgagccaccatgtggttgctgggatttgaactcaggaccttcagaagagcagtcagtgttcttaagcactgagccatcttaccagatcagatattttctttatttacatttcaaatgtaattaaaccttccctggtttaccctctgaaaacctgctatcccatcctccctcctctgctgctatgagggtgttcccttcacccacccacccactcctgcctcccggccccggccccggcattcccctatttttttggttttcgttttcgttttggttttggttttggtttatttaattttttttttaattttttgttttttttttttaagacagggtttctttgcatagtcctggaactcactctgtagaccaggctggcctcaatcccaaaacctgtacctgccagccccccccccccccacacacacacacactgatatactaggatcctcctgtaagtcctgtaagtgctcggctgagggacgtctcatttaacctaccaggagaccattccagatccaagccatcttttcagcaaatatgtcagaattctgtgacgtgacatattttaatgtctagaacctaaccctgaagcagaatttttaggacacatccagacttttggcataacagtgatcgcccttgaacaaccctcctaaagccagacacaactattaaatgacatcactgtaatccccaggctcccataaggacaacgctgttgtgtacccgtgatgggtgacgattctgagtaattccacaggggaagagtatcatttagaatccatttgttgggctggagagatggctcagcagttaagagcactgactgttcttccaaatgtcccgagttcaattcccagcaacatgatggctcacaaccatctgtaatgggatctgatgccctcttctggtgcatctgaagacagcaatattatatatctatataatatatatctgtacacagatatagtgtacatagataaataaatctttaggctggagagagcagggctgaccagagcgagcaaccttcattctcagcaaccacatgatggctcacaaccatcagtacagccacagtggactcatatacataaaatttataaaatgttcgaggaacatggcgtgagttagtggtactctgagcctagggtagccaagcagctcacctgttgtctcacgccattgttcgttatgtctcccaggttgtcttggtagatgataaactatatcaggagctagaagaaagcagctttgtagacaatagacagttctttccatacacttgccctttctcttctctcccttgcagcgagcgagggatgttcaggtgagagtgaaacaaacgggaacagtggattggacactctggacaaacccctacagccccatcagaaagatgaaggcagagatcaggagggaaaagaactttggaggggaactgcgcatctccttccaggagcccggaggggagagacagctgctcagcagcaggaagaccctagcagattatgggatattctctaaggtgaacattcaagtgctggagacctttcctcctgagatcctggtctttgtgaagtatcctggtggccagagcaagcctttcaccatcgaccctgatgataccatcttagatctgaaagagaagatagaagatgctggaggcccttgtgcggaggatcaggtactactgttggatgatgaggagttggaagatgatgagagccttaaagagcttgagatcaaagactgcgacaccatcatactcattagggtaatcgactagtctggctgcttgagtccgtgcctagagtcttacgcctccctacctcatccctagactctgatgggttctttctatagcttaaatatcaacattcccttctcttgcttaaaaccctctcctatagccgggcagtggtggtgcatgcctttatctcagcacttagagaatttctgagttcaaggccagcctggtctatagagtgagttacagaacagccagagctatacggagaaaccctgtctcagataaacaaacaaacaaacaaacaaaccctctcctgtgttttccaataatacagaatgaagttcaagtttcttttcctaacagtcaattaagctgaaccctgcttagtccccgacccccaactctaaacactcaactcatactgaatgcagagtgacaccttgagtcacactgagagctgagtcacacctgtgtctcttttcctcaaacatcctttccctcagcctctgttttcatcattctgtgagtcaccgaatctcaaagagcagaccccagactgtcagattccccacctctccagaaacctcttagaatggaaaactaacccaagccagacatttcaccgagactcagcggtcctggacttaacaagcctttcacatcattctgcatgctcctgtttgaaaacaactactatctggcccatgcagcaggccaaatcatcttgtgttcccgccctctcccttcatccatgttagactcccgtggacgtaaatctatctcccttgtctaatcagactcgattgtttttaatgatttaggccttgtgctctagaatggtaccaatccagtatcaatgtatgacaagtgcttgttaaataaagaagcgaaccagagaatggctttggatcctccgatattgtcttgatcaggtctgaggccattttagagtccacctactttcaggtgcccctaacccacatattattctctggagatgcccccaagtcagctctaccaacctcatgctggcgcgtagtcatggcctcctgtctaaacctacttggtgaaaggtgataaggatagatcctatccaatggctacagttagccaatcacagatttcagtcttggaacgtggggccccggtacagtaaacttctggtatagtcaggattgaaagaagctaaatagctgtatttgtcagggctctctacagtcgcaggacttaaggaatgactctcaatattgagggaatctattgtgacgacttagagtttgtagtccaactaacccaacaacggtcagctctgaataggaaggtcaagaatctagtagttgctcagtcccacgaggctgggtgtttcagctggtcttctgttgcagtaggttccaacagatgtgctggctagtaagtgcaagcaggtgaagaagaccgaatcttcctttgtccaatgtccttatggggacctctagcagaaggtgtggcccagattaaaggtgtgtatcacgatgcttggatctggaacttgctttggtccaggctaaacttgaactcagagatctccttacctcagtctcctgggattaaaggccttgcctgggcctaagcttttcatggccactatgcctcaagacctccatgccaagatccaggtcagaaacttgtgtcttccagcctcaagacctggatcacaggtgagccctccaattctggattgtagttcatcccagatatagtcaagctgacacccaggaatagccattacaacaggcaagagtagatccaccccagcccctcattaaatacagaaatcagtttacgtatcggccccttcatacatgcagaatcccatgcatttctgtgaatgatataccaaaaaaatctcacagacgatgccatctggctattttcacagatgccttggagttggacggacttgtagaaataacaacccttccacttttacagctaggaaaaaaaaaaaaaaaagcttaaaacacattagctggggaggggcgggggctggagagatggctcagtggttaagagcactgactgttcttccagaggtcctttgttcaattcctagcaatgacatggtgactcacaaccatctgtaatgggatctgatgccctcttctggtgtgcctgaagacacctcaacagtgtgctcacatacatagaataaataaatacatcttttaaaaaaagaatatattagccaggcagtggtagtgaacacctttaatcccagcttgggaggcagaatcaggcagatctctctgaggtcagcctggtctacagagtgagttccaggacagccagagctacacagagaaaccctgtcttgaatataggaaactatgttcagagggagagaaggaaggaagggccttggtcaatgtccaggctctcctgtgactcctggaaggaatctttttctcttcgtctctggccttcccacagtgggcacgtgccaggaagtctgacctcatcctgatggaaatcttgctgataccaatgatcttagccgattccctgggaagatcacctgacccaatacctaggccaagccaatcaaactatgaatgctaaggactggtgactaggccaagccaatcaaaccatgaatgctaaagactggtgactagtatttcctgagcctttcctgtgtcctaggagcagcacagaccacatgccgtttatgtgactccaataacaggcttcaattggtgactgttgccctatttgttaggaaccaggcacgctctcttctccagcctaccttcagtatcagcagccacatcaccagccaccaaannnnnnnnnnnnnnnnnnnncttccccctgagggaccagacacacacgggtatagtatagaatagaatttatctagggaatggggaggggagttaagagggtagtagaggcagagaaaggcagagagagggagagtagataagtggaggccagccatgaccacatggagagaggggggaagggaatgaagagagacaagggggcaagaggcaagtgtgtaagagagagaggaggggccaagcctaccaggctgttgccaggaactgtgggggtggagtttagacagaataccaacacctgttgtacatctgtttagagatggcagccattaccgcctcctcatgatgctgtgctacaggatgtcagctctcccttccccgtcccagtgctgcctgccacagtcaccaccatcgtgtgaacgtgagctctcctctcagaacgaaggcttgaagaggtgactcagagactgagagcctacactgctctcgcagggagcccatgtttgagtcctagcacccacacttggcagttcccagctgcctgcgactccaactccagggaacccaacagtaaccttttctagcttctgagaatgcatacacacacacacacacacacacacacacacaatacacacagcacaaacgtacaaacacacacataaacatatacatacatagcacacacatatatatacacacaaacacacataaacagacacacacggcatacacaaacacataaacatacatgtacacacatacatatatagaaacacacacgaacacatatatacacatacacggtacacacctacatacaagcacagcacatatatacccatacatggcacacaaaacatacacacagggcacacacacatacatacaagcacagcacatacatacacacacatacacacagatgcgcacacacaaaaaaaacctatatacatcacagacaattaaaaataaaaatcaggccaggcagtggtggcacacgccttgaatcccagcacttgggaggcagaggcaggcagatttctgagttcgaggccagcctggtctacagagtgagttccaggacagccagggctactcagagaagccctgtctcaaaaaacaaaaaaagaacaaaaacaaacaaacaaaaattcagtgactctaacagcaagcagttgtcactaattgcttttctttctgctctgagttccccttccatgtcctagacctggcatggatggaacgttaaagagctgtgtccttgccgacctggctgatctccctacatgtacttctgtgctggagccaaaggacaaaagcagagaaaagatgagacagcagtttctgtttctcgccatcgcttttctacctctctctccttcctagtaacgcaactttaaggtagacacattgtgaaaggctaaaaactacacttccctgtctcccttgccctgagtgtgaccatgtgattaagttctggcagtggagatcatttgcatcttatgcataaatttgcattgtctttatatttgtttgttgtgcccataattcctagaagaggaatctctcctgttttgtttgttgaatttggttctttttttagcagggagggagagtgtgttttgtgtgtgtgtgtgtgtatgtatgatgtgcgtgtgtgcgtgtgtgtgtgtgtgtgtgtgtgtgtgtgtgtgtgtgtgtgtgtgatgtgtgtttgtgtatggtatatgtgtatgtatgatgggtatgtgtatgagggtatgcatatgtgtgtatgtgtgagggtatgtatatgtgtgtgtgtgatgtgtatatgatgtatgtttgtgtgtatgatgtgtgtgtgtttgtgtatggtgtgtgtatatgatgtgtatgtgtgcgagggtatgcatatatgtatggtatgtgtgtgtgagtgtgtgtgtgtgtgtgtgcatatgtgtttgtgcacctctggaactccatgacttgaagcgccagcccttacctttccactttgtttggaagacaggattcctcaccaccacacaggccaggctgactgggctgtgggcctctggagagtgtcccatctccacgtccctctgtgggtgtgtcacactctgggattacagagcttgtgctactacactcctcttgaatgtgttctagggacctgaactcagggcaccgggcaacacttccatccactgaaccatcctcagagtcccgcctcctgcttcacccacaaaaccttctgcaaacttctctggcattagagtggagatcggagctcgaatgagcctggtgccatgaagggaagccagggactttgatctagattaaagaaggaaatgctacagtttcaagaaggaagcagcttgaacaatgagccctccatttcctctgtaccctgggcttacttccctttctccccagccagggccccaccccctcaggacacctccagtttgctgatcacctgtgcccactgtccatttgttcctttaagactctctagcggtggggctggagagatggctcagtggttaagagcactgagttcaaatcccagcaaccacatggtggctcacaaccatctgtaatgggatctgatgccctcttttgctgtgtctgaaggcagctacagtgtactcacatacatcaaataaataaaatcgtaaaaaaaaaaaaaaaaagaatttctatcagccaaagttccctaaaggatcagaacaacaaacagaccacacagatattaaaggaggatttattagattggcttagggtgtggtccaggtagttcagccatggctgcctcacactggagaggccaagaatctgagtttcctcagacttccacaagtccaccaagttccgagcatgctccacttcttcactctcaggatcgctggagcgtcggagagaagagccatcattcagggtccactccaatgccagccttgggccacaaagctggctctctcagctgcctctgtctgtcagctgctggtcatcagcctatgctagaatcccaaagaagttagctctagggctggagagatggctcagcggttaagaacattgactgctcttctgaaggtcctgagttcaagtcccagcaaccacatggtggcttacaaccatcaatacagctacagtttactcatatacataaaataaataaataaatcttcttttaaaaacaaaaaaggaagaagaagaagttggttctaatatcagtgaaaagtgccacaccgacagacttcctagagcaagggcaagcgggcagaatgcagatttcttctctctgggctgatgccagaacaagccacttatgttttgggtgggtcatcgttcctactcaaatgacttgattttaaagaaaactctttacaagaatgcccaatggcttgccttttagtcgactctagagctagccacgttgacaaccaagcttatccatcttagggtcctcagggctacaagagacagaaccctaaatggatatagtttgagcaaaaccaagttaagaccaggtgacggctcatatctgtaaccccagagctcagtagtctgaagcaggagaattaccgtgagtttcagaattgccagggctacatacataggtagtttgaggccagcctaggctagagagtaagacaacttatcttaaaaacaaaaacaaggcaggaggggggtatgggtggtatgggggtggtgctgagccaaggtggcactcacctttgatcccagcactctggaggcagaggcaggcagatctctggtttccaggccaggctggtcctgtgaatgagttccagggcagccagggctacacagagaaaccctagcttgaaaaaacaaagggctggagaaatggctcagcggttaagagcactaactgttcttccagaggtcctgagttcaattcccagcaaccacataaccatctgtaatgggatccaatgccctcttctggcatggctgaagacagcgacagtgtagtcatataaataaataattcttaagaaaaaccaaacataaagtagttaatcctgggctgttagccaggattctccagagaaacaggactaatggaaaggagatgggcaggaaagaggactgttttgagaactagctcatatgatcacatgatcataggattatgtaggctgcatgctaaagacccagggaaagtattagtatgatttagtcaggagaacccgaggtgtaagtactgagagctaaggactcaaaactgtggggcagagtggaaaatgactgcgtcagcaccaaaggagacaacattcaccagtaactctacccctttcttctacctgggcttctgacaagtcaattaattacactcactggcaagggacaatctttctcaaaaccatcctttcagacatgcgcagaaataacatttaggattgaggagatggctcaatgggtgaagcacttgctgggaaggcctgacagcgagttttggtccccacagtatgtgtaaaagctggacacactagtaagtgtcaccatcccagcgcttctgtgaggaggtggcagctccaagccagttagctccacatacacagaagtgcacacaaaagagacactgtcatggggtatccaccaaagaagactccttggacacaggtttaagccaataaagtccttattacttggccagagtccacactgggtattcaggaccccagtatagcccagagcctttttcagggtgagtcttaagcacaaaaactgtatcctgggttgatatactacaattagcaataacagctagccaaaagcagactacagaagccaggaagcaaggtttgtactacactcagagactttcccagaactctggacttggatggatcaggtctctgttttcattttgacaagtgatgctgtctctgtgctgagttttacccctgaatggcacttccatcatggaatcagttatgctaagggcctgttccagaatgttccacctaaaacatggtggaaggtgaggacatctgaagttgtcctctgatttccacatacccacactttcatgctcacagtcacacccacccacacacactcatacacactcacatatatacacactcacacatatacactcatacatactcatacactcacatattcctacactcatatatactcatacataaacacactcacacacatagacacatactctcatactcacactcacacacacaagcagacacacacactcacacatactcacacactcatacatactcactcacacacactcacacatacttacagacacactctcatactcacacatacactcatacatactcttacatacacacacttacatacacatatatacatacacacattcatatacacatacatacacacactcatactcactctctcacatatacatactcatagacactcatacacacacatctacactctcacacatactcatatactcacacatacacacactcacatacacacatacacactcacacgcatacacacactcacacatacacactctcacacacatacatatactctctctcacacacacacacactctttcacacacatacacacatatactctctctctttccctttctctctctctctctctctctctctctctctctctctctcacacacacacacacacacacacacacacacacacatgaaggaagctggaggatatgttggcaatctgggcatcctatagttcagatgagctgactcctaaaaccaactgtctggatcatgtatacagcagtccaaatgacaaactatctatgccacatggctttactaagtcaccttgagccactnnnnnnnnnnnnnnnnnnnnactgcgtcagcaccaaaggagacaacattcaccagtaactctactcctttcttctacctgggcttctgacaagtcaattaattacactctctggcaagggacaatctctctcaaaaccatcctttcagacattggcagaaataacatttaggattgaggagatggcttgatgggtgaagcacttgctgggaaggcctgacagcgagagttttggtccccacagtatgtgtaaaagctggacacactagcaagtgtcaccatcccagcgcttctgtgaggaggtggcagctccaagccagttagctccacatacacagaagtgcacacaaaagagacactgtcatggggtatccaccaaagaagactccttggacacaggtttaagctaataaagtccttattacttggccagagtccacactgggtattcaggaccccagtatagcccagagcctttttcagggtgagtcttaagcacaaaaactgtatcctgggttgatatactacaattagcaataacagctaacatactcatagacactcatacacacacatctacactctcacacatactcatatactcacacatacacacactcacatacacacatacacactcacatgcatacacacactcacacatacacactctctcacacacatacatatactctcacacacacacacacactctttcacacacatatactctctctctttacctttctctctctctctctctctcacacacacacacacacgtgaaggaagctggaggatatgtttgcaatctgggcatcctatagttcagatgagctgactcctaaaaccaactgtctggatcatggatacagcagtccaaatgacaaactatctatgccacatggctttactaagtcaccttgagccactcctttatttgttcagggctgactttactgaaaggttcatctgctctgacctagctcaccaaagccagaggaccagaacagcccaaggcctgaggccagcactaatgtggaggtgaggaagggccagcagggctgggttgcaatatgaggacacagaaacatggctgtcagtgtttctgagatctgcactctccacctcccaacctcccactgccaacttttgagagctcaagaacaaaccgtccttacctaagtcctcagttggtgctctacatcacggagactccaagccacgcccatcctcccatgcctgcctcccgccccaaacctagtcatcctcctctgataattggctccccctccttgcccacaaaaactcgtttaattaagctgtgttttgacactccagaaaggcaacgcattactgactccgtatccccttttaaaacattcaaacgacattcggagtattagtggtaaaatggtcgatgttgcttggcccttaggatgcttcgtggcggtgaacagaaagaataagtgaggcccgaccagttcttgtgtgaataaatcatgtcagcataaacatacggtaaatgtacacgtcttcgtctgtgccgacttccatttgtgaaattactgctactctttaaaatgatataatatagctgggcgtggtggcgcacgcctttaatcccagcactcgggaggcagaggcaggcggatttctgagttcgaggccagcctggtctacaaagtgagctccaggacagccagggctatacagagaaaccctgtctcgaaaaaacaaaacaaacaaacaaacaaaaaatgttataatatagtatggtctgacttaagaactcagtgctgaggacagatcagacgcaggatgtgggaggggcagctaacactaaggatgtccgaggaagctctgtagaagcctgctatttcataagctccatagagagacccagaaaacattttcaccggagttaccctacagaggggataacattctctctcggggcgctagtggccatcatctgtgtgacaaggaaaaccatgtgtggtctccccatgaagcttcccacctccacatgcaaggcacctccatttcttcctgcagactcactcctaggcttccaccggctctgctattcctcctttcactaatggacgaagccagaggggatcagctatccctgcttcctcctccttcagagacttgggaccacccagacactattgcacaatgccagcaagattttgctgaaaggaccctgttatagctgtctcgcatgacgctatgccagtgcctggcaaatatagtagtggacgctcacagtcatctataagatggaatactaggcccccaatggagaagctagagaaagcacccaaggagctgaaggggtctgcaatcctataggtggaacaataatatgaactaactagtccccccagagcacgtatctctaactgcatatgtagcagaagatggcctagtcagctatcactgggaaaagaggcccctggtactgtaaactttatatgccccagtacaggggaatgccagggccaagaagcgggagtgggtgagtaggggagcagggtggagggagggtatagggaacttttgggatagcatttgaaatgtatataaagaaaatatccaattaaaaaaaagaattaaaaaaaagaaaaaaattgggacccagcccctttccttatccgctctgtgcccatcgcccccctgcccacctcttccttccttttttctttttaactttagatttatctatttttataagagtttttttttaattgctattttcagacatacactagaagactgcatcggatcccattacagatgattgtgagccaccatgtggtagctgggaattgaactcaggacctcctccgacagagcagtcagtgctcttaaccgctgagccatctctccagcccctcttctctctttctatagacaggtctcattacgcagcctcagctgacctggaattcaccgtatcaaccagtctggtttcacacttacagagatccacctgcctctgcctccctagggctgggattaaaggcctgtgccaccacagcccgctcactgctgcatcctgcatggaccgccacacggtgtcagacccatctccctgcctgtagcattgctgccgtctatctttagtacagaaggtggcagagcgatcatgctaggttctaagttctctgcacgccacgcttctgattcaccctgggaaggaggctgaacgggctcacctgacatgtgacttagtgagccacttcctctttgtcaaacagcattatcacttggcttccagaacgttctcctttccttcaccctcctgctcttcctcgttctgctttgctgaactctttcagcaaccccagctctgaatctttaactacctcagagcccggctccacccacttctctacacagcccctgctaggtctcatgtctgtaacgatctctgttagaggcaccttcatttgggttgttttggctttgaaaacgttttattgagactgtgtgtgtggtgtttgcgtgcttaaatgcaaacacattcaagatgttttgtttcctgtttctatgagataagagtttctctgtgtagtcctggctgtcctggaactcactctgtagaccaggctggccacaatccaggtcctacagtgtgtatttctcatatttcacgtttttcactgtttctcgccatattccaggtcctaccgtgtgtttctctttttgcacgtttttcagtgtttctcgccatatttcatgtcctaccatatgagtttctcttttcctcgtttcacaccatattgccacgcctaatgacccaagtatgggtcctaaaatccacgtgcggtggaagcagacaacaggcccctgcaggttttactctgacccccacatttgtgccatgacatgcgtccccctcctaaaaaaaaacccaaaatacataaatataattttctcatataaatatatgtaaatataaagtaaataaaatataaataaaaatttaaatcttttaaatgaaatatactaacttttatataaatataataataattctttgaaataaaataaagaaaaagcatctgacaacctcaaagtgtccttctgattccagattcctcattccttaccacagccatgactaggctctttctctttccaaacctcagtttccctatgacgggtcggggcagttggcctaagtcatccagacaaggtgtctctggaaggtcagactcaagccaatttcagtttacaaacgtcacaaaagagaaactacaaatgttgagaatcgaaacttaacagcacaaaagttggccccatgccaaccctgttaaggcggtccagaccggccaaccccagcctctggtccctcggcacacctaccatgacaataaatctccaaggaggggacccccccatagagccatgctcccaagcttctctcttcacccccctttccgccattgggtgccagaggtcagctggaaaggagccgccttaaaaaaggaggaggtgagtaccggcagctggatgggtgcttggctatatagccctgcgcctgcctgaggtagctgacggtcagtgtgtagccattggcagtcgcccaggagctgtacggcttcccggcctccaagctggactcctttgtggctcagtggctgcagccaaccagagagtggaaagaagaggtcctggagaccgtgcagacagtggagcagttcctgaggcaggagaatttccgtgaagatcgtggcccggctcgggatgtgcgcgtgctcaaggtactcaaggtaagactggacttcaccattcccagccaggacagggcaaaccccagtgccagggagtcccctcgcctcgtgatccctagttcacgcttctgacatctcgagacagccccgcgagccttgagcagaatgaactactaaagaagataataaaagaccacctctggagaaaatggtagggaaagcctgcatattctatcattaaaacttatactctgagagatagataccattcttgtcccattttacagatgagcctaacaaaggctccacaatgtcagagctacagtgaccacatccaatgcaaggcctctagttggatcctgacatgtaatttgtaaataacaatttttgagagcctgacttgggggcccattcttgcaaccccagcatgtgggaggtagagaagcaagaggatggttggttcacagcctaggttacatatcacagaacaacacacacacacacatacacacacacacacacacacacacaccacagacagacagagacacagagagagtgtgagtttggggatgagtggtaaatgtttaatatgacctgcattttggtaagaaaactgccgtttgtcaagttaaatcgcacctactggggtggggaactctctttagggggacacatgctatgctgtattggggcaaagctccttgctgtccgctactcactttaaagtgattgagatgacacaaatgcgggatctgtggatgtggctcaaggctagagtgaaagcctagcatgtacaaaagaaagacagtcaccgatgtggcaagtttagatgtgctggctgcctggatggtatcttcttcctaattttttccacgttttaatattttgataactgaaagactcttaaaatggaggctgagagtagccattgggcttgttcagagatgtaactgctgacgtcagagctgggatttgaacccggctactcaaacggtgacccaagtttctcactaatatttttttttcctccttaaatccttcttccaactgccacccctaccccctagctgagctaaggatcacaggttcaacagaccctggaagggggtggggcaagggctgagtgtagctgctcaaacttattatcccagccctgcagaggcagagacaagagaaccactaggcctaccaaccagtctccttggcctatcagtctagccaaatctgcaagccctagggcacagtagaataccctgtgtcaaaaaaaccaaatgagcagcctaaagaacaatacccaaggttgccctctgatctccacacacaagtgtgcactagtgcaggatgcacacatgcgcacacacacagctttggagaagaactaacctcagccaattgttcatttaaatgttaaggagattgacacctgaagaggttgacacatcttaatgccatagcccaagtggttgcagcatctagactagaattaggactggattcccagcctgagattttaaacttgcgctattgggttgaattttgaagtcttgagcttcaggtcacatgatttagaagtgacagccatagttttgtcaccacacagagaggatttgagtctgggctcttcctctcaccagctgtgtgactctgatcatcctgtctcatgtctcaagtccttggtctgctcctctatgatggcagcatcccaaacatcgtgttccatttcccaacactgaggccatgcagcctaaaggttagctcagggtaaagtcttagaaacaagggtttcattatgatacttgcctggggctttttcctggctgctgggagtctctgggggcaaggctgtactctagatcactccctccctgatatacctaaggaaaaaaatatgtagaacaagtatctagatagaagaaagactcaccaaatagattaagttttggcagctgcagatgctaactgctaagcctcatttctcctccccttaacccactaaatgatagtcatgcctacaaagcaagaacagtaagagtgtatcttgcactggatgtatcctatactggatgtatcctgcagtggatgtatcctacactggatgtgtcctacacaggatgtatcctacactggatatatgttacactggctatactctcattgaatgtatcctacactggatgtatcctacactggatgtatcctaaactggctgtatcctcattggatgtatcctacactctacactctatgtatcctatacttcatccctccatccttgaagctccagagggctgagttatccacgtgactgaatccgagatgacaaccaaagcaaatcacgaagtctatcctaagctgtgctttcttcactggggaagggagagggcagtgtagacataacctgacctgcagagggatcgccctttgcccacatccacaatcaatctccggtcctttctctcaggataggaacaccaagtctgaatactagtggaatcagaattaaaatggagaatcaagaaggcagacacctgctgtctgggaacagagcatagtgtgtggacaccatcatagggtggagagaaagacccattggtggtgtctgctgagctgccatttaactccctggctggctgggagaccttgcaagtggattgtgctccactgcctctgtattcagtgttgtaccctggggagccaggtcacaggaccagtctccatggcgattaaaaaggagatgtgcattaaatggcctttggtagtgccagatacagggactgctcagcctgtgataacagtattttaatttctgcagtgactcactaaccaggaaaagtagccacccagagactgacccaaccccagtagtctcatgtggggtgagccagaggtgagccagagagatgtagggctttgtatgccaaggaggcagagccaggagagtaagcctggactctctcttcaaaatcatctgattcaagagccagcaggatggctcagcatgtaaaggagccaagactgacaccctgagtataatcccaggggcccacatgatgaaatgagggaaccaacttccaccagttatcccctggcccccacatgtgtgccatagggtatgtgggacacacacatacacccagaggaataaataaaatggaaaaaaattaaacaatccagtttcttctcttgtcattaagagatatagaaactggggggtctggagagatggctcagtgattaaaagtactgactgctcttccgggggggaggggagcgaggaaactaatgtgactaatatggaaggagctggggatcaactcgatgaaaagggaagagatacgcaccgctgactgctgacttctgggacacgccttgctgacttcaggacacggcccacacacacatcctgggcgtacagtgctgtgtctgatcttcctaataaccctatcactggtttggtttctcacttgccagactttggcctccttaatgatcacgtagccggtgagtcaggccagggctaggcttagagctctaatgccaaagaccttgtcacccatgatggaggctccctgagccatccacaatgcaattaaaccaaggaagcagagagaatggaggggagaaaggaaaaatggatagatggatggatggatgaatggatggatgggaccgactccctgtttcacagatggtgcagtgggtatttctacaggtcaggagtcctttaccagatacttaggccctgaaatgtttcaggtttagaaacagccccactccccagctcttcggcctatctacataaacataatgagataccttagggtaggacccagatctattcttgaagttcatgtgtcttcacatacccaaaggcaactttatacgctacttttagtcacatggggtcaggtgtgggattttccacttgtggtggcatatcagcaggtttcaaaaaaggctcttggattttgatcattttggagtgtttttattggggatactcagtcctgattctcttagagcagacatttccctgggttggagaagactgactctctaaaggtgtacagtgcagggaaatagcaagggctgctcggtgggccagtcctggaacccgtgcctgggaggctgaatcaggggggccatgagttcaaggacagcctgagctaaacagcaaggtccaggtcagctgcaggctgtgtattagaacagagaccctgtgtcaggaggcctgggggccagagtccagctgccagagatgctgagcacaagattcaccctccatgtgtctgcacccgtgacgtgggaagcaacacttttcagctagcctgtgtggaagggttctcaattaaagggctgtatcgtatgaagagccccaggttgctgggcctgtggctgagagccttggggtgacagggtcctgtctttcacaggtaggctgctttgggaatggcaccgtgctcaggagcactacagacgtggagctggtcgtgttcctgagctgtttccacagcttccaggaagaagccaagcaccatcaggctgtcctgagactgatacagaaaaggatgtactactgccaggagctgatggaccttgggctcagtaacctgagtgtgactaacagagtacccagtagtctcatcttcacgatccagaccagggagacctgggagaccatcactgtcaccgttgtgcccgcctacagagccctgggtaaggggaacagaagcacacgcctcgcctggcctcccctggagactgtgacctctttcctctggtggccgcatgctttcctctttcctacccgtgtcctgggctggggtgagctgccatgccgacttggggaaacagaaactcatcacagaggcccacaagacaaacagtagccagtgatcggaagaaagaatggagttcccccaggaagtaccaaataaggttccagaaaggattttctgtaggaagaatatttttgaaagatccaaggcccaaccaggggaaggagtcaaatcagaagcaaggtggcatctactgggtctgggtgacctttcccagaagcagagctcagagatccaaaccataatgatttttgtatgctaccccccaattgataaggctatgcagtgttatcccatggttgctagcaatagtatccagcctcaggaagaaagtccttcgtggagtggtgcaatcccagttctcccctatgaatattgaccaatacggttccatcatccagaaagagatctattgataaaacaaacactaaggaaagctggggaatattgggaacatcagggaggacccgagacatggaaaggccagtggttgttcttctgagcaagactcaccaggttgcgtgtgttggaagttgcctttaatcccagcactcaggacacagcatcaggtctctaagagtttgagaccaggccagtctatgtaacaagcagccaggtatacaccgtgagactctgtcaccaaagtaaaatttaaagtatgaagcttttaaagaatgtctgggggtgagggtggggatgcctttaatcccagaactcaggaagcagaagcaggcagatctctgtgagttcaaggccagcctgatctacaggtctacagactgagttccaggacagccagggctacagagaaatcctgtcttgagacacacacacacacacacacacacacacacacacacacacacacataggagagaaagaaaggaagaaaaaaggaaggaaggaaggaaggatagattaccagaaagacaactatacaaggtctcaggtgttgtgttttataaagcagagatatgtttgatggaggggtggcatggtgttcagggaagggggtgcctctgcaggcccatgctgaggcatcccttctccctctgtggtaccagtcacatgatacagtactcagggcatgggggggcggggagaggcggaggcagaggcagggagagagagaagaggaaaaaaggctggccatgagcatgtgggggtgaggtgaggagagaggggggagaggctaagggagcaagggcaggagagcaagagagagaagaggggcaagcagccccttttaaagtactattgccaggtagctgtgggacggggcctagacaaaatgccaacatctggtctctctggagatgaaccataatctaacgagtgaccaggccctcccaaaatgcctacttagtccacgctggattccagaatcttccttcacttggtctttgcttccactctcctcaggcccttcctgtcccagctccgaggtctacgcaaatctgatcaaggctaatgggtacccaggaaatttctctccatccttcagcgagctgcagcgaaacttcgtgaagcatcggccgacgaagctgaagagcctccttcggttggtcaaacactggtaccagcaggtgagggggctgccagggtgaggctgggggaaaggcatcaacgggagacagggtttcgggaggatgggcagatgctaggacatccgcaacccgcagatactgttcctgggctgatgtccactcctgtggtttgtgaacgttaggctcaacaagttcaagactaaggaggaggtggattccttaaaatccatgcatacaactctgcctctcagtggtgacagcttctgcgtccccgtcatcactgaatgaacgggtccttggtgactacttttcaagtgtcacatgtggtatctgaagcgaacccagtatatttcgatgcagtgggtgtgtagagttatctaaactgaaaaaaggaggcatcaaaaatagcccctttgcgggggctggtgagatggctcagcaggtaagagcacctgactgctcttctgaaggtcctgagttcaaatcccagcaaccacatggtggctcacaaccatccgtaatgacatctgatgctcccttctggtgtgtctgaagacagctacagtgtacttacatataataaataaataaatctttaaaaaaaaaatagcccctttgcatgcacgcacgcatgcatgctcaacgcacttacgatgggagggcggtcttcttgtaaaataacagatacactaagagtcagatgagttgtgatggggcacacacctgtaaccccagccctcaggaaactgaagcaaggggatcagccggccttcatagtgagccccaggctaacctaggctacacaaactcaaagacaaactcgagctcattcagcagttaagagcttgcagagaacccgagttcagttcccagtacccacatcaggcagcttgaaacaacctataactcccagctccagagaatcctgcgcctctggcttccgtgagcacccatacactcacatgctcatatgcatacatgcatgcacacatacatgattaaaaataaagtaaatccgggctggagagatggctcagtggttaagagcactgactgctcttccagaggtcctgagttcaattcccagcaaccacatggtgcctcacaaccatctgtaatgggatctgatacttcttctaatgtgtctgaagacagctacagtgtactcatatacataatataaataaatcttcaaaaaaataaagtaaaaaaaatgtaagggcacacacatacatgattaaaaataagtaaaaaaaaaaatgtaaggagtctggtagaactctacctctgtccccttggatggcactgtccacctttacctgtgaatattcatctccagttgtacttcataaattcgctaatgccggagtgaagaaatagagagatcgcccgtgcgtggattatattataatcaatcccctcttttataaatattagctgtcaggtgcaatactcatctgtaagccctcttcgggcccaccccctccactacacacacttgagcctgggcttcatatcaagccttgggaaaattaaaaagagctatgtcttagtttgggttacaattgccataatgaaacaccatgaccaaaaagcaagttggggaggaaagggttaattcagcttacacttccacatcatagttcatcactgaaggaagtcagggcaggaagtcaagcagggcaggaacctagaggcaggagctgatgcagaagccgtggaggggtgctgcatactggcttgctccccaaggcttgctcagcctgctttcttatagaacccaagcccgctagcctaggaatggctccacccacagtgggctggccccacccacgatgggggcggggccctccctcatcaatcattaagaaaattccctaccatcttgctcacagcctggtctaacagaggcattttcttaattgaggttccctactctcaaatgactttagcttgtaaaactacccagcacaagcttagtaccagtggttttagatttttaaataaacagcgggggctgggcaagtagttcagttagtaacaggcttgagacacaaacatgaccacctgagcccagagtcccaacatccacgtaaaaagctgagcacagtggcacacctcccattccagcacagggaaggcagagacaggagaaaccctggggctttctggtcagcttggtctagccagtgagagcgagagcaatccagttaaataagagggcggctcttaaaatgtgaacagcgattaaggaaaatagctcacaccgccctctagcctccacccccatgcatacatacatagtgttatacacttatacgcacgtacaaaaaataaaaatcaaaaaattaattagatctatccgataagatgtctcagcaacttaaaggtgcttgccagactagcttagcgacagtagttcagtctgatcccaggaacccttgtaaaggcttaagttgaactctgacctccacacacgcacctgaagaggagggaggagggaggagggaggagggaggggattcaaaaaaataaattctattcccctaaatttgaattcagacacaatttgatgtcttctgggcaaacctagacccttaatcctaaaacagggaaaccaaggcccaggaagggaaagtcactttgtcaaggtcacacagctcatgggttagagtttgaatgttctgcccctggacctgggtgtcattgtcacacgtaatcttggcatccctctctgtctcttccccactctcttcagtatgtgagagacaagtgcccccgggccaacctgccccctctctatgccctggagctgctcactgtctatgcctgggaagcgggcacccgggaggatgccaacttcaggctggatgaaggcctcgccacggtgatggagctgctccaggatcatgagctcctctgtatctactggaccaagcactacacgctgcagcacccggtcatcgaggcctgtgtcaggagacagctcaggggacaaaggtactgggtctgtgctccccgcagagtctcagagagagagagacagagacaaggagagacagacagggagagagagacaaacagacagagaggaggggaagagacagacagacagagacagggagagagacagagacagagagagacagacaggagagagagacaaacagagagagggggagaaagacagagagagacagacagagagagagaggcagacagacgggggaagtgtggaatcttaggactttattgaatatgcaccaagaactacctcagaccctgacactgaaatctcgagtggacagacatcaggtttcccgagggttgtaggggatacgactctcttccctgtttctcaatactacactttgccctaaaccactccagtgcttttccttaaaaagccagggcaaagcacaaaggccgagttcagagcacctgcggagcatacacagggactagggctgctgccagcttgggcacaggcagagatgggtaggagcctgtcatcattgtcatcactgtcatgcaagggacagttggggtgtgcccagcacccccgtgcaggatgctgaagcttggagaagcacacagcctggatagcataccggaaggcagtctctcgaaaggaccaaagggacagagcagaggaccaaaggaccaaaggggcaaaggaccaaaggggcagagcaggggatgttttatcgggaaactgcttgctctgtgatttgttttctgatgccctgcaaccatctacacacgcgcgcgctcgcacgtgtgcacacacacacacacatgtgtacacacacacacacacacacacacacacacgtgtacacacgcatgcgcatacacattaaatgtaatttttagatgtatttattttatttttttaatatttatttatttattatatgtgagtacactgtagctgtcttcagacactccagaagagggcgtcagattttgttacggatggttgtgagccaccatgtggttgctgggatttgaactctgcaccttttgaagagcagtcggcgctcttaaccactgagccatctcgccagccccgatgtatttattttatgtatatgagtacactgtagctgtcctcagacacaccagaagagggtgtcagatcccattgtagatggttgtgagccaccatgtggttgctgggaattgaactcaggacctctggaagaacagtcagtgctcttaaccactgatccatctctccagcccacttctctccagcccatattagatgtaatttttaaatcaacaaacctagaataaactaactggtatctacaatgtagactgctgaaggtcaaaaaaaaaaattgtgttgtcttagtcagggtttctattgctttgacaaaacaaaaagcaagccgggagaaaagggattttttgtttttgttttttgtttttcaccttacacttccacatcactgttcatcagtgtaggaagtcaggacaggaactcaagcagggcaggaacctggaggcaggagctgatgcagaggccatggaggggtactgcttactggcttgcttcctgtggcttcctcagcttgctttcctacagaacccagggctaccagcccagggatggctccacccacaatggctgggccctgcccccttgatcactaattgagaaaatgcttttacaactggatctcatggagatatttcctcacctgaggctcctctctgagggagaacttcttcttagaaactcccttctggatcttgggcagacctaaaatcttagcttccctcttgctcctgttctctggccatctcccttcttttctcccctcccccttcctctgttccccatttcttcctagttagttacaagtctctatcatccctgggagaaaaccgccatatccctcacacggccagtacacccaggggagtgggaggggcagcactgcctgttccctgatcaccttcatcagacagctgggggtgcatggagctcaagggatccagctcaccccggtagcctgctttcaccctctatcacaaagacaaagccccaaactcaaggaacacacagtgcagttcttactgacaggctccggggtccactgcagtcaatctcccaaggggcccacgcagactccacacaagccagtaatgaacagtctttcagtgtttgcagaccagagagactattagaggcagccagagctctgccctgttgagcagtagaatcagaacagctgagaaccttcactaccaactgtgagagtttgaggtcagcagagagattgttttaatttaatcctttaatttaatttaatcctacaagcctttaattccaacactctgaaggcagaggcagacagatctctgagttccaggccagccagacctacacaaagaaaccctggagagagggagggagggggaaggagagcgagagagagagagagagagagagagagagagagagagagagagagagagagagagcttaaggtctatgtctctgttccctgacctctacaacagggataaccatactaatccttatagaattgttgggagaatcaaagctcacacaggttatgttctggcccagggcttcaaaagcaatcagtggatgttggtggtgccactgttatcaaaggccactcagccaatttgccctcaacgcctgccatggccttgcggtgcctctcctgctaagtggacatctgagactgagactgttccaggacccagtttacagcctcgtcctacccacccctctgattctctgcacttcccggaatgttctcctcaaggagatgagaaatctcatcatctctgaggacacacagatgctcagttgctagagagaatggaggctgggaaccacctccctaggttatggctccctagggtatggctcccaagccagcaagaacctgggtattgtctctctgttgcaggcctatcatcctggacccagcagaccccaccaacaatgtggcagaaggctacagatgggacatagtggctcagcgggccaaccagtgtctgaaacaggactgttgctatgacaacagggacagccccgtccccagctggagggtgaaggtaatgaatggttcctcctaacctgacagtctgaacactacactgcctcacccaacaaagtggggaacagcttttcagaggcaagacgtctggacaccacttgtttccagccaaataaagccaagagataggcaggaaagtatagaccttggggcttgtttatgaaacaggaactatgtagtcctgactgtcctggagcttgcctatatagactaggctagccttgaactcacagagatccacctacctgtgcctcaggagtactggaattaaagatgtgtgttgccacacccagcctgtgactcagtgaagcaaggcctctttgtgtagcccatatactctcaaattcacaacccctctgttatacacaaaaatggctcatacatctcaaacccccactccacccctcctctccctgctggactggaggatattttttccttgaaacctttacaaccctagctttagagttcttccaaacccagctgtgtcctacattccttttgccatgcagtgaacactaagtgtggcagaggcaggtaccatcactttgtctaccaaaggggaggagagcctacctcaatgggctgaaaatgtattggggtggggggggggaggcgcccagcatagagcttacaaagtgctaggnnnnnnnnnnnnnnnnnnnnnnnnnnnnnnnnnnnnnnnnnnnnnnnnnnnnnnnnnnnnnnnnnnnnnnnnnnnnnnnnnnnnnnnnnnnnnnnnnnnnnnnnnnnnnnnnnnnnnnnnnnnnnnnnnnnnnnnnnnnnnnnnnnnnnnnnnnnnnnnnnnnnnnnnnnnnnnnnnnnnnnnnnnnnnnnnnnnnnnnnnnnnnnnnnnnnnnnnnnnnggaggggcggggaagccatttttgctattacaaagatgaatctgggaagggaatttgtgggtcacgagacagaaatgcgagcctaaccccgcctctgtcttttgcagagagcacccgatatccaggtgaccgtgcaggagtgggggcactcggatttaaccttctgggtgaacccttatgaacccataaagaaactgaaagagaaaatccaactgagccagggctacttgggcctgcagcgtctgtcctttcaggagcccggcggagaacgtcagctcatcagaagccattgcacgctcgcctactacggaatcttctgcgacacccacatctgcctgctggacaccatctcccctgagatccaggtctttgtgaaaaacccggatggcaggagccacgcctatgcgatccacccgcttgattacgtcctgaacctgaagcagcagatagaagacaggcagggccttcgatgccaggagcagcgcctggagttccagggccacatcctggaggactggtttgactttaaatcctatggcatccaagacagtgtcacagtcatcctgtccaagacgacggagggggcagctccatttgtgcccagctagcttcctctgtcggtggctctgcctgttttattgtctcatcctagactcagcctagttgcctctccttcccgtcctctgcccggatggtccacgtcttcagtaccttgccagcagggagtcagagggggtgtgagaagtcgtgtacagccagacactcttgtgtgacaatggaattctgcagtcccctgggaagtcatgccaggacctctgccttcctcgtggcctcactgtcaagactgtgtcagtgaatagctggcctcacagactattctcacatgttcagagaaagccaaaccatcttcctaaccaatcacagggaccctgcttgaggttgtcccacctccaaattcttcccagtgacctccatcagggcggctctgaagccttcccctgtgcccccaaccacttctgcctgccttcgactatccaaggcaaggtaggaggggatcaagttcctttcaaatggagaataaaaaagccattgtttcttcccagatgagtggtcctcatttgtcaccacagatgcctctcaactctgcgattgatgggtatagggaaactgagtcaaaaagagacaaagcctgagaaatggagtttgaagatgagacagtatttaaaagttctttctgggcatggtatcacgcctttaatcttgggaggcagaggcaggcagatttctgagttcgaggccagcctggtctacagagtgagttccaagacagccagggctacacagagaaaccctgtctcgaaaagacaaaaacaaacaaacaaacaaacaacaacaacaacaaaacaaaccttgtaggcaatttagcaataccattatatatacttcccaactcttttacatccggggcctacagtatctcttttctagagggtgaacagtctagctcaatccagatcttcatatacttcacaatacagaccatactgtaggggaatgaacagggctgaggcagatcagctggcagaacactggcctgttcctaagaagtccccagttcaatccccagtacttccaggtgtgtcaactcctgcctagaatcccagcacagagtcaggaagatcaggaattcagtcatctttggttgcatggcaggttggaggccagcctgagctacccgagaccctttctaaaactatcaatggattagatgaataagtcactgccttggtccttttacattcccgtagcaaaacaccacaaattcagtgtcttgtgaataacaagtgtttgtttctcactgagaagttgaagatcattggcatccggtgaggacctcttgctggtttgaaaatggtagcttctcacttggtcctcatgtggtagaaggagagaaaggcagatcttcgagagtattgatggcagggataaaggctctgttccctgccaatcatctccaaaagccaacagcatgggaggtaggaagtcagcaaagggattcaaacatttgtggaatattcaaacattcagtcacagctgtcatttttcttttcaaatcttactagctggatagaggcagcttaaacctttttaatcctagcactcaggaggcacaggcagccagatctttgagttcgagaccagcctggtctacagagataattccaggacagccagggatacacagagaaaccttgtcttgaaaaatcaaccagggctggaaagatggctcagtggttaagagcactgactgcttttctagaggtcctgagttcaaatcccagcaaccacatggtggctcacaaccatccgtagtgagatatgacgccctcttctgatgtctaaagacagctgcaatgtacttacatataataaataaaatctttaaaaaaaaaagaaaaatcaaccaaagaaaaattttaaagacttattttattagatacacgagagtgttgcctgcctgtatgtatgtgtagcacattcgtgcctggtgctctcagaggtcactactagatttcctaggataggagttatggatggttgtgagcagtgctcttaactgctgagctaagaaagacttttcccatgtatgactgctttctctcaagaaatgttttcatcaccacgggcacatacatatgtaaaataagcaagcacatcaaacaattaaaggaaagaaatcataaagaaataactttaaaacaagtatttaaagcaagcaagatggctcaagaggtgaaaatatttgctaccaagcctggcaaactgagtttgatccccaaacgtgcagatctggggctggagagttggctcagcggttaagagcactgtctgtgcttccagaggtcctgagttcaattcccagtaaccacatggtggctcacaaccatctgtaatgggatctgatgtcctcttctgaataaataaataaatctttaaaaaaaaaaatatatatatatatatattagccaggcagtggtggtgaacactttaatcccagcacttgagaggcagaggcaggcagatttctgagttcaaggacagcctggtctacagagtgagttccaggacaaccaggtctacacagagaaaccctgtctcaaaacaaacaaacaaaaaagatgtgcaggctgggcgtggtggcacacacctttaatcccagcactcgggaggcagaggcaggcggatttctgagttcgaggccagcctgatctacaaagtgagttccaggacagccagagctatacagagaaaccctgtctcgaaaaaccaaaaaaaaaaaaaaacaaaaaaacaaaaaaacaaaaaaaaaaaccaaaaaaaaaaaccccaaaaaaaacaaacaaaaacaacaacaaaaacaacacacacacaaaaaaaatgaagtgtagatctgaccctctcaagctgtcctgatccccacatatgcactctctcttccacacacaaatgaatataatacaattgtttaaaaattatttggtgtgtgtatgactttaccattattaaacgctaaagcaagctggtgtcatcctggtgtgagggaaacagaaacaagaggaacaactcaagttcaaggccaacttggtctatgtagcaagttccgggctgaccagggatatgtgcccgggtctcagaagggcatgtgggagcctggcctggtggctcttgcctatgaggcagaggcaggcagatctctgagttcgaggccagcctggtctacagagtgagttcccggacagctagggctacacagagaaagcctgtttcaaaacaaaagggtgggggcaggtggggggctgggattatctctcactcaataaaatgtttattgtaaggatcgtggcaaggatcagaggcaaacctgcacacacatgttcactcatgtgcatatgcatctacatacacataaacatctataagtgagcacacttgagaaaagacaaaaacgattttgcatgttaacgagataggggtatttgcttacttttacataaatcttgtctaaatatttgataccatgggacacagaacttcgtcagtgttttcagagtgtcaatgtgctggttctgaagtcagcaatgccaacagtgctccctctcgccagtattgtacacaacaacagacacatgggtggggctgcttcggaagttgttggaaacgctgtcttaaacccaggtcaaaagtcaatcacttttgtaatgaaactcaaacaactcaaacggcaacttttaagctcgggtgttctaatagaaaacaatcaaaaggtgtattaatctgatatgtattaaggagtgacattaaaaaaaagtcttcgttttctgcaattaaacagttgtgtttcataagagcagaaaactttgtgtagggctggagagatggttcagaggttaagagaactgactgcttttccagaggtcctgagttcaattccaggaaccacatggtggctcacaaccatctgtattgggatctggcgccctcttctggtgtgtctgaagacagctacagtattcattcatatacataaaataaatcttaaaaaaaatgttgcctggtagtggtggtgtacacctttaatcccagcacttgggtggcagaggcagtcggatttctgagttcaaggccagcctggtctacaaagtgagttccaggacagccagggatatacagagaaactctgtctcgggaaaaaaacaaaaacaaaaaacaaaaaaaaaaaaacaaaacacacacacacacacacaaaagctctcaagtgctagtctacaggtgttttacggactatgcactaactgctaaatcctccgctgttccaagagtcattccgatctgatttgtttgttctgtttgtttgtcagaccctcaaaagcctacagtttaacaatcttcctaagatcaaaacctgaagtaaaaaaggtggctagttgccttcccgatttcattaaatcgcacatgaattcatttttccttaaaaaattaaaaataaaaacaaaactaatcctgcttctgtcatcttcttgtttgactttagggtattatcgttccctgtgcaaacaagagaaaaaaagagaaaaggtggggaggggatcacaaggagagacggggaggagaggaaaggggaggggatgagaggagaaaaaagaaaaggaaaaagaaaaacaacaacaacaaaaagattggagaaggtggtggtctcctggatccttccggagctcatttttctgtaccgttcgccgccaatggtggtctgggaactacaattcccatgatgctctgacaggtgggtcatgtgagagggaagctttttaccccccacaaccccttgcggcatcccaggatggtggcgcccagcggtgcaatgagcgattcggagaacagcagcagtagcagcagcgatgcggaggaattggcacgctgtcgcgaggcggctacgcccgcctgggggctggagcagcgcccgggggcagcggagagacccgaagccggtagggggctttctggggctcaggctcctccccgggggcctgaaacggatgcgtggtggggtgcgagccatggcgtcctgacgttttagaggagctttcttgggggagcttctgagatcttttggggatcacactgacaccgagggcagagggtgattgctttattcccgtggaggccgcagaggcacctaaatgcctcctgactgctttcctcaatgcgtcctgtgtcctccctctggaaaggtaaccaacccatcacctgtctgagatgaccgtgatgcccctccttcttgtagtctcagaatcccgactttctcggccctcacttgatgtctcattcagactgagctcacccgggagtatacctaaacgagagattgcctagcagacggaatgtatccggcatctgccagtataatgactcttaatcatggttagagaatccaacaggccttataatttagagagtaggcagaaatatatatatatattgcatctgtacttgaactcctcgtgggaatttaataccttctcctctcctgcatgtgagctacaagccacagtcacgtgataatacctgtttgtcccagtagacgtcaccatattgttacatctcgttacagccttttacagatacatccaaacattttcttcacagtacactgttggaaaagaatcatttacactcttacccaccataaagcccctgagatgtctagttccatttccagatcagtgagttgcctcagcaattgctacacaaacctgccaacctcactggattcccagaacccatggtaaaagagaggattaactcccaaaagttgtcatgtgacttagacatacaacagtaaacattttcaagtctcagaaggggaccgatgtaaaaacaaagtatataacttatagttttattttattttattttagacatagagtctcccatgtagctctgactgccctagaactcgctacataaaccagactggtcttaaactcatagagatctgcctgcctttgccttctgagtgctgggattaaaggtgtgtgttgccaagcctggtttaaaaagtggcctttagattattctattacattttatgttgtgtgtctgtagactcacacaggtgtcatgggagcttagaagtcatgtgggtcctggggatcaaactgaagtggttaggcttggtggcaagtatctggagagccatcttgtcttccttggaggagaattgactcactttatagatgtgaaaaacaaaaccttgggggtgggttaaatggctcactctgggtgtggagtttgacaattgtctttattttggggggcggagtttggggggggggtgatcgctattgctctgtagtcataatgggagctactcatgactttcagaagccaggtatccacctcacacacccacagccagagcatggagcacttgagagcacactgacagaacagtgtatcgggcaggtgcactgaatgcgtcacagcctaaacacaatcgtgatcgtggagttgatgcaccaagccctgcagcacactgggtgccatcaacagtcctttccgttcccttgtcacaagccccctttgtcccacgatccacatcagaaccatctctcagcatccctcctagacaacatctagcccgtcacatcctcagaggccttggtgatgcacgcggacctcccgtctacccttggcctcctctgtctcattctgtctagtgtggcaaaactaaaccagtttctgtcactggcggccttgaccccgccattgcccttctttctcccatcctaagtccctctcctggggggcctgggtaatcttcccccaacaaagtctctcctctccgggccacaccggcagctggctggctttcagcaccacaggttcctgtctgcacaggcttgcttccctgtgcttggagaccctcccagatctccacttgactcagctccgtctctctcaggtatctctctgcccagcggtcaccatacaaagccttcccacctttggaggaacagcaaggtcttgaagtgaggaattaagttagcctttttcttcttcgctcccctcttccttgctgataatttcctttgaattttcttttttttttttttaaagaattagaggaattttttttttttagatttatttatttattatatgtaagtacactgtagctgtcttcagacacaccagaagagggagtcagatcttgttacggatggttgtgagccaccatgtggttgctgggatttgaactcaggaccttcggaagagcagtagggtgctcttacctgctgagccatctcaccagccctgttttatgtttttttatacactttctattagccagtttgtgttgaaatgtcatttaacatccgtgttcaccttgaacgtaagtctctgtactggctggttttgtgtgtcaacttgacacaggctggagttctcacagagaaaggagcttcaggtgaggaaacgcctccatgagatccagctgtagggccttttctcaattagtgatcaaggtaggagggcccattgtgggtggactggtagtcttgggttctataagaaagcaggtttctgtttcctgacctgcttgagttcctgtcctgacttcctttggtgatgaacagcagtatggaagtgtaagctgaataaaccctttcctccccaacttgcttcttggtcgtgatgtttgtgcagaaatagaaaccctgactaagacaatctctgaggacagcactatttgtttgagctgttcaggtggggcgcctggttattaacagccacacggcgttttcttcagcggactccaccatcagcatctccagtgttcgcccctcccagagcacactgcacagcactagcagtcaccccataaaccatagtcaaattacacctgggcttgcctggtaaacattaacaggccctctggagccaaatgatgacctgtcagctccttccagctcccattaagacagccattactaatgcacgagctcagggctagcctgggctatgtaacaaaaatctcattaaaaaaaaatttaaaccgggcgtggtggcgcacgcctttaatcccaatacttgggaggcagaggcaggcggatttctgagttctcggccagcttggtctacagagtgagttccaggacagccagagctacacagagaaaccctgtctcgaaaaaccaaaaaaaaaaaattagcttttggactcgagccaaattattttacatatctttgactttacctcttttgcagagtaggaataacagtcacctctcaaatagaaactggggggaggttccttgagttaacgcgcattcaaatcacctagcccacagtcctgtctgtaagccgttcctgtctgtaagccgttctgtaagccccttttttcattattccacaggtgctgcagataaacaagcaccgaccccgcagccaagccgcaggtactgtgtgtgctctgcacggaagcttcattgagtcattcaacaaacactgattccccctgtgcgtgccagatgctaggttagaccacagggtgtcagagggacggagacaggcggtccctccctactgagggcagcttctaagctgtctggaagtgatgtcttgatgtctgtctgtgcgtgttgtaggcatgaggtgaaccagcacgaggaagatggcaacgaccttcggaccactcctgagttccgagcccacgtggccaagaaactgggagccctgctggacaggtgagcggaggctcatgtcatacccccagtcatgtcctcttgcttcaacctcccagattctgggattacaacctcatgtcccaaacccagaaaaaaaaaaacaaggaaaagaaagagttgttcagttgttgttacccgaaccgtcatccttggtctgggcctcctctccctcagctccattgccatcgcagaagtttggaagaagtcgcaaaaggcaaagatgcagcaggtggcaaaggaggaggatggtgagtccttagactgctgaccagtgctgccctgcagagatgcccctgtgtgcctgtggccagcagcccttcttgcatctgctgtccccacactctgaagtgggaaccacagcaccccattcccgggatgagctagctctgagatccccccacttgccctgttacctgcaagcattgtggcttcttacccagtctttccctcctgctctctctggtcctgacccttttgtggacccttttggaagccaacacaggtaagagactcagctacagacttctaaagcccctggaatctgggtaaggtggtgcttttaatccctgcacttgaggcagaggcagggagatctctgtgagttcaaggccaccctggtctgcatagctagtttctggacagccagggatacacagagaaatcctgtcccaaaacagaagcccctgaagctcactgtccagatgtggcagccagtctgtgccacaagcccctgcctctggctccacagcagggcaagcaagccttgcttcagatcagcttcagtttacacacacacacacacacacacacacacacacacacacacacacggcagtgaggtctaagccttgccactagactgggagtacctaaggactggctgcgtccttagcacctgggggaagggccagtgtctgccttactgactgctggctctgccctatggtgtcttagggccagtgtctgccttactgactgctggctctgtcctgtggtgtcttagggccagtgtctgccttactgacttctgactctgtcctgtggtgtcttaggcttccgccttttcttcacatccatccccggaggccataagaaggaagcctctccaagaccctgccggaagcgccagccccccagctccaggtaagtgctcacagcctctcctggccgagcctgaggaatagctaagcaaccccagtcaggctcagacggagcaagagatcatgagataataaggcaaagtattcccccagcaggaaggcacagggtcttctggggggggggagggggaaatcccatggttttcaagagcagccatcttgggccagagtcccgcctttatcatccttgtctcctgagaagaagctctatgaggtttggacactgtcagggccctcattgtagatgagactactaagggtcagaggcttcgggtacttaatgcagccatgtgactgacgagcagagaagctgactcgagcctgagctacttggctgcctccatctggtccggaggcaaccaggcagctcggagacccgtccagctaacctgactactcgccatggtgacagtgaggacagcgatgaggaactgcagcggtgccgggaggcagctgtgtcggcttcagacattctccaggagtcagccatacactgccctgccaaggcagaggagaagaagaagttgaaaaagaaagccaagaagaaggtggacaatgctgacctggctgcagccccaggtctggaacaggtaaaggaggcaggcgttgtcaatggggacccggtgtcgcttgggatcca

SEQ ID NO: 58 - DNA, 3769 bp, Mus musculus
tcactcactgaagataactagacagaaaacttcgtgagactacctcacgctgtccattgaccaggagcaatcctttgtgcctcacatctttgggactgcggtaggcatcagagaaatgtcacctcgatgggccctgcagctggagagtctgaccctggatatggccttcagctaagacacctgcacagatgatgagcagcctcggggagactagctgaggtcggtagttaggaatgtggagtgtggatgttgtgaccctcagcataagcaggaataacctagcctaaccctatcgctcgagacgccactagtaacggagacactatgcgtgattaagaatgaaataaatgcatttgccactgccagatcaccaggcagatgagattatgtggccaaattgctgaatcttactctgttgtggtaaacaacatcctgtgctcacaacagagccggtggggagactgcatccttaactcctgttcccttctgccttgaagaaggtaaactggatctccctgcagtttcactttcaattcttgtcaaagcttggtttctgtttccagtttctccaaggagggaggggcagagcgcttttcttctttccatgcaactctccatcccattgtctcctccagagaacgctgcaggaagcttctcccatcagagctgagcagaagctcagaggatttatctagaggacaggctggcccagctgaaatggacccgttccccgacctgtatgcgacccctggggacagtctagaccacttcctggaacacagccttcagccccagagggactggaaagaggaagggcaggatgcctgggagagaatcgagaggttctttcgggaacagtgcttccgtgatgagctgctcctggaccaagaagtcagggtgattaaggtggtgaagggaggctcctcgggaaaggggacaacgctgaaccacagatctgaccaagacatgattctgttcttaagctgcttttccagtttcgaagagcaggcgagaaaccgggaggtcgtcatcagcttcattaagaagaggctgattcattgtagcagaagcctggcctacaacatcattgtccttacccacagagagggcaaaagggcccctcgctccctcaccctaaagtgcctgagacgtaaatatggaagaggtgcagtgttgccctcaaaatatgctctggagctgctgaccatctacgcctgggagatgggtacagagagcagtgatagcttcaatctggatgaagggttcgtagccgtgatggagctcctcgtaaactaccgcgacatctgcatctactggaccaagtactacaatttccaaaacgaggtcgtcaggaactttctgaagaaacagctgaagggagaccggcccatcatcctagacccagctgaccccaccaacaacctgggaagaagaaagggatgggaacaggtggctgcagaagctgctttctgcctgctgcaggtctgttgcacgactgtaggccccagcgagcgctggaatgtacagcgagcgagggatgttcaggtgagagtgaaacaaacgggaacagtggattggacactctggacaaacccctacagccccatcagaaagatgaaggcagagatcaggagggaaaagaactttggaggggaactgcgcatctccttccaggagcccggaggggagagacagctgctcagcagcaggaagaccctagcagattatgggatattctctaaggtgaacattcaagtgctggagacctttcctcctgagatcctggtctttgtgaagtatcctggtggccagagcaagcctttcaccatcgaccctgatgataccatcttagatctgaaagagaagatagaagatgctggaggcccttgtgcggaggatcaggtactactgttggatgatgaggagttggaagatgatgagagccttaaagagcttgagatcaaagactgcgacaccatcatactcattaggtggctgcagccaaccagagagtggaaagaagaggtcctggagaccgtgcagacagtggagcagttcctgaggcaggagaatttccgtgaagatcgtggcccggctcgggatgtgcgcgtgctcaaggtactcaaggtaggctgctttgggaatggcaccgtgctcaggagcactacagacgtggagctggtcgtgttcctgagctgtttccacagcttccaggaagaagccaagcaccatcaggctgtcctgagactgatacagaaaaggatgtactactgccaggagctgatggaccttgggctcagtaacctgagtgtgactaacagagtacccagtagtctcatcttcacgatccagaccagggagacctgggagaccatcactgtcaccgttgtgcccgcctacagagccctgggcccttcctgtcccagctccgaggtctacgcaaatctgatcaaggctaatgggtacccaggaaatttctctccatccttcagcgagctgcagcgaaacttcgtgaagcatcggccgacgaagctgaagagcctccttcggttggtcaaacactggtaccagcagtatgtgagagacaagtgcccccgggccaacctgccccctctctatgccctggagctgctcactgtctatgcctgggaagcgggcacccgggaggatgccaacttcaggctggatgaaggcctcgccacggtgatggagctgctccaggatcatgagctcctctgtatctactggaccaagcactacacgctgcagcacccggtcatcgaggcctgtgtcaggagacagctcaggggacaaaggcctatcatcctggacccagcagaccccaccaacaatgtggcagaaggctacagatgggacatagtggctcagcgggccaaccagtgtctgaaacaggactgttgctatgacaacagggacagccccgtccccagctggagggtgaagagagcacccgatatccaggtgaccgtgcaggagtgggggcactcggatttaaccttctgggtgaacccttatgaacccataaagaaactgaaagagaaaatccaactgagccagggctacttgggcctgcagcgtctgtcctttcaggagcccggcggagaacgtcagctcatcagaagccattgcacgctcgcctactacggaatcttctgcgacacccacatctgcctgctggacaccatctcccctgagatccaggtctttgtgaaaaacccggatggcaggagccacgcctatgcgatccacccgcttgattacgtcctgaacctgttttattgtctcatcctagactcagcctagttgcctctccttcccgtcctctgcccggatggtccacgtcttcagtaccttgccagcagggagtcagagggggtgtgagaagtcgtgtacagccagacactcttgtgtgacaatggaattctgcagtcccctgggaagtcatgccaggacctctgccttcctcgtggcctcactgtcaagactgtgtcagtgaatagctggcctcacagactattctcacatgttcagagaaagccaaaccatcttcctaaccaatcacagggaccctgcttgaggttgtcccacctccaaattcttcccagtgacctccatcagggcggctctgaagccttcccctgtgcccccaaccacttctgcctgccttcgactatccaaggcaaggtaggaggggatcaagttcctttcaaatggagaataaaaaagccattgtttcttcccagatgag

SEQ ID NO: 59 - protein, 935 aa, Mus musculus
TGSPCSFTFNSCQSLVSVSSFSKEGGAERFSSFHATLHPIVSSRERCRKLLPSELSRSSEDLSRGQAGPAEMDPFPDLYATPGDSLDHFLEHSLQPQRDWKEEGQDAWERIERFFREQCFRDELLLDQEVRVIKVVKGGSSGKGTTLNHRSDQDMILFLSCFSSFEEQARNREVVISFIKKRLIHCSRSLAYNIIVLTEGKRAPRSLTLKCLRRKYGRGAVLPSKYALELLTIYAWEMGTESSDSFNLDEGFVAVMELLVNYRDICIYWTKYYNFQNEVVRNFLKKQLKGDRPIILDPADPTNNLGRRKGWEQVAAEAAFCLLQVCCTTVGPSWNVQRARDVQVRVKQTGTVDWTLWTNPYSPIRKMKAEIRREKNFGGELRISFQEPGGERQLLSSRKTLADYGIFSKVNIQVLETFPPEILVFVKYPGGQSKPFTIDPDDTILDLKEKIEDAGGPCAEDQVLLLDDEELEDDESLKELEIKDCDTIILIRWLQPTREWKEEVLETVQTVEQFLRQENFREDRGPARDVRVLKVLKVGCFGNGTVLRSTTDVELVVFLSCFHSFQEEAKHHQAVLRLIQKRMYYCQELMDLGLSNLSVTNRVPSSLIFTIQTRETWETITVTVVPAYRALGPSCPSSEVYANLIKANGYPGNFSPSFSELQRNFVKHRPTKLKSLLRLVKHWYQQYVRDKCPRANLPPLYALELLTVYAWEAGTREDANFRLDEGLATVMELLQDHELLCIYWTKHYTLQHPVIEACVRRQLRGQRPIILDPADPTNNVAEGYRWDIVAQRANQCLKQDCCYDNRDSPVPSWRVKRAPDIQVTVQEWGHSDLTFWVNPYEPIKKLKEKIQLSQGYLGLQRLSFQEPGGERQLIRSHCTLAYYGIFCDTHICLLDTISPEIQVFVKNPDGRSHAYAIHPLDYVLNLFYCLILDSA

SEQ ID NO: 60 - DNA, 38690 bp, Homo sapiens
tctgatgtctgatggcaggagaagatgaatgtcccagctcccaaggaggatggcaaattcatcacccttccttcacattttgttctgtccaggctctcagtggattggacggtgcccacctacattagtgagggcagatcttcatccctcagtgtactcattcaaatgctaatctcctctggaaatagccttacaggcacacccagcgataatgttttactctctgggcatcctgatacctaaaattaactgtcatgtggatccaggagtccagatgatgccagagggggtgccagctggtttatgtgccaggccaactctccctgacaatcacacacacagacctgcatagcacttccgttacaccgacccatttccgcagagcagcacaaagactacagggaagctagaagcagacgtggcggggatgcctgcagctgcaagaagatgcctgggaacagacacagaaactctcgctcccagataagcaaaacacagcagcacaaaggcagctgtttgaataaattcattggagagtctaaggcagcaatccggaccaagctgtaaaggagataagacagaaataatcacacaacagacaggccttaaaggtactggggttctccgccgggcccggtggctcacacctgtaatcccagcactttgggagcctgaggtgggtggatcacctgaggtcaggagttcaagaccagcctgaccaatatggtgagaccctatctctactaaaaatacaaaaattagccaggcatggtggtgtgcacctgtggtcccggcaactcaagaggctgagacaagagaatttcttgaacctgggaggcagaggttgcagtgaagtgaaatcatgccactgtactccagcctgggcaagagagcaagactccatctcaaaaaacaaaaggtaccggggttctcacagcttaatggaacttagcaagtctttttttttttttttttggcctctgaccttctagttgaaacaaaattagttaccaatagacttaggcgaatgccatacggcacataggcacataacctcaacctatataagcactaagaaaatggtaacactttgagttggtctggtggaattatctccctgtatcttgttacagcaataaattcccttcttttctagtttctctgcttctcgttattgggcctcgagaaaatgcagccggacccggcttggttctgggcatagtgaatcactccacaacatccatttttctgttcaatgattctgtgacttggctgagcagttttcctggtctgatctggctcacctgccacaggagatctacaccagctccacccacgtgtctggcagttggttcaatatcagctgggaaggctgggcgtggtggctcatgcttgtaatctcagcactttgggaggccgaggtgggtggatcacctgaggtcaggagtttgagaccagcctggccaacatggtggaaccccgtctctactaaaaacacaaaaaattagccggatgtggtggcgggcgcctgtactcccagctactcgggaggctgaggcaggagaatcacttgaaccaaggagctggaggttgctatgagctgagatcatgccactacactccagcctgggcaataagagtgaaactccgtctaaagaaaaaacaaacaaactatatatgtattttatatatatatatattatatatatagtgatatatatattatatatagtgatatatatattatatatagtgatatatatattatatatagtgatatatataatatatagtgatatatataatatatagtgatatatataaatatatagtgatatatatataatatatagtgatatatattatatatagtgatatatataatatatataatatatagtgatatatatagtgtgtgtgtatatgtatatatatgtatatgtgtatatgtatatatatgtgtatgtgtatatatatatatatatatatgtgtgtgtgtgtgtgtgtgtatatatatcagctgagaaaatagggctgccttcaccgtaggtttctccttacccaataggccaacctgagcttgtgcatgtggtcactgggctctgacaggagcaagagaaagagcaagtccccctaggccggcactttttaagcatctgcttgcatcgcgtttgctaatgtctcactggccaaaacaagtcacatggccaagccttgatttgaaggaaatagagaaataaactccacctcttgctgggaggagctgcaaagccagccttgtagaggagtgtgtatacagggaggagaggaaattggcagcattattctatgcattgttagcctttttttttttttttttttttctttgagacggagtctcgctctgttgcccatgctggagtgcagtggtgcgatctcggttcactgcaaactccgcctcccggttcaagcaattctcccatctcagcctccctagttgctgggattacaggcacccgccactgcgctctgttaattttttgtatttttagtagagacagggtttcaccatttggccaggctgaactcgaactcctgacctctcaggtgatctgcccatctcagcctcccaaagtgctgggattacaggcatgagccaccacacccagcctgtgagccattttcttctataatctctctccatgaataggaaacttggccctgctttctatcaaggcattctccgccacctcataagacacatctgtgggtgcctactcacccattaggatgcatgagcaaacctgcaagttcaagggagttaacaccccatggagcaacccataaccaaggggaaggccagaaccagtggcccctcttctacctctcagatggacaattttttctttttttaaacagggtctcactcccttgcccaggctggagtacagtggagtgatcagggctcactgcagccttgacttcccacattcaggagatcctcctatctcagccctgtctgaggtagcaagaccccatctctacaaacaattttctgaaaattaaccaggcatggtgcctgtagctctacctactcaggaggctgaggtgggaggatcacttgagtctaggagttcgacaccagcttgggcaacatagtgagaccctgtctcaacaacaacaacaaaaaacaatttaaaattagccaggtgtggtggcttgtgcctgtagtcccagctactcaggaggctgaggtgggaggatcacttaagcccaagaggtcgaggttacagtgagttgtgatcatgccactgcactccagcctgggcgaatgagcaagacaacatcaaaaaaaaaggaagagaaaagagagagagagagatgacagaaagaaagagaaagaaaggaaggaaggaaggaaggaagaagaaagaaagaaagaaagaaagaaagaaagaaagaaagaaagaaagaaagaaagaaagaaagaaagaaagaaagaaagaaagaaagaaagaaaaagagaaagagttcctcagattggctttctctgcttcctaatcccccacacttaccccttgagatcatttcccagaacaaaccaccttcatgcaaccccttgtctcatgctctgcattgaggggaatccaagctaagacaacactcatctttgtgtctctttctcctgctcaaaacctagctcagccccttcctatccactggctcttctccctccctgcagatgcctgctcaactgggtggtattttaacaaaccataaaaccaacacattactgatttcatgttcccttttgaaatcctcaaatgtcatccaacatattaatgatcaaataattgaaagctatgtaaccctcagagatttcacgaagtcgaataaaaaaccaataggttaaggtctgaatgtttattgtttgaataacttctatattgccttgaagttcattgtcagtcatcgtaaccatatggcaaatgtttggagtcttaaccggttgttgacttagctttgtgaaattgtcactgctctttaaatcctcataatatggtattgctgaaggatcaggtactaccaaacactggaaatataagaacttttataatttatgtaattaaaatatgtgatgctttccacttggggttagccagtttgaaaagttaaattggaatgtgtcatgatggacaaactccttgaaagaatcatctgcacttctggtctccatgcccccgaccccacccagcctaatctggcttcagctccctcctctcgcctaaaactgtgcccaccttgatcaccagtcgttttcttgagtacttttcaggtctgtatttcttaacttttcagaagcattcagcaatgtgggtgacttttttttaactctggttatgcccacctctttggccaccccagcaggtaccgcctaaatttctcttcctctgctcatcacttaaatttggggcttggccaggcatagcagttcatgcctgcaatctcagcactttgggatgctgaggtgggaggattgcttgagccggggttcgaggctgcagtgagctatgattgcaccactgctctccagcctgggagatggaacgagactctgtctctacattagttcattttggtgtgattcattcttccccaaggtaccagtgaccacgtgtatactgagggaaatcaaatatgtctttacatggagcaggtcactcgcttctcatccttgggtactaccaaatcattatccaaaatgcacccctcgaactccccacagccatacccactcctccttctctccttgggaatggtggctccaacagttactcaaggacacaagccagagagctgggagtcatccctgtcttctccttgcccctcacctatagtcaacaagaagccctgcccacccttcttccaaaatagacctagaatccaacccctcttctccacctgcactgcttccagccttgtcttgggcctcactgcttatcacctgcacccctgcgaagtgtcctaatgcatttccctgcatctgcccttgccctctgcggttcgtcctcaccatggaagcagccagaccaatcttaactccactacatgccactcccctaaatttgccactgccctcaggacaaaaagcagattcacctggcactcatttaacccagtggatcatttccatttcttcttcttcttcttctcctttttttttttttttttttttgagacagggtctcactctgtcacccaggctggagtgcagtagcatgatcatggctcactgcagccgcgacctccctggactgaggtgatcctcctacctcagcctcctgagtagctgggactatgggcactcaccatcatacctggctaatttttgtatttttttgtagagatggggttttgccatgttgcccaggctgatcttgaattcctgggctcaagcgatcctcccatcttgactttcaaagtgctgggatttcaggtgtgagccaccatgcccatcccatttcctctttcttaaaacaatatcttcacttggccttcaaaccatcactcctgatttctcttccacctcactagctacttcttttccttcttctttgctggactcgtgcaactccctaaactccgaataatattaagtgctctggggctcagtcctgggtctttttctcttcctgctgtgtcatcactcccttggtgatctcattcagtgtcatggctttaaacatccctatgccggtgacccccacattttatctcaagtccagacctcctccctgtaatacagactcgcatatccaactccccaccacatatctccacctgggtctctgacagacaccccaaacttcagttccaaaactgagttccttcctcatctccatgcccagcctatcccacctcagttaagggcagttcaacctttctgttgctaaggccaaaagccccggacttagaccttgactctgatctttctctctcatcatactctacccattagcaagacctgtcagccttggagtcaaaatatatccagcggaatgacatgatgtccagattcacttccaaataacacagtagggaatctagggatgggggtagaattgaaaccagactgtctataagttgatcattgttgaaactggtgatggtacatggaggttcattgtattattccactttgtttgaaatgttccaaaatcagaaaaattaaaacatactatttcactgctaccactctgatccaagtcaactgacctcttgcctggactgttgcagtagcctcctaaccatacttctgcctccactttcacctccactccaccctctgcttctaatttaatttcctcccagcagccaatgtgattaattccattaaaatgaaagaccgtgtcactcctccactcaaaactctccaatgtatggtgtcagactcctacagaacaacaaaaaatgctccccagtggttccccatttcattcagagtaaagccaactcctaacagtcgtcttcaagatcctatccactcctgctccttgtttatggaataaatctttttaaaaagatcttatatcctggctgggtgcggtggctcacgcctgtaatcccagcactttgggaggccgaggcgggtggatcgcctgaggtcaggagttagagaccagcctggccaacatggtgaaacaccgtctctactaaaagtacaaaaatcagctaggtgtggcggtgggcaccttgaatcccagctgctcaggaggctgaggcaggagaatcgcttgaacctgggaggtggaggttgcagtgagccgagattgtgccattgcactctagcctgggcaacaattgtgaaactccatctcaaaaaaaaaaaaaaaaaggatcctgtatctatttgccttgccaccctttactacttaaaccgcattcccttccactctctgctcttgatcactccgttccaggcacactgatgttccttatacttgccaccgggcagtaccaccacagggtcctcgtactttccactccttctgccatgaagaatcttcttccttctgttacacacgtggctcactctaccttcttttttttttttttttttgagacggagtctcgctggagttcagtggtgcaatcttggctcactgcaagctttgcctcctgggttcacgccattctcctgcctcagcgtcccgaatagctgggactacaggtgcctgccaccacgcccggctaattttttgtacttttagtagagatggggtttcaccgtattaaccaggatggtctcgatctcctgaccttgtgatccacccgtcttggcctcccaaactcttcaccttcttatgtctttgctcagatgtctccttttcagggaggccttccctaatcaccttatgtaagactgaaacctaaatacatgcccccaacacacacacacacacacacacacacacacacacacacaacctcttaatcccttctcttgctttgtttttctgcttagcacttatcaccatcttctttactataattttacctatttatcctatttgttgtttgtctccactaccagaaagaaaactatctgcaggtagggatttttcactactgtttgttcactgttgtatccacagcacctgcctggcacagagtaggtgcccagtaagtatctgttgaatgagtgaacgaatgagtgaatagcactccaagattcaatcctgcccacctgtccaggtacatttctaacctctcccctgctcaccctttcatcccaaggcacacagcacacttgagtccctggcatatcctagcattatttatacttctcagcctctatgctgtaccctcatcctcctggctggagtgccagtcttttttattttttatttggagacagagtctcatgctgtcacccaggctggagtgcagtggcaccatgatagttcactgcagcctgaaactcctagactcaagtggtcctcccacctcagcctcccaagtagctggggctacaggtggacaccaccacacctagctattttttaaaaaactttttgtttttaaaacaaaaactggagttttaaactccaggccaccactgcctctcacctgcaccactgtgcagtgtcctgaccatctccctacatctgttcttgcccttgcaatcatcctcaccacagaagcagagaagttacaagtgtggcaaagggcagaccggaattcaaagccaatgtggagtggggagttggatacatgagtctggatttcagggaagaggtatggatttaagatacaaatgtgggagtcactgggtatggtggctcacgcctgtaatcccagcactttgggaggccgaggagggcagatcaggagttcaagaccagcctgggcaacatggtgaaacactgtctctactaaaaatacaaaaagttagccaggcgcggtggcgggctcctgtaatcccagctccttgggaggctgaggcacaagaatcgcctgaacccgggaggcagaggttgcagtgagccgagattgtgtcactgaactccagcctgggcgagacagtgagactccatctcaaaaataaacaaataaataaaaataaaattaaaatgtggaagttgccagagtaaaaacatttaaacgctggctgaaatcaccaagggagtaagtctagaacaagaagagaaaaggacccaggactaagccctggagcacttaatattattcagagtttgggaagttgcaggcgtccagctatgttgcccaggctggtcttgaactcctggcctcaagtgatcctctcaccttggcctcccaaagtgctgggactacaagcatgagccaccatgcccagcccggatccccggtctttaagattcctctcaagcaggtgtctgctaacaccaaatgaaactcatctgccggcttcatgttttcatgcttttttcctacttaactcatcgcactggacttttgcagtctcttttttctgtgtctcctccaccgttctgggagtccccttggaacaggaacctcatcttattttgtcttcttggctcaatgcatgaacttcttggttcagtgcgtgaatcataatacctgttaaacccactctatgggccgggcgcggtggctcacgctgtaatcctagcactgtgggaggccaaggtgggcggatcatttgaggtcaggagtttgagaccagcctgaccaaaatggtgagacccccgtctctactaaaaatacaaaaaaaaaattagccgggcgtggtggcacatgtctgtagtcccagctactagggaggctgaggcaggagaatcgcttgaacccgtgaggcagaggttgtagtgagctgagattgcaccactgcactccagcctgggcaacagagcaagacccggccaaaaaaaaaaaaaaaaaaacaaaaaaacaaaaaaacccactctatgaatagtgagggtcaaagaggttagagtctggcacaggtagactagaattcccagtctgttctcttgggctccagattctcactccaccacctgaacactagtgagtcccttccgttcccaagcctcaatttccttagacagatgtaagcagttgaattgactaacaactatccaaccccaacctactgggcaagttgcctcctttggggtcaaacactatccaacttcagtttcccaacgtcataaaggagaactctaaaagttgagaatcgaaactgatgacagattgactagacggccagcctgttaaggtggccccagatattccagcctcagcccagagtcctcctgtgcccctactgcagcaagggtgtctccaagaagggggacctggagtcagcccgtcacacctggtttcctctctgctagggtccctcctcccacagagcactggagggcagctgaggaggagctaccttaaaaaaggaggtgtgtgccagggagctgggtaggagcctggctatatatctgcccagcagcggtactctcgggacagagatggcactgatgcaggaactgtatagcacaccagcctccaggctggactccttcgtggctcagtggctgcagccccaccgggagtggaaggaagaggtgctagacgctgtgcggaccgtggaggagtttctgaggcaggagcatttccaggggaagcgtgggctggaccaggatgtgcgggtgctgaaggtagtcaaggtaagactgggctcctccagcccccacgcaagacaaaacccagtatcagagtccacgtccctggggatgctggggacccctgtcctccttatccctagcccatgctgatgacatctcagaataccccatcccacctagctgtctacaccccaccgcaccactgccttgagtagaatgagtctagtaataatagctcacatttgggggctcactggactaacctcttaacatacactatctctaattcttgcactctgtgagataggtactattctttgcccagtttacagattagcaaatggaggctcagaaccaatacaatgcgaggtccttggttggatcctagtgtgaatgaaccatctgtaaaatacagtttggggacaactggcctagatatcagatagtacatatatctgatataggaaatcattgttgattttgttaggtgtaacagtagttttgtggttatcagaaggttgtcttttgtttggacacgaacactgaagtattttagggacaaagttccttggtgcctataatttactttaacgtggcttagattaagcacatgtagccaggaatttagacttgttgaatcaactagttgggtatatgagtgttagttgtatcatctatttttctatgtgttttaactttttgataataaaatgactttttttttttttagagacagggtctcgctctgtcacccaggctggagtgcagtggcacaatcaccactcactgtagcctcaatctccctgagctcaggtgatcctcagcctcctaaatagcttgggattacaggcatgcaccaccatgctcagctaatttttgtattttttgtagagatagggtttcaccaatgttgcccatgctggtctcgaactcctgggatcaagaatatgcccaccttggcctcccaaagtgctgggattacaggtgtgagccaccatgtctggccggccaataaaatgatttttgtttttgttttttttttttgagacagagtcttgctctgtcaccaggctggagtgcagtggcacgatctcagctcactgcaacctctgcctcccaggttcaagcaattcccctgcctcagcctcccaagtagctgggacgacagcgcccaccaccacgcccggctaattttttgtattttagtagagacagggtttcaccgtgttggctaggatggtctcgatctcctgacctcatgatctgccctcctcggcctcccaaagtgctgggattacagtgagccactgcactcggcctaaaatgattttttaatggaggctcagagaggtgaggtgacttgcccaaggtcacacagtgttgaagctgggatttgaacttgactcaagggacccaagcccccctcactgagattttcccccaagcccttcctccagctgtttcatgccaccgcctgtgctagctaagatcaaaattcaagagggtcggagctagaaagactttggagaatcagacagtctcaccaatgactcacttaaaaaattaagtaaaccgaggcacagagagggtgagagataccccaaggtcacacagcgagttggtggcaaaggcaagactagaattaggacccctgactcccagcccagtgctcaagttctctctctaggggcaaccaactcacagagggatctagaagccctgggcccctatccgttctttgcacctatccccagcatatgaagcctgaggccatacaatttataagtgagaaaccacaaattttgatattagacagactcttcgcttcttcctttaccagctgtgtggttttgaccttcccactcttctttctcaaacccacattcttttcatctgtgattggggcatcatcatcatctctccctcaccaagccagtggtgcaatgcaggctgaatgattcatgcacgataaatgctcagaaacagaagcatcattataattcttgccaagctttcttctgggcctgggactcaagtctgactctggcagaccctcctagaccaccccctccccaacaaacttgagaataaagtggagggaataaggaatgtctggtaagaggaggatgctacaagaataagtttattgtgtgtgtgtgtgttccaccacgcctggctaatctttgcatttttagtagagacggggttccatcatgttggccaggctggtctcgaactcctgacctcaagtgatccacccacctcggcctccccaaatgctgggattacaggtgtgaaccaccacgcccggccaagaatgagtttttacggcaggaaatgctatttacctaagcctcaaatacttcctgcacatcatagccacttttcctcttgaaaccactaaatggtagcaatccccagtgagccatgactaatgaggaataatatatcttatttagagtctaaaccctcccgttccccaccctctgaaaatctagtgagcggagctggtccacataagggaatgctcgtcttcaaatgaattgtgcttaaataggtttaaaactgaagcaaatcaggaagcctgttctggatgtgttcttttctctctgcctggatcttaccagtgggaaaggcagaaagggaagtctacgccaggcacagtggctcacgcctgtaatcccagcactttgggaggccaaggtgggaggattgcttgagcccaggaattcgagaccagcctgggcaaaatggtgagacccccgactctacaaaaatatatataaaaaattagctgggcatggcggtgcatgcctgtagttccagctactccggaggctgaggtgggaggattgcttaagcccaggaggtcgaggcttcagtgagtgaagatcgtgccattgcactccagcctgggcaacagagcaagaccctgtctcaaaaagaaagggaagtctagactggccttcggggggaatgtgtccttcattcacacacagggtgccatctccaaccctctcccagggggtggaggtgctgggtctgaatgcccatggtcccttggaagcagggcctggctcacagccttgggtcacgaggaagaaagaggcggaagaaccatcccctacttgagttctggctctttctctgactctgctgccttctggctgggagaccatggcaagctcctcactgcctcagtcttctcatctgtacattggagataattctcctagtacccacctcaatacaggaagtgaaggcgtttttttttgttttgttttgttttgtttagatggagtctcgctgtgtcgcccaggctggagtgtagtggcgagatctcagctcaccacaacctctgcctcctgggttcaagcgattctcctgccttagcttccccagtagctcggattacaggtgcacacaaccacacctggctaatttttgtatttttagtagagatgtgctttcaccatgttggccaggctgatctcgaactcctgacctcatgatccgcccaccttggcctcccaaagtgctgagattacaggcatgagccatcatgcctggctgggaagtaaagattaaaaggaataatatgtatacagggctctcatgggtgccagacacagggcgtgctcatgtcatccagcatccgtgctcatgtcacacagggcatgttatatcatccggcaacagctggaatctgattcttgtgcagtgactccaaccaccaagaaaagtagccctctgggggtctgatgcctccctagcaattccacctcccaacacagaatgagaaggagaggaggccagagagttgtggcgctttgcataccagaggcaccagggcctggagagctcatctagaatctcaaaacatcgaaaaatcccttctcgacctccttccattactaacaggaaaactgaccccccggcagcagaagagattgtctaagtcagctggataatgagaagaaagagaaatgtattgctgacttcctgtgtgccaggcaccccaccaaacgcttggcatacattatttcatctgatcctcccagtagcccagtgactcttgttccaacattactttcattttacagatgagggtctcaggagtcagaatgtttacccagctaagaaacagggaagagtcaagatctttttcaggctgctccatttcacagcctatggctcttaaatccaccaggcaaacttgctccttgctttataatgtcatgaaattattcagccccaccaccacccccagaatcctcaaacaaccctatggagtagatgctaccattcctctggagtaggccttactctgtgggtaagaagactgggtctcagaagcaatgcagtgtagtagataagaagctgggcatttggggaggccaagggggcaaatcgcttgagtccaggagttcgagaccagcctgggcgacatgccaaaacccagtcactacaaaaaatacaaaaattagccaggcatggtggcgcaggcctgtagtcctagctacttgggagactgaggtgggaggattgcttgagccaagatcatgccactgcagcccagcctgggcaacgggagtgaaaccctgtgtaaaaaaaaaaaaaagagtctgggctctgagggctgcaaactgcgagacctgagacaaatgactaatgaggagaaagacaaatgtgttgctgacttcctgtgtgccaggcaccccaccaaacccttggcatacattatttcatctgatcctcccagtagcccagtgactcatattctgccattgctttcattttagagatgaaggtcttaggagtcagaacatttacctagctaagaaacagggaagtgtcaagatctttttcaggctgccccatttctccatcccatgtctcgagatcctccagacatctcagttttctcacctgtaaagtgtgggtattagtactacccacaacccatccctcagcgggtggtgagcattcagtgagacagtgcatgtgaagtgccgcaggggttgcctggctcatggcagtgggcctcagggtgacggggctctgtgttctgcaggtgggctccttcgggaatggcacggttctcaggagcaccagagaggtggagctggtggcgtttctgagctgtttccacagcttccaggaggcagccaagcatcacaaagatgttctgaggctgatatggaaaaccatgtggcaaagccaggacctgctggacctcgggctcgaggacctgaggatggagcagagagtccccgatgctctcgtcttcaccatccagaccagggggactgcggagcccatcacggtcaccattgtgcctgcctacagagccctgggtaaggggaggggaagctcacccgactcacacacttgcccaccccaggagacttcccagtgtctcacctttactcatggccacgtgcacacacccacatttattcatttcatctgtgtcctatgcttggggctgggttattgcagtgcacaggattaactcaactctggctatcatattgctcaacttggaatacagaaattgaccaaagaattgcagagataaatacatgattgcagcctgggcgcggtggctcacgcctgtaatcccagcactttgggaggccaaggcaggtggatcatgaggtcaggagttgaagaccagcctggccaagatggtgaaataccatctctactaaaaatacaaaaaattagctgggtgtggtggtgggcgcctgtaatcccagctactcaggagggtgaggcagagaatcacttgaacccaggaggcggaggttgcagtgagtcaagatcgcgccattgcactccagcctgggcaacagagcaagactccgtctcaaaaaaacaaaaaacaaaaaaacaaacaaaaaaacatgattgcaaatggtgtaaatgctcagagaaaaagaatggggtggcctgggtaaccacagaaagggtgctcaggaagtgactttctggggaaacaacattcaggaggctctgacacccagtgaggggaaggagctaaaagtgggagtgggggtctgtcactgcattttatagaagcagatcctaagacatggatgtgaggatacgcagtttatttgggtattcctcccaggaaacaccggtagggaagtatggaactgagatgggaaaggcaagaattcaatacaacgtgcgtccatgggcaagtcaccaccctgagcttcatgtcctgggagaactcacagtcccattatggagcgaacctcttcgggatcccaagtgggacgctggcgtgcttactcaccagcttcccagccgtcactggttgggggctgctttgggagcactaactcactggcccctgttgtttgtcctcgggcagagtcctaggtgtttgaagtaaaacctacatgctgcaagcccagatcctagaggtttcatctcatgtgctaactcctatcagctgtagtggctggctgcgtggagttgctctttggagaaggtataagagacaggatctgattttagcaaggaagagagtgctgggatgtctcagtgatgtgtaccatggaactggttcctggttctccctatgagtttatatatatatatattttttgagacggagtctcgctctgtcgcccaggctggagtgcagtgccgtgatctcggctcactgcaacctccacctccagggttcaagtgattctccagcctcagcctcccgagtagctgggattacagcccgccaccatgccatgcctggctaatttttctatttttagtagagataggatttcaccatgttggccaggctgatttcaaactcctaacctcaggtgatccgcccacctcggcctcccaaagtgctgggattacaggcttaagccaccacacccggcctccctatgagtattgaaagagatacaaaacagatattaaagaaaatgagggacattgaggacatccagggaggggtctgatgcatggaaagcccaatgttggttctccagagtaagaatttcacaaaaaggacaattagacaaggcaaacctttggtttctgaagatatgaggtctcaagtgtccctggagggatacttccaatgtaaaggcaggctctccccaaaatactacttaccaccctctggcttcctcaatccccaatctcttcctttgctccttcactcctcagggccttctcttcccaactcccagccaccccctgaggtctatgtgagcctgatcaaggcctgcggtggtcctggaaatttctgcccatccttcagcgagctgcagagaaatttcgtgaaacatcggccaactaagctgaagagcctcctgcgcctggtgaaacactggtaccagcaggtgagggggctgccaggatggcaggggcaaggagagggaagagggtgaggaggaaaggcagggcctgattttcatctcaggaagctgcagccaggggaaatggaagcaggtagagagggagagaatgctagtcttttgaaatgtaaagtgaaaccgtcagtgaagaaggtggaaaaggaggagaggaggaggaagaggagaaagaaacagagaaggaaggagaaaaataggtgctctacagtatttcagtaaactagttatttttattttattttattatttttttttgagacaggatcttgctttgttgcccaggctgtagtgcggtggtgcaatcaccactcactgtagcctccacctccctggatcaagacctccctggctcaagtgatcctcccaccttagcctcctaagtaactgggactacaggcatgcacaaccatgcccagctaattttttttatttttcttttgtagagacagggtctcactatgttgaccagcctggtttcgaagtggtctcaagcgatcctcccaccttggcctcccaaagtgctgggattacaggcacgagccaccacacccaccccacatgttcttgttacccttcaattacagtctaggcctggcagatgtcagcttcgccgggtactgtggccattcgtcacagcaggttaaggactaacaaggggaaggatttctttaattccaccccaggagtcgaaaagagggcatgtgtgagtgtaaacagccctcagggacatttctcaggcagcagctcagtcagttttggaaacaaaatcttcctccgagataacggaaactccaactgcaaaacagaactcagagacaaaaatcatttattatatagaacttgcagagaagttacaagggaatcagacagcagaaggaaagatttgatccaataaaaataaaataggctgggcatgatggctcacgcctgtaatcccagcattttgggaggccgaggtgggcagatcatgagatcaggagatcgagaccatcctggctaacacagtgaaaccccatctctactaaaaatacaaaaaaatagccaggcgtggtggcgggtgcctgtagtcccagctactcgggaggctgaggcaggagaatggtgtgaacccaggaggcggagcttgcagtgagccgagatcgcgccactgtactccagcctgggcaagagagcaagactctgtctcaaaaaataaaataaaatataacagggatttaaagaaaaaacaattaccggccaaatgtggtagctcacgcctgtaatttcagcactttaggaggctgaggtaggaggatcacttgagcccaagggttcaagaccagcctgagcaacatagtgaaaccccgtctctacaaaaaatacaaaaatacaaaaattagctgggggtggtgatgggttcctgtagtctcagctgctcaggaggctgaggaggaaggatcacttgagccccggaggtgaagtaagttgagctgggtattttttttatctattcactaaggcttacatcttacagattacaggcatcctacattttatatatcatctaagttttaagaatgtaacatttcactaatattgaagaaaataagttatattaccatgagtttaaatttctaacaaaattataatgttattagttatggtttacaaaattgagtgttaaggatgaatttgcaaaaagttacaaaacaaattaattaacttataatttttttttttttgagacagagtcttgctctgtcgcccaggctggaatgcagtggcgcaatctcagctcactgcaagctccgcctcccgggttcatgccattctcctgcctcaacctcccgagtagctgggactacaggtgcccgccaccatgcacagctaattttttatatttttagtagagacggggtttcaccgtgttagccaggatggtctcgatctcctgaccttgtgatccacctgccttggcctcccaaagtgctgggattacaggcgtgagccactgagcccagccttataaatacattttaattcaaaattgaatttctaaggtcaaggataaagtttttttgttagtaagtcagtgacctataggaaaggcccaaggtttcatttatttgggagatgagaattatacaagatgattctgtgtttgtttcaaggccaaagtgttatagcttttttttttctcctctgactttgggatgggagctaatattcatatatgatggccataggaaaatatgtcagttttacttccacaaatcaaactactgaatatttgaccaaaatttttcactttctggctaaatatcaatgtatcagtgaaattctttttttttttttttttttttctgagacaagttctcactcttgcccaggctggagtgcagtggcatgatcttggttcactgcaacctcctcctcctgggttcaagcgattctcccgcctcagcctcccaagtagctgggattacaggcacctgccaccacacctggctaatttttgtatttttagtagagacggggtttcaccatgttggccaagctggtctcgaactcctggcctcaagtgatccacccgcctcggcctcccaaggtgctgggattacgggcgggaggcactgcgcccggcctcagtgagattcttaacacaggaagtgaccactgtcagttaagatgcttccttttgcaagtaagagaaaaacacaaaaaccaactcaaactggcttaaacaataaagggaattatcagcttatgtaggaaaacccctaaacagtagggggggcgggcggggggggcgggtttcaggcactggtgagggcactggctctgtttctctggaattctctcagcttctcattcctctatatgtcagcttggtcctttggcttgtttccctcttggtggcaaaatggccacaactattcctgccctcatattcacacatgggaggacttctcttctttcaaccactgaacaaaagaactaggctttactctagttgagccaacttagatcgcatgccttctcttgaagcaatcacttgcaagggggaaaggtttatgctgataggactgtgccagtcagggcccatcctggagctgcgggtgggggtcaaccccttccaaacatcatggctactatgcaatggggaaggaaagaatgtctgctagagaggcaaccccaatcttcactacagaatctcacctattaccattttttccctctatctaaggaaacctttcctttcttttaagaaacatttctcagcagctcaatacattaaaatagatttaaatgggactgcttaggctagaatgtttgtgaccgagcgcaatctgctcatacctgttcataagttcattccaggagttacatctgttgagcatatattgaagcccaatggactaactcagccctttaattctaaaatggtgaaacctatgtctagagatggaatgtgacatggccaaggtcacacagccagtaggcagcagagccaggactagaacttggatttctcagcttctggtccaacgccatccttacacagaatcttagggtctctctctctctgtcttcccatctctttcaacagtatgtgaaagccaggtcccccagagccaatctgccccctctctatgctcttgaacttctaaccatctatgcctgggaaatgggtactgaagaagacgagaatttcatgttggacgaaggcttcaccactgtgatggacctgctcctggagtatgaagtcatctgtatctactggaccaagtactacacactccacaatgcaatcattgaggattgtgtcagaaaacagctcaaaaaagagaggtactggaccactgtttgcccaccaaatcttacagaaaaaaagagagacgggctagtgtaacgtggcatagagttttatggattggctgtattaagcagtaaggctgccaccatagttgagcatcgacctcccacaccaacacagctggcatctcaagttggtggcttatcaaagtcactggggggccatggggcgggtagaagcctgttccttgtttcctaagccaccctccaccttagcttggccttcttgctctctgaagaccattcagtgctttgtaggagctagcatgggaaaatggaaagaatcttggagactcaagtttaaatcccagctcagccattttcctactgctatgagcctcaatcccttatccataagacaggagtaaactggaacctacgatataggattgatgtaagggttggagaaaatctgtgttaaggatccacaatatctagcatctggcagatgctgagtaaatgcttatattggagcatgtgctgtcagcgtcccattcatatcctctcggcctttaccgttctagggaaggttggttccacttccagctgtcagcacctgcatccctttgccagcagacccactctgagaagagccctccaccagatctggtgggagttggtggataaataccacagctccctcacccaaaagatggaaggaatctgggtctcattgcgtaactttttttttttttttttaagacagagttttgctctgtcacccagggtggagtgcagtggcgcaatctccactcattgcaacctctgcctcctgggttcgagtgattcccctccctcaggcttctgagtagctgagattacaggcgcctacaacccacacccagctgatttttgtatttttgtagagacagtgctttgccatgttggccaggctggtctcaaactcctgacctcaggtgatgcgcctgccttggcctcccaaagtactgggcttacaggcgtgagccaccgcactgggccccattccatactctttcctaaagatcgcctccagtggaccacagtagtaattacttcaatacccactctttgttgtctgccttcccttatctgtctcactgtctcactcccttatttgtgcttcctgggatcactttccaaataagccaaatccttatctggggatctgcttcaggggaagcccaacccagacaactctctgtgttagaagctctgggcctgtgtaagcaacatcacagtatttagtgttctgttatgtagtattgggtctcttttgtaaggaagaaaagccaggtctgctcatgaaaagaggatttattataaccatggccagaaaaatcgagaaagcatcaggacctgagactccctctctctctctgtcactctctctcatgaactacagcacttttcccctcagcctctgcttctctctccacacctgtccggctcccctctgcctcccaggtataagggatctccatcatccccatgtccaaaccccagagagaaccagtctgattcctggtcacgggacacagaccccatgtgttgggtcacctgccagccaacagaatgagccactttagatcagtgaccccaccccataggacagcctggcactttcaggcaggactgttttagggagcagtcagggttgggaggagccagcctggagcccaaagtccagttcattccagtagcctgtgtcacattcgattacacagatgaagtcgcagctccctcccaagccctggagtacaaagggctgggttttttttgtttgtttttgggttttgtttttttttttttaatggagtcttgctctgtcacctaggctggagttcagtggcacgatcttggctcactgcaaccaccacctcctgggttcaagctatcctcccacctcagccacccaagtaactgggactacaggcgcctgccgccatgccctaatttttgtatttttagtagagacacggtttcaccatgttggccagcctggtcttgaactcctgacctcaagtgatctgcccacctcggccccacaaaatgctgggattataggcgtgagccactgcgccccactcaaagagctggtgttaatcatggacttgcagtcaccccaagttaataagcaagcccaagatccccttcaagccaatattctttaaaatatttattcaatatttatagaaaggagagacttttgggggcagcccaacctctgctctgttgaggaggtagatgggtaagagcccccatctactggctgtaagaacttagggcaatctaggccgggcaccggtggctcatgcctgtaatcccagcactttgggaggccaaggcaggtggatcacgaggtcaggagttcaagaccagcctggccaagatggtgaaaccccatctctactaaaaatacaaaaattagctgggcgtggtggcgggtacctgtaatcccagctactcaggaggccgaggcagagaattggctgaacccgggaggtggaagttgcagtgagccgagattgcaccactgcccttcagcctgggcgacagagcgagactctgtctcaaaaaaaaaaaaaaaaaaaaaaaaaggaacttagggaggtctgtaaaaaggggacaaccacaacaataaacaataaaaataacagtccctaccttatagaattgctgtaagattaaaataggttaatctgcataggatttggccttgtgcttcaataaatgtcagtagttggtggcagtggtgtttctactatccaaagtaattcagcagctctaaccttaaacttaaacttgcaaaacctgctccgaaggtacagggccccccctgcctgaaagggcatctgttattactccagcatgcctcttggggcctcattctccccctaaattccttgcaaacacttaaggcactatcccaaagaagaagaatttttttttttttgagacagtctcactcggtcacccaggctggagggtggtggcatgatcttggctcactgcaacctccacctcctgggttcaagcaatgctcctgcctcagccttctgagtaactgggatgacaggtgcgtaccaccacacctggctaattttttgtatttttagtagagacagggtttcaccacgttggccaggctggtcttgaactcctgacctcaagtgatcctcccgcctcagcctcccaaagtgctgggattacaggcgtgagccactgtgcctggcccagataggaattcttggaaatagcattgtctccatcctgttactctcctgcggtgttttggggccctcttgaacatccccgggatgtggatatcacaattctcagtggctggacgaaataattgccgagaaggtttttttctggcttgaaggccttcaaaccattatgagcctgggcacccttttcctgtgttacaggcccatcatcctggatccggccgaccccaccctcaacgtggcagaagggtacagatgggacatcgttgctcagagggcctcccagtgcctgaaacaggactgttgctatgacaacagggagaaccccatctccagctggaacgtgaaggtaatggctcctctctgggctgtcaagggcttgaaggtcagaacgacagataaactactcagtatttactcattcagttctgtgttgatggagaacagaactttagagtcaccgtttaagggccagctgcaccacccatgggctccgtgaacttggacaaattctttggctctcagagccttgggtttcttaccttcaaattcttgttctcctttcctttctttttcccataatttactggagaatcagttctgtgttcctgatcattctttgcgtgagttgggtccagccaagtcagctcaatcagccattctgtgccagtgctgttctcagggatggggtaggggatgtgggctgggggacaacacaggcacagaaataagacatgaccacgacgctcggccaggtgcggtggttcacgcctgtaatcccagcactttgggaggccaagacaggtggatcacttgaggtcaggagttcaagaccagcccggccaacatggaaaaaacccatctctactaaaaaaatacaaaattaggcgggcgtggtggcaggtgcctataatccctgctactccggaggcagaggcaggtgaatcgcttgaacccgggagctgggggctgcagtgagctgagatcgtgccattgcactccagcctggacagcaagagggaaactctgcctcaaaaaaaaaagaaaaaaagaaaaaaaaaagacaccaccctcactctcagagaactcaccctatgttgtcaggaagcaaatccatgaaacaaacttacacaaaactgctagaattaccagagaagacaagatactctgaaaacaaacaaacaaacaaaaaatactaagtcatattattatatgatgccaaacctatagtataggcagagatcacaaaaatctattttattaacatcacactttctagtgtgcaaagctcttgtccaaggtctgtctcagttgatcctcataagcaattctgtaaagtaagaaggtcgagtgttatcactatctttattattattatcatcattactattattgccattttacagaagagaaaactgaggctcagagaggttaattaactaagggcactctgctaagaggcagcagaaccaggggctctgggggtctggaagcagaataaatgttaactgaagtcaccagagaagattcctttaaaaagttaggagttgaaatgagccctaaaggccggggggagatatagacactcagaacagaggacaaaggatgatgaggggtaaaggatgggaggctgggatgagcaagatgtgtacaggacaggagactgaactgcttggagcagaaggcagaagcagaatcagaggctccagtaaggtacatagagtataaacggggggacccgctggccaaatgaggaggcccacccatgggctggaaaatatacgcctctggatttttcctgaatataaaagccattgtaggctgggggcagtggcgcacgcctgtaatcacagcactttgaggggctgaggcgggtggatcccttgagcccaacagttcaagaccagcctaggcaacatggtgaaaccccgtctctactaaaaatacaaaacttggccaggtgcggtggctcacatctgtaatcccagcactttgggaggccgaggtgggcagatcacgaggtcaagagatcgaaaccatcctggccaacatggtaaaacctcatctctactaaaaatacaaaaattagctgggtgtggtggcatgtgcctgtagtcccagctactagggaggctgaggcaggagaatcgcttgaacctgggaggcggaggttgcagtgagccaagatcgtgccactgcactctagcctggcaacagagtgagattccatctgaaaaaaaaaaaaaaaaaaaaagaacaaaacttagccagatgtggtggcacgcacctgtggtcccagctactcaggaaactgaggcgggaggatcgcttcagcttgggaggtcaaggcgcagtgagttaagattgcaccactgcactgcagcctgaggtgacagggcaaggccctgtctcaaaaaacaaaacaaacacacacaacattgtgcaaatattttttatcttggctagtcagaaaacttggcaatgccaggcttatatttctttttctttttctttttttgttttccttttgagacagagtctccctttgttgcccaggctggagtgcagtggtgcgatctcagctcactgcaacctccacctcctgtgttcaagagattctcccacttcagccttccgagtagctgggactacaggcatacgccaccacacccggctaatttttgcattttttggtagagataggttttgccatgttggccaggctggtctcaaactcctgacctcaagtgatctgcccgccttggcctcccaaagtgctgggaatacaggcgtgagccactgcacccagccaaggcttatatttcttctggaaagaatcagctagaggcctgaccctcgccagcattttccaggtgctctccagccacctggggctctcaggccctggagtgtagcctctggaggtggtgagaacacagactctggagtctgaccaacctcacttcacatatctgccctgctccttactacctatgtgattggtgttcagtaaattacctaaccctgctcagtttcctcatcaataacatgggggtaacagtagaaccaaccaactaatagagatgctctgagaataaaatgcattaagggtatggaaggtgctcagcatacagcctggaaagtgcttaccactccctaaacatttgctgctgccgctgctgctgctactattgtaaagataaggacagatgaagggaacatttgcacatcagacaaagaagtgtggacttaacacctctccttctccctctcccttccagagggcacgagacatccacttgacagtggagcagaggggttacccagatttcaacctcatcgtgaacccttatgagcccataaggaaggttaaagagaaaatccggaggaccaggggctactctggcctgcagcgtctgtccttccaggttcctggcagtgagaggcagcttctcagcagcaggtgctccttagccaaatatgggatcttctcccacactcacatctatctgctggagaccatcccctccgagatccaggtcttcgtgaagaatcctgatggtgggagctacgcctatgccatcaaccccaacagcttcatcctgggtctgaagcagcagattgaagaccagcaggggcttcctaaaaagcagcagcagctggaattccaaggccaagtcctgcaggactggttgggtctggggatctatggcatccaagacagtgacactctcatcctctcgaagaagaaaggagaggctctgtttccagccagttagttttctctgggagacttctctgtacatttctgccatgtactccagaactcatcctgtcaatcactctgtcccattgtctactgggaaggtcccaggtcttcaccagttttacaatgagttatcccaggccagacgtggtagctcacacctgtaatcccagaactttgggaggccgaggtgggaggagcgcttgagccgaggagttcaagaccagcctgggtatcacagggagaccccgtctctacaaaataaaaaaataattcactgggtgtggttgtgcacatttgtagtctcaggcactcaagaagctgaggcagaagaatcacttgagcccaggaggctgaagctgcagtgagctgtgatcacaccgctacactcctgcccaggccacagagcaagaccctgtgtctaaaaactaaaacataaaaataagtaaatccgtttaaaaaaaggattatcccagccctgccagggggaggatgaggaggggtgtgaggactaaatatacaaataaatagtgtggtcacatgacgcacagcaacagaattcggacccacagccttctgcagcaatcaaccccaaaccatcaggacttgggcgataactggcagcatctctaactccccaccctactcccatcctgcttcctatttatgaccaacccaagaaacccaaataagctccccagaccaatcacatggttagccccacttctggtgagtgcacttccagcttccccataccaacagcctcaatcacggcatccctgaagccttcccattttcctgcctgtctttaaatctctgtcaaaagcgagagatgggtggctggttcctttgctatagcaagttgggaataaatcgcctttgttagttctcatttgggggctgtttatttccacagggcctaatgctgtcctaatggttattgcttgatcatttgagcttctcaactctaagaaatgaggactggggaaactgaggcaaaaagagacaaagaatgggagattgaggatgatgcagtgtaaaaaaaaatcacctcaactcctaaaacccatacacaaacagtacataatagtcaggaaactgtaggaaagtaatagcatctttattatcaaaggacgtcatgtgatcaggtttactccaagcaataaaaagtttccttttgcccccctgttttgcctagttttctggtgggctactctcctaccatagcatagaaaatgcacactgcaattggttatcaacagcctctggtcaatttagcaatcataatctgtgtatctcccacctctgtttgccttcagggacagaaaaagtgcctcctttccaggaggtagacaggctgttccagtccccatctttgtgtccttcataatgcccagcacagcccacattgtaggtggtgggaaaattcttgtttaaaataaaaaaaagaatgaaaaatgcaatgtcttagtccatctgggctgctaaaacaaaataccatacactggatggctcatgaacaataaccatttatttcttacagctctggaggctgggaagtccaagtcaagacactggcagatttggtgtctggtgaggacctcttcctgattcacagatggcagcttctcactaagtcttcacatggtagaagaggcaaaggtgtctctaggatcgcttctttttttttttttttttttttttgagatggagtctcgctctgtcacccaggctagagtgcattggcatgatctcagctccctgcaacctctgcctccgaggttcaagcgattctcctgcctcagcctcccgagtagctgggactacaggcacctaccactgtgcccagctaattttttttttatttttagtagagacggggtttcaccatcttggccaggctagtctcgaactcctgaccttgtgatccacctgtcttggcctcccacagtgctgggattacagttgtgagccaccatgcctggcctctggggtctcttttatgaaggcattgatccagttcatgagggctcaggacccattatgtaattgaaagattctccgtggggcctgaaagcttaagagaatgaatgacccctccctcccctccctccttgggcccggtcccaaggcgcaaggccactcgcgccagcagcatgtgtcagcaagatagcagaagcgggaagagagcgggccagaagacacctaccccctgaagaccgagagagacgtcatccgggtacaatgtagcggttacaacagactgagaaacttcctgtttacaggagactacaaaacccctgccccgtcctcatttggtgctgacgccattttaagcctcagcccacctgcacacacactgcctcatgttgtctgttggccacgctcttggggttcgaaccaacacaagaccctttcactaattacttcccagaggtcccacctcctaataccatcaccttgggagtaaggactttttggaaattatcagtatcaaaatggagtcacttatgtcaaaccctaacaaatgcctgtcacaaaaattatctcaagaagttcctaaaatccgcagtattatagataaaccacttgcataagaatatttgcctaacagtgggtgtctccacaataagctaaagccaactcctgcaacaggctcctgtgatcaacggtacttgttttaaagaagcttatgtggactttgtcttttctcgttgccacaacctcttttaatgtgcctatagtccactatagcatgcatatctcaaattgcaattccttgcaattctggaataaacgctttattttggagagtcagtctctctgttatttattttacggtgtcaattttaacatatgaattttggaggaacacattcagaccatatcagtcaccttcctcttctttgaaatagaaaaagctcaaggccagagagtttattttagtaaagttttgacatacctgtcttcaaagataaaacatgaaacagcattccacacacaaaagtaaagtgattttgttcatccttcactgtgaggtattttaaccacagagattctaattttttggtcttggatgggtcctgggagtcagtattgcctggctaatttttgtatttttagtagagatggggtttcaccatgttggtcaggctagtctcgaactcctgacctcatgatctgcccgcctcggcctcacaaagtgttgggattacagatgtgagccaccgtgcccggacaggattctgcatttctcttttttttttttcgagacagagtctcagtctgttgcccaggctggagtgcagtggcacgatcttggctcacctcaacctccacctcccaggttcaagtgattttcctgcctcagcctcctgagtagctgggactacaggtgcgtgccaccatgcccagctaatttttgtatttttagtagagatggggtttcactatgttggccaggctggtctcgaactcctgaccttgtgatctgcctgcctcagccccccaaagtgttgggattacaggcgtgagccaccgtgcccagcctggattctgcatttctaacgagctcccaggtgttaccaatgctgctggctcatggactacactcttaagtagtaaggccctaggctattaaaggaaatacagattcctggattccacctatcagagattctgattctgttagtattttctgtgagacccaaaagtctgcagtttaaccagctctctaaggtgtttcttaggcccagctggactgggaaattactagaataaatgacatggaatcaaaacctgggaactaatcctgggtctgtcattaactccttaggagattcccatcccctctggagatctgtcatcaagaaatgattggagaagttaatctcttaggcccttctagctcttgcctttgagaaccgcccacctccccattcccacctggtatccccaacccagtacagttcatggccaatggcggtccaagtcttggaactacaatccccacaatgcctcgcgcctctcctctcacgtgacgtcatgaaggaggcttgataacggcggtgttctccacaatcctttgcggtggttcaagatggcggcgcccagtggcacagtgagcgattcggaaagtagtaacagcagtagcgatgcggaggagctggagcggtgccgcgaggcggcaatgccggcttggggcttggagcaacgcccgcacgtggcagggaagccaagagccggtagggtactatgtttggggagactggctgaggggcgtgggatcttcccctggagcctgagaggatggatggtgaggagagagtcactgggactcggcttccttccccgagagacctccagggactgggtgtagtgcagattgaaagcatgggcaggtgcagtagggagggtatttcattattccagtcggggaagctgaggtacccaaatgtcttttgattctgcctccttgggtctatcctcactgccccacactgggaaggctgccgtctcttcgagataactgcaacagccccctcccggtattctcgcacccagcctttccccacctccaacacattctcccaccctggaggttgttgccaagagcagtgcccagcacatcactctgaccgtgactccctagtgccctgggaataaatacagagccccgcaacatcaaggggcctaatcatggatagaacccaagggttcttgaatttggaatgaaaacatgttgcatctttgctttctattcatctctgactgaattttagcatctctttccgtcttgcaagcactaagccacagtagttctggcaatgccgttactttatcccaacagaagtcacagattttcatatctcattacaatctttgcagatacagatatcaatatatcattttattgataaaaagatattggggaaaaaagtcatttacactcatccctgatttaaaatgtgccactctaatttttagacccatctctatatctaagatgtaagaagcacatacatcacaagtttggttgtttactatcatgataattaaatttcggtatcattggttttctttgtaatcctgtatgttgcatttcatgcatttaaaacattgctctgagaagagaaccgggcttcaccaggctgttagagaaggctatggcaaagcaaggttaagaaccgctggatttgtttaaaaggacttacaagccctttggtgatccattgccttcctctcccttccttccctcctgccatactgcacttcctgtaggtagcttccagaccatagtctgcccctctcaccccctagtaccataaccacagttttctctgcaagttctatttacagatctgcctttccatctcattagcggtgggaacttgagcaaagtacttaaatctcactgtacctaaatttcctcatctgtacagtgcgggtagtgatagtacccaccccataaggttgagaagtaactgagataatgcaatctacagtgcttggcacatcttaaaggcccaatacatggtggcaaatatgtggttggtctttccacatggactgctttcctcctcctgcctaattctcgctcttttttttttcaaaactaggactcagtctgttaccgaggctgacacaatcatggctcactgcaacctcgacctccccctactcagatgatcctcccacctcagcctcccaagtagctgagactacagatgtatagtcccagctactttttgtattttttgtagagatggggttttgccatgttgcccaggctggtctcgaactcctgggctcaagtgatcctcccttctcaaccttcaaagtgctgagattacaggtgtgagccactgtgctcggcttctagttttttttgtttgtttgtttgttttttggggtttttttttttttttgcatttttttttttttgagatggagtttcactcttgttgcccaggctgcagtgcaatggcacgatctcagctcactgcaacctctgcctcctgggttcaagtgattctcctgcctcagcctccctagtagctgggattacaggcgcctgccaccacgcccagctaattttttgtatttttagtacagacagggtttcaccgtgttggccaggctggtctcaaactccagacctcaggcaatccacctgcctcggccttccaaagtgctgggattacaggtgtgagccaccgcgcctggtctctttttttctttttgagacgcagtctcgctctgttaccaaggctggagtgcaatggcgcgatcttggctccctgcaacctccgcctcccaagctcaagcaattctcctgcctcagcctcctaagtagctgggattacaggtgcccaccaccaggcccagctaatttttttttatatttttattagagacagggtttcaccgtgttggccaggctggtctcgaacttatgacctcaggtgatccgcccaccttggcctcccaaagtgctgagattacaggcataagccaccacacccagcctagattacattcttgagtgcgtctagtaatagccaccaggagttgagaattttctttttgcccctgttctaaacactttgtatttgttgtctgttttcatcttcccagcaatgccacaagagggtgtattagccccattttacagaaaactgattctcataatggtaaaataacttggccaaggttgtccaatttgtgagtggcagaaccaggcgtaaacccaggcctacctgactcccaagtccatgctcttcattgctgctgtgccactctgccatggacaagtgtctattgtggtcaaaactcccaccctttggtccatgactgtggaaatataggtcactattttatttatgtaacctctagagacagctcttaaatccagtgatgaactcgtcactcaaaccactttaattttagggtggcatctactttgacttatttttctgacaattaattcaaaccaagacactatggcaggatctggggatacagaggtaaaaagaggcagaccacgtattcaagtagcttacaaatccaggaaggggatgggtatggaaacagcgtccacaacactgactccagaaggttggtaatcgtattcccattttatagatgagaaaaacaaaggctcagggagagaaagtgacttgcccggcatcacacagcttggtggcagagccaggactcaactgaactgtctccctctgtaatactgtttctgttccctgacggtacctcaccttcatcacactgtagtcatgatggaagagatgctcttcttccaagtgattatgtgctgaagacgaaagaccaggtctttaaagactgtccatccaggcccccacattacccacctccaggagcatggggcgtgtttagcattctgtgttgtgctctggagtacagtgacacagaccacaaggtactaggacacagatgcaatgtgtatgggtgatgacataaacacagcagtgcccccatggagctgtttcttacaccatggccctccactgggcccggagctaccaagtgtccactttgttcagttggccccttaaatatacaagcacgttttgtcttgttagttaagtcagaaacctcagagctaactttcactcatttctcacgccctgtagtcagtccatcagtgaatcctattgactccatctttttttttttttttttttttttttagacggagtcttgctctgtcaccaggctggagtgcagtggcgtgatcttggctcactgcaacctccgcctcctgggttcgagcgattctcctgcctcagcttctcaagtagctgggactacaggcgtgcaccaccacacccagctaatttttgtattttttagtagagatggggtttcaccatgttgaccaggatggtctcgatctcttgacctcgtgatccgcctgcctcagcctcccaaagtgctgggattacaggcgtgagccaccgcgcccggccttgactccatcttaaaagtgcatctatctggagttcacccacttctcaccacatcaattactgcagcagactccgtgttcctgcctttgccccaacagtctcacgctgcacagcagccaaagatgttctgtcaaaacccaggtcagtttatgtcccttctctgctcatttccagagctcctcctcctcaaagtccaggtcctcccattggcccacgtcagggcccttcatgatctggcccctctgagttctccatctctgctgctcccggtttactgggcaggctctggtcacactgacctccttgctggttctaaacacacaaagcaggctccagtctcagggcctttgcagatgctttccctctgcctggaaggctgtgtcccacatgtccacttggttcactccctctcctctctcaaatctctgttcaaatgttgccttatcagtgaagccctctctgcccacctttatgttaacaatccccagcccaacactccccacctctctcgcctactttgtttccgtttttttccatacacttagcattatccaacttgacattttgtttacgtatgtgtgtttatcatctctctccaccaactagaatgtaagctcctgcagacagtgatagtcgagtaagttgctcagcaatgacaacacctggttaataaaaggcattcagtatctggtttgagggaatgaccaaaaggccgggcatccccaccgttttggcttgaaaaatgtgatccacaaaagagccatcttctctctcttccacggcacttagcacacagccaggcaggcattaaactgtgcagtcaaatcacacttagacctgcctgttcagcacagcgtggtggttaagagggggctcaggagtcagatggcctgggcccccagcccaaccctgtcacttattaggtatttgactctggccaagttattttacatatctttgacgtttcttctgcaaaatgggataattgtaatccctccaatcgggttgttgggaagattcactgagttatatgtgttatatatattttaagttacatatataactattttaagttttatgtatatataactaagttatatatataactattttaagttttatatatataactaagttatatatatattttaagttatataactaagatatatatatatataatgtacttacataaaatatgtaactatattatatacatatataactaaattatatgtaactatttgaagttatgggtatataactattttaagttatatataaatataatatatatgagttacatgtgtatgtatatatatgagttatatgtattttaagctgctgaaaatagtgcctggcacgcatttgttgttgctgtcattgtttcctctataaatgccctaattttcatttttccacaggtgctgcaaatagccagttgtcaacctcccaaccgagcctcaggtactatgcactttgggttcaagtttcacttattcaacaaatactgatcccctgcgtgtgccagatgctaggcttcacgcctggcatttccaggtgaacaagacacacatggtccctgtgctcatggggacagcttctgagcgggcaggaagtgaggtctctttgtgtgtgtcgtaggcataaggtgaatgagcatgaacaagatggcaacgagcttcagaccacccctgaattccgagcccacgtagccaagaagctgggagccctgctggacaggtaaacaaaggtggagtttctcctctcttgcccttgttaatatgaacagcaatggctcacattggctgggagctcacggtgtccaggctggcacggtggcaggcacctggcatatgtcatctccctgcatttataaagaacattatcatgtgggtcctgttgttacctttatcctccaggtgaggaaacaggctgtcagcaaggagacaggtgtgcctgaagtcacatcatcatcgcagctaccatttactgagcaactgtttgtggccaggctctgtgctaagtgcttgatgtccattttctcatttaatccttctgatgaccctgagaggtagggactgttatcattcccactgtacagatgggtaactgaggctcagagaggcaaagtcatttgcccaggggacaccgctattaagtgacaaagccaggattcagaacccaggagggaacagaattgggcctcaaacccaagtgcgtctgactccaagcccacatttttttgttttgttttgttttttgagacagagtctcac

SEQ ID NO: 61 - DNA, 1820 bp, Homo sapiens
acagagatggcactgatgcaggaactgtatagcacaccagcctccaggctggactccttcgtggctcagtggctgcagccccaccgggagtggaaggaagaggtgctagacgctgtgcggaccgtggaggagtttctgaggcaggagcatttccaggggaagcgtgggctggaccaggatgtgcgggtgctgaaggtagtcaaggtgggctccttcgggaatggcacggttctcaggagcaccagagaggtggagctggtggcgtttctgagctgtttccacagcttccaggaggcagccaagcatcacaaagatgttctgaggctgatatggaaaaccatgtggcaaagccaggacctgctggacctcgggctcgaggacctgaggatggagcagagagtccccgatgctctcgtcttcaccatccagaccagggggactgcggagcccatcacggtcaccattgtgcctgcctacagagccctggggccttctcttcccaactcccagccaccccctgaggtctatgtgagcctgatcaaggcctgcggtggtcctggaaatttctgcccatccttcagcgagctgcagagaaatttcgtgaaacatcggccaactaagctgaagagcctcctgcgcctggtgaaacactggtaccagcagtatgtgaaagccaggtcccccagagccaatctgccccctctctatgctcttgaacttctaaccatctatgcctgggaaatgggtactgaagaagacgagaatttcatgttggacgaaggcttcaccactgtgatggacctgctcctggagtatgaagtcatctgtatctactggaccaagtactacacactccacaatgcaatcattgaggattgtgtcagaaaacagctcaaaaaagagaggcccatcatcctggatccggccgaccccaccctcaacgtggcagaagggtacagatgggacatcgttgctcagagggcctcccagtgcctgaaacaggactgttgctatgacaacagggagaaccccatctccagctggaacgtgaagagggcacgagacatccacttgacagtggagcagaggggttacccagatttcaacctcatcgtgaacccttatgagcccataaggaaggttaaagagaaaatccggaggaccaggggctactctggcctgcagcgtctgtccttccaggttcctggcagtgagaggcagcttctcagcagcaggtgctccttagccaaatatgggatcttctcccacactcacatctatctgctggagaccatcccctccgagatccaggtcttcgtgaagaatcctgatggtgggagctacgcctatgccatcaaccccaacagcttcatcctgggtctgaagcagcagattgaagaccagcaggggcttcctaaaaagcagcagcagctggaattccaaggccaagtcctgcaggactggttgggtctggggatctatggcatccaagacagtgacactctcatcctctcgaagaagaaaggagaggctctgtttccagccagttagttttctctgggagacttctctgtacatttctgccatgtactccagaactcatcctgtcaatcactctgtcccattgtctactgggaaggtcccaggtcttcaccagttttacaatgagttatcccaggccagacgtggtagctcacacctgtaatcccagaactttgggaggccgaggtgggaggagcgcttgagccgaggagttcaagaccagcctgggtatcacagggagaccccgtctctacaaaataaaaaaataattcactggg

SEQ ID NO: 62 - protein, 510 aa, Homo sapiens
MALMQEKTPASRLDSFVAQWLQPHREWKEEVLDAVRTVEEFLRQEHFQGKRGLDQDVRVLKVVKVGSFGNGTVLRSTREVELVAFLSCFHSFQEAAKHHKDVLRLIWKTMWQSQDLLDLGLEDLRMEQRVPDALVFTIQTRGTAEPITVTIVPAYRALGPSLPNSQPPPEVYVSLIKACGGPGNFCPSFSELQRNFVKHRPTKLKSLLRLVKHWYQQYVKARSPRANLPPLYALELLTIYAWEMGTEEDENFMLDEGFTTVMDLLLEYEVICIYWTKYYTLHNAIIEDCVRKQLKKERPIILDPADPTLNVAEGYRWDIVAQRASQCLKQDCCYDNRENPISSWNVKRARDIHLTVEQRGYPDFNLIVNPYEPIRKVKEKIRRTRGYSGLQRLSFQVPGSQLLSSRCSLAKYGIFSHTHIYLLETIPSEIQVFVKNPDGGSYAYAINPNSFILGLKQQIEDQQGLPKKQQQLEFQGQVLQDWLGLGIYGIQDSDTLILSKKKGEALFPAS

SEQ ID NO: 63 - DNA, 1434 bp, Homo sapiens
cgggacagagatggcactgatgcaggaactgtatagcacaccagcctccaggctggactccttcgtggctcagtggctgcagccccaccgggagtggaaggaagaggtgctagacgctgtgcggaccgtggaggagtttctgaggcaggagcatttccaggggaagcgtgggctggaccaggatgtgcgggtgctgaaggtagtcaaggtgggctccttcgggaatggcacggttctcaggagcaccagagaggtggagctggtggcgtttctgagctgtttccacagcttccaggaggcagccaagcatcacaaagatgttctgaggctgatatggaaaaccatgtggcaaagccaggacctgctggacctcgggctcgaggacctgaggatggagcagagagtccccgatgctctcgtcttcaccatccagaccagggggactgcggagcccatcacggtcaccattgtgcctgcctacagagccctggggccttctcttcccaactcccagccaccccctgaggtctatgtgagcctgatcaaggcctgcggtggtcctggaaatttctgcccatccttcagcgagctgcagagaaatttcgtgaaacatcggccaactaagctgaagagcctcctgcgcctggtgaaacactggtaccagcagaagggtacagatgggacatcgttgctcagagggcctcccaagggcacgagacatccacttgacagtggagcagaggggttacccagatttcaacctcatcgtgaacccttatgagcccataaggaaggttaaagagaaaatccggaggaccaggggctactctggcctgcagcgtctgtccttccaggttcctggcagtgagaggcagcttctcagcagcaggtgctccttagccaaatatgggatcttctcccacactcacatctatctgctggagaccatcccctccgagatccaggtcttcgtgaagaatcctgatggtgggagctacgcctatgccatcaaccccaacagcttcatcctgggtctgaagcagcagattgaagaccagcaggggcttcctaaaaagcagcagcagctggaattccaaggccaagtcctgcaggactggttgggtctggggatctatggcatccaagacagtgacactctcatcctctcgaagaagaaaggagaggctctgtttccagccagttagttttctctgggagacttctctgtacatttctgccatgtactccagaactcatcctgtcaatcactctgtcccattgtctactgggaaggtcccaggtcttcaccagttttacaatgagttatcccaggccagacgtggtagctcacacctgtaatcccagaactttgggaggccgaggtgggaggagcgcttgagccgaggagttcaagaccagcctgggtatcacagg

SEQ ID NO: 64 - protein, 251 aa, Homo sapiens
MQEKTPASRLDSFVAQWLQPHREWKEEVLDAVRTVEEFLRQEHFQGKRGLDQDVRVLKVVKVGSFGNGTVLRSTREVELVAFLSCFHSFQEAAKHHKDVLRLIWKTMWQSQDLLDLGLEDLRMEQRVPDALVFTIQTRGTAEPITVTIVPAYRALGPSLPNSQPPPEVYVSLIKACGGPGNFCPSFSELQRNFVKHRPTKLKSLLRLVKHWYQQKGTDGTSLLRGPPKGTRHPLDSGAEGLPRFQPHREPL

SEQ ID NO: 65 - DNA, 53916 bp, Mus musculus
  misc_feature (1)...(53916): n = A,T,C or G
gctctgtctggacaggtccagacgactgacaccattaacactttgtcagcctcagtgactacagtcatagataaacaggcctcagctaatgtcaagatacagagaggtctcatgctggttaatcaactcatagatcttgtccagatacaactagatgtattatgacaaataactcagctgggatgtgaacaaaagtttccggaattgtgtgttatttccattcagtatgttaaatttactagggcagctaatttgtcaaaaagtctttttcagtatatgttacagaattggatggctgaatttgaacagatccttcgggaattgagacttcaggtcaactccacgcgcttggacctgtccctgaccaaaggattacccaattggatctcctcagcattttctttctttaaaaaatgggtgggattaatattatttggagatacactttgctgtggattagtgttgcttctttgattggtctgtaagcttaaggcccaaactaggagagacaaggtggttattgcccaggcgcttgcaggactagaacatggagcttcccctgatatatctatgcttaggcaataggtcgctggccactcagctcttacatctcacgaggctagactcattgcacgggatggagtgagtgtgcttcagcagcccgagagagttgcacggctaagcactgcaatggaaaggctctgcggcatatatgagcctattctagggagacatgtcatctttcatgaaggttcagtgtcctagttcccttcccccaggcaaaacgacacgggagcaggtcagggttgctctgggtaaaagcctgtgagcctaagaactaatcctgtacatggctcctttacctacacactggggatttgacctctatctccactctcattaatatgggtggcctatttgctcttattaaaaggatagggggagatgttgggagccgcgcccacattcgccgttacaagatggcgctgacagctgtgttctaagtggtaaacaaataatctgcgcatgtgccaagggtatcttatgactacttgtgctctgccttccccgtgacgtcaactcggccgatgggctgcagccaatcaaggagtgacacgtccgaggcgaaggagaattctccttaaaaagggacggagtttcgttttctctctctcttgcttcttgctctcttgcttcttgcactctgctcctgaagatgtaagaataaagctttgccgtagaagattctggtctgtggtgttcttcctggccggtcgtgagaacgcgtctaataacaacagggttgataaggacttcccatttagggctgggcactcggtagtcacttatcctcagcacttgcccccgttgtgaggctccactatttactgcagagagaggcttccctggataaggtgaagagcagcagtaatctatagtaatctatgtgtataagcacagatattaagtcatggcagcttggtatgttatttagcaaaacaacagtgggttcctcactagggcctggacttcctgagccgtgtggatttgaggcaagagtagagtatggctggctggtttttaaggtcaacttgacacaagctagagtcatcttagaggagagtctgttgaggaaatgggagcctcagtcgagaaaatgcctctagattggaggtagaggcaggtggttttctgagttcgaggtcagccaggtccacaaagtgagttccaggacagccggagctacacagagaaaccctgtctcgaaaaaacaaaacaaaacaaaacaaaacaaaacaaaacaaaaaacaacaacaacaaaagattggggcagagatgtgcctatatggcatttccttaattagtgattgatgtcgtgatacacagtacactcctgccctggtagccctgggtgctataagaaggcaggatgagcaagccgtgaggtacgagccggtcataggcactcctctactctgtgcatcagctcctgccaccaggttcctgccctacttgagttactgccctcgcttttctaggtgatgatggtcttttacctggatgtgtgagtgaaataaacacttttctccactgtttgcctttggtcatggtgtttcatcacagcaatggaaaccgtaagatgctaccagatgtgaattcccttctgagaatctggccaaagattccattagaaagtggttagttttcccccacgacagtcgggccgctattgcaccagccagtgcatctgcagcagtggtactcaccacgcgataatgccaaggagaggatccagcttaatagcctgcatcttttaattggggaattggtatcccggttgttattggaaagtgtgttggtcaattttgatgtgtgtgtctgggtgggggggtggctttaattctcttgcttagtattcttctattatggattattctatcctggggccttctggatggttttgaacattttttttctctccattctggaaattccttcaagtgtcttctgcagaactgggttagtgggtttaggttcgttcagtttatttttcatcacggcaagtttcttattttcccttctgtaatgtgaagtggaaacttaagggttctttgggaagtcaattgtgttggaggatgttctgttagggcaaacactcgaaggactgtcctgaagcagatgcaagtgaaaggatgttttttggtttggtttggttttggttttagggttggttttgttgttgttcttgttgttgattttgttgttgttgttgttgttctttttgtttttcgagacaatgtttccctatgtagccctggctgtcctggaactcactttgtagaccaggctggcctggaactcagagatccgcctgcctctctctgcctcccaagttctgggattaaaggcgtgtgccaccacacccggcttaggatgttttgttaaagcaaacacgtgaagaaatgtttcactgaagcggacacaggagaaaggctgttctgctaaagcaagcacgtgaaaggacacgtgatgaaggattcttcgctaatgacacgcatatattggtccacctgacaatgaaaagttgagctgcatttgtcaggactccaaagagagaaacacaccaaaaatcttttagtgtgtgttgtggcttcttgtggcttccttggacttagattggttggcaaagtgacgtcacctgcgacagacttagacgagctatttggaggtggaaatgggattgaacaggcagtgaaggaggctgagcttggctcacatagctaaatgcttgttggttttgtgtcttcgttaatcttcacttccctgcgggagaactttttctgatgtccctcctggtcccgccttgtccctcctgctgacacctgccaatttggctgaggcctggctgtctctgctgggcagtgttaccactgctggttcatgtttgctctcagaactctatggaactggactgctggtgtatctgtgaggtgtttgccagtggattgagctgccgctgcctgataacctgtggactgaactattgccagacaacacagacgggagtcgctccaaagaacctttctaaacaggtccacttcccccgtatcctttctttcccactacctctggtaggtggtgagctacaagggaggttaaagccttaaagtgggctttaaaaaaattaaagttgcaataacggcagatagttttgttgttacctttcagaacttgaaacacatcattctaagcgctgaggcgtttgaagtttcagagtccctgtcccaatggcctgtcttagtgatgtgacctgatgtttctgacttcatgctttcaatagagtgtctttgttctctatgtgtggcatttgatttcagggtgctaaggggagcttttttcctggtcctgtctgcctggtatctatccctaggacattttcccagcttggggaaactattaagattattttgactatttttttttaatgtgtcttttgagcaagattctttcttctatgcccataactcatatatttagtctttttggagtatcagaaacatcttagattcttactgttatttttattttccttttgtccttgttagatggctctgcatctccactgacttcaaactcaggaactatctcgtctccttaacccctctgttgctgcgattccctacatagtcccctagcatttcagagttttaggcctggtctctctttgctgagctcctctttcatgtcatcggttgcctccttcatcacagtctgggaacatctgtatccttacttgagttctctggaatttcctataactcttttgtttgggggtggggggtgtttttttttttttttttggtttttggtttttcgagacagggtttctctgtgtagccctggctgtcctggaactcactctgtagaccaggctggcctcaaactcagaaatccacctgcctctgcctcccaagtgctgggattaaaggtgtgcaccaccacgcccaactcctataactcttacctctgagccatctcgccagccccacacttttttaaaaaaataaaataaaaagaggaaggataaaaatgagagctgatatgctggagagatggctcagtggttaagagtactggctgctcttccgaaggtcctgagttcaattcccagcaaccacatggtggctcataaccatctgtagtgggatccgatgccctcttctggtgtgtctgaagacagttacagtgtactcatataaataaaataaataattctttaaatacagctatagtgtactcatatatatataaaataaataaatctttaaaaaaaaaaagaatgagagaggacatagcaatatgaggggagagatgaggcgtggcctccatgagcagggtcctaacagacagatggatggacagacagagaaacagaagcaaaactagctggaaacatctgtgcaggagtggagacggaacaagacaaaagagggcacaaagataggcaaggtgctcgacgtgcggcacacctgggctggcctgacgagcggagcttccagcttccccaccccacccctaactcccaccacccccaccctcactctagttggttttagtgctcctccgtgacagaggggagaacaggaggccctggtctctggattcaggggtatgaggcagtgttcttagccccttcttggttctgtgggactcatgctatccacagtaggatttccagttcctgccaagttttccgggtgtgatagcacacacctttagtcccaagactctagaggcagaggcaagtggatatctgagagtttgaggcagcttggtctagagagtgagttcaaggatagccagggttacacagagaaaccctgtctccaaaaaaaaaaaagtttctcactacaatagcagactacggaaaagggtacaggttttgcccttggcagagggaacaagctacgcagagacagcctgtaagaggctggagaacttgcaagcttgagatgcagaggggaaggtcctgtgtggagataacacagcaaacccacatgaccccattatatttatagctacttcttattaaattttttacttattttatgtgtgtgtgcatgtagatatgtgtgtgagattttctgtgtatgtgtgcatgtgtatatgtgtgtgtgtgtgtgtgtgtgtgattgtgtgtgtatgtgtgtgtttgtgtgcgcatgaaggtagcagtcagataatagtgttctgcagttggttctgtcctatccccatgggtcccaaaggctaaactcaacctcaggcttagaaatgctccactgagccatcttcatggccctgacagttcttgctaatatttttcaatgctgttagatgttgtatcaagtttcagacccatctcagctttcctgaaagtgattcggccctgctcctgttagtgtttactgtatgccacttctgtgtgccgccattcctgggaaggtacagatgccaccaaagttcagctttgtgggccagtgagttgtatggggacctacttacagaagcagaagtgactcaaaagacagccacatcacttaagcacacccaagcactgggtgacagctcacaaagctggaaatctggaactctcgcaatacagcatgcaggcagctcaggagtgtcctttgcaggtagctctgctagtctctgcctcttctaggcagctctgctgatctcatcctcttctacacggctcactggtctgagagtaactcttggctctctttactgcttatatactacattgggatggagaagggcagggcttagtagatctggtcagtttcaggaacttccttagcaatctgagttgtttccttcctgagcttaacaaacttccctgtaagatggactgtctcagctccctttagaacaacctgttgcgtctgctccttgtgtcttgaagagcttctccatttggtgggaaactttaaactggaggaaatggctgtacaacagccatgggctatcatggcaggcctggccccctcagaccctcgaagttctgcagtgctgatcacatagtacacagtgcttcttgcacagtcctgcagtgcctatcccactctccccacaatatgaaaacaggtcaagagtcactgttcccaaggtcacaccatggacaggacgtggacctagctgaaccactcaagacactcctttccaatacaggcatccactcacccttgcttttaatgcagctttgctcattgcctgtaggcagctgtccatacccattcacaagccccatgtgtgtgtctcctccctgcttccaggtgttcctctgatagatgcctgcctaattattagttcagttcccaatggatgggcatctcggttatttccagccctctacaattgtatctgtttgccgaccaaattttagctcctgttcatgactccaccagtaaaagaagttcctgctggatactggaccgccccccgccctcccccccccaatacccaaacaacaacaaaatcagaacaactttaaaatctgaattctcctcccaggagactgtcctgaggaccagcagaggccattttcagttcagagagcagttgaaggctctaaggatgggtgggtgtgggaagagctctttacagcttagctcactgcccacttagatcctacaaatcccacagacaccttctattccaagatggttggaccagttcctgcccagagccgctgaactcacactcccgcatcctaaaatgcaccctcgttctcttatagctaactcttttctctttttcattagaggcctttccagataggattgtcccaagccatttcaaccccatccctggacttgattttgctttgtttttgcaatactggcaaggaacccagggcctcatgcgtgttaggtaagccagcaccacactcagcgagggggggattgtttcagcttacagctgacagtccatcacgaagagaagggaaggcaggaacctggaggcaggggctgatgcagaggtcatgttggggtgccacttaccggcttgctccccatggtttgctcagcctgcttttattatagcctccaggatcacgtgacgccgcccacaatggactgacctcccacatcagtcaccaatcaagaaaatgtccccacaggcttgctataggacagtctaatagaggcagcttctctactgaagctgtcagatggccgtagtttgtgtgaagtttgcaaaatcagcactgttgctttgaatcttaaactctgactttagtaagggtctttaaatgtcttcatctccctcgtagcccaccacccaccagaggtagtgggaaagaaagggtcttaggatacgagggacatgtacctgcttagaagttgttctttggagcaaatctcttctgcgttgtcaggaaatctgcagttcaggtcacaggatttagcagcagcagctcgatccatttgtgagtactttacaaatatatcagcagggctggagagatggctcagcgggtaagagcaccgactgctctcccgaaggtcctgagttcaattcccagcaaccacatggtagctcacaaccatctgtaatgggatctgatgctctcttctagtgtgtctaaagacagctacagtgtacttacatataataataaatcttttttttttaaagaagagtatatcagtagtctaatttagtagtgtcagaatagcaaactcgaatcagcagtggtggcatgacctagtaggtcaggcctcagccaaatcagcaagagtcagcaggagtgaccaggaccaacagggacgctcagagaagttctttgccatgcttctctcaatgaagtgaagatcagccaagatgtaagaccaacgatgctttgtaaagctagctctgcaagcaagcccccgtcactgtccactgagccctatttatacttcctccgaacaccttgtgtcctccatgggcttttgtctcgccatgtgtcttgcctcactacgcaagtgtcttaagattctacacgagtctgtatcagctgacatcgctctgccaatcagcccaagtctgcaaaagtggaaaaaaagccacaagaaccccaccagaagttttttgctgcgattctctctatagagtcacgacaaaccaagctcaactgtgtgatgtaagaggaaaccaatacatgagtgtcattaactaaaaacccttcattacgtccacttacatgtttttttgttttttttgggttttttttttgttgttgttgttgttgtttttcgagacagggtttctctgtatagccctggctgtcctggaactcactctgtagaccaggctggccttgaactcagaaatccgcctgcctctgcctcccaagtgctgggattacaggcatctgccaccactgcctggcgtccacttacatgtttgctttaagcaaagtatcctttcatctatgtctgcttcagagaaatgttccttcatgtgtttaacccagcagaacaccatctgacacaaacaactttctaaagaaaccataaatttctacttcacagcactgcccattattatcccccacggaatgttctccctgctaatatgtacaatatacttcttacatatattatctggttccatatttagactatccttccagaaaggcagaaatcttgattgggtcctgacatgtctttttttttttttttttccttaagtgacaaggtctttgttgctcaggcaggccctgaactcccagtacctgggcttacagatgcataaagctatgcccagctctcaaatgcttaaaatgacatagggcgtgcggtaggtgctggataaagacttactagatgggtgagtaaatgaatgaggatcttaataacccagccacatcctccagggttcgcagactgtgccttcaaggaaaataacctgttaaagaatatttctgtcccctgagtatgcgcacaggcctgttgcagatgcagagcatccagcactcgggacctggggccaggttgaagctaggtttgttgaaggtgctgtgagttcaggattgccctggatcactctgtccaagagatgcctacaaccctttaccacagaagatccaccccattctaggggatccgcccacttctaaagatcctcccaccctggctgtcccgcctacatctcctgaggctccacctcaccagggaggttcctcccgcagcttgccccggaagctccgccccatcctcgaggctctgttcccgcccacttcccctgaggctccgccccactagggaggttctttcagcccatttctccggaagccttttcctgaagactccgcctcaatccgcctaccccgaggcccctcccactttccttgaggctccgcccacccaggaggcctcaccggctccttctcggaggccccgccccacccaggatgtcccgcctactcccgtgaaactccgcccccggcaccgcccgcctgtcagcgggcagctgggctaggctccgaccttgtagcggcgcagcgccggctccgagcaaagcggtgcccagagcgggctcggtgagaggcaggatcctgtgtccccgcgtcccggccacggtgtcaccctctgacgactcacctggtggcaggtaagggccgcccccagctctgcggagctcgcaacgggaattcggctgttttttgacccttctgcgacgcggtcttgtaggtaccttgcggggagagcgtttggaggagaccctggaggcctgtggcccggcatggagctggtggcgacctctgagggctgcgagcgccaggcctagcctgggccaagccttcccagctatcaagcgggcctgtgcggtcccagagggctcctcctcgcctgcctgagttaattgagatagctgcaagcgtggcggacacttccctgccctctgccccaccccctgaagatgagtggcctccatgaccctgctgcagatggcgtggggacaggtgtcaggacccccttgtttgccaccaggttccctgaggccacctggcgtcgcccgatggagtgccagtcacagcagtgggatgtggtggcccaagcaagagcgggagtcaggatggagccatgtggacccagcctgggtgtgtcatgttctctagagaaaccccctacacaaacacacacagcaacaaggcagttagggactgctgagagcagcaccgaccggcctctccagggctgggccctcggaatgacaagcctgcagagtgaggggtgaatgggagtcacttgagccacccgaggcaggacctttctctgcagatcctaattagcctgggcacgcctttcctctcctcctcctcctcctcctcctnnnnnnnnnnnnnnnnnnnnnnnnnnnnnnnnnnnnnnnncctcctcctcctcctcctcctcctcctcctcctccagcagagggtaaagtgtggggtttcccttgagctgtaagaggcatggggactgttagcctcccagggctctgggtcacagagctgggaggtacagggaccagggaagacccaagacaggtagctgttgtgattgtaatgataacaacttctctcctggctgtttctgattactcttgcttacaatggacggctgtgggtactccaagcagtaccccctccggggaagggggtgggaaagccttctcaaaaaaacccctgtgcttgggatgtagctcagtggaagagttcttacctagcaggagcaaggtcccgagttctaaccccagcaccaatataaaacacaacccagtggggcaggggtcacttgccagtcccatgccttgcctaagcatttgagccaagagaacttgccttgtcttcctggatcctactggcccctgagcaaggcctgcaccgcctctagccaccagcttgcccttgtctcttgggccattcgtatcacctgtgtgcctacagtgcgtcctccaattccacctagctgtgcgtcctcagagtccgggcatatttgggataggcatgtgcctcctgagtggcctttctgcccttggcttttagcctgacagtgtgattgtggccttcccaccatactctgcttggtacttaacgagagtaacctgccaccccaccctcgccccaggattaaaacctgccctgacctgagttggattctgatccgtggatgtttgaatagatggatggcgctgggggtggggtggagggggcagggcacctaggcactataggtgctctgcctcaaatgacccctagccaagcctctctacctcccttcccggcttcatttttttgtcacctgcaaaagtgcttcagctagtctctgatgttagcatctgatgttagcatctggagtgttcttttccagaggacatgggcacttggggctcctaggtgtgggtgggcgcctggctaacttgggctgttggggttgcaggaaggaatcctccatgactgacagtcaaagggagggaggctggatagcggttccagcctgcaggctggcttcccatttctggttgatccttctgtctcgctcctgagccttggcccccttcctagggggcccatgaacccctggtgcccaccccaggaaggcagtagtcgggtacctggcagacctagtgaagccagcacttgcttggcaggaggcctgcggtggcgctaggccaggagcttccctctcgggctccaagtggagttcacccactcacactccctgaggcgtctgcattgcagcagactgagcccaggagctgcattggcagctcggacctagcagggatggaagggctgagggagcctgcctgtctcactccttctctctgccctgaccctacttggccctggctccctttggaaaggcagatgctgactaatcaggctgtagctctgacatacactcaggtctgcctggaagtgctggagtgacagaaaaattaaaaagaaaataaaacaacccccccccccaggctctggacccttcatgccatctccgcgcctcagaccctttcttggcatgggggggtggtggggcatgtccacctggaagagactgtcatcatgtatagagccgtggagcccagactttggagctcaatctagctgtgtgacatggagcagatcatctgacctctctgtgcctcaagtgtctaaaccataaaattagaatttatttcatgaaagtctcacggtgccacgctcatgtgcccatcagaggatgcaggctcttaccagtgtcacctctgcttcttgcctgagcaacgtcaactattttccttaaaggagtacctcctgtcagtgttggttgtatccagatatagtgttgaccgctctgccagttcaccggccgtgggatgctgggtaaattcttccctaggccacattttcgccattggctatgtggcactgatgacactgcaaacctcgcagagtcatcttgaggataatcttaacacatgaaaagcaggcagtgtggggcttggcgccttccataagcacgcaatgcaggtatgcagtgcgcacaggtggaggaccctggtgctggagtccttcacacaggggcttcttttggtttgggccagtgttggctgagtgaaagagctggtgactttgtcttccggtgcctcagtttctccagatgtaaatggggacacagacaaactgacctcatgtaaaaggttagatccctcgacagttcaaagtcagtccccatggtgtggccccccagagcaacaggggaaaggtgtccctcaggactgactgtcctgtcccttagtgccttcctgtaccatagggctcagagtgttgcccgctttattgatagggcaccgacactgttgtttcctctgaggaagatcagatctgatcaggagtcagtcagtgcttgggtccgcctcagccagatcctaaacctaccctaaacaagccccacctccagccacaagatccacaccttgctcacctccctcaagctctgggctctcccaggccctgggagggggagggcgtgtgggaggggcttcagtggcttggacagcaaaagcaagaaaaaaaacaaggtccagagctaggtgtgagggcaaacctaggctggatctaagagactctggaaacttccgagcagacacaaaggtctctgggttgccatggaacccgagagtgtgaaaggtgagttgagatatagtgtttgccgttgctatcagcagcagtcagcgtgtgccaggtgtgccgggcctgatagctaggcactgaacttcactgccaccctgagcaaccggaacagtgaagactccagggccatcttttgagctctgctaatctcagcgtcacctcctcaagtggtggcaaagtcctccatgcgatccccatcgccctgcccccatttcccagtgcctgtgctctcactgtctcagggtacactcctgcctcaggcccaggccttctcttccccctgtccaaaatgctttccccagtgtgtccttgggggcgattctttcctctctgtctctgtttgtctctctgtctctctcccttcctcatatgagagagagagagagagagagagagagagagagtgtgtgtgtgtgtgtataggacattaaacccagggcctcgacttaaccctatactatctcttaaatttgtcttaaatttgacattggtactcactaagttgcccaggctggccctgagcttgccagcctcctgccttccccagtagctagaattccaggcctcgctccctcagctcttccgagtcttcttcgcatgtctcctccccttctatccccctttctcatttcacaggcttcattcttagcatcaggaccagtcctctctttctttttcttatttatttatttatttatttattatatgtaagtacactgtagctgtcttcagactctccagaagagggagtcacatctcattacggatggttgtgagccaccatgtggttgctggggtttgaactcaggacctttggaagagcagtcagtgctcttacccattgagccacctctctatcccctctcttttaagattgctttttattttatgtgtctgaatttcttgcctacctggatacctggatgtgtgtgcaccacatgcattcagtggccaagagggccacaggaggatgtcaaagcccctggaattggcattatagaatgtttagttaccatgtgggtattgggaatcaaagctgggtcctttgggagagcggctggtgcccttaaccattgagttgtttgcccagccccgggtcagccccttttgaatctccctcctgtagagggaggccatctttatagaagcagagatctttgtgctctatgctcactgtttcttgtttctctttgttgtctgctgctgccactgtgtgtgttttgataacaattatttttatttatgggtgtgtgtgtgtgtgtctgcatgagtttatgtgtagcacattgagcaggagcctgtggcgtccagagggcatcagatcccagggagggggagttatacgtgatgctgagccatctctgtagccctctgccttatgttttgagacagggtctctcactgaacgtggtgctcagcgactctggctagtcagtgaactccagatccacctgtctctgacacaccccaccctctgggactcggagtgtctggctggcttctgtggcctgcctctgctgggattaaaggcctgcgccaccacacccggcccattttcttttttttaaaaaaagtgtctttctctctctgttgcccaggctaaccccagcctcaaactcggtgcagtcctccttgcttcagcttctggaggggagtgtggggatcagaagcccgattcaccacacctgcctcaagttttgttcattgctaaatgccaaacgcaaggaacagagtcgcgcctacagcacatgtgaaataaacatcccttgcatggagaagaccctccaccatcccgggacatcactcattaccagactccctcggggtcatgcagccataggagtcccctcgccctgatgctttctttctgatgcccccacaggtgtggccctgcccagctgtcagtgatggccttgccccggtgagccaaagcctgcccctctcacccgccggccaccagccagcaggatgaggctgtggaaggcggtagtagtgacgctggccttcgtgagcacggacgtcggggtgaccacggccatctacgccttcagccacctggaccgtagcctgctggaggacatccgacactttaacatcttcgactcggtgctggacctctgggctgcctgcctgtaccgcagctgcctgctgctgggggctaccataggcgtggccaagaacagcgctctggggccaaggcgcctgcgggcttcgtggctcgtcatcaccctcgtgtgcctctttgtgggcatctatgccatggccaaactgctactcttctcagaagtgcgcaggcccatccgggacccatggttctgggcgctcttcgtgtggacctacatctcgctggctgcctccttcctgctgtgggggctgctggccactgtgcggccggacgcagaggccctggagccagggaatgagggcttccacggggagggtggggcccctgctgagcaggcatcgggagccacactacagaagctgttgtcctacacaaagcctgacgtggccttcctagtagctgcctcctttttcctcatcgtagcagctctgggtaagtggggccttgggtctgaccacactgagccttggtctccagggatgtacttgcagggtgcctagcaacctcttccctctcaaacgggtagccggtagccgttcacttaggtggtttacactgctgggagacccagaaggaatgggtatggtgtcttaccccccttgtcctctcagcatttgagagactgaggcaggaggattgttgagagtgtggtctgcttgggcaaagagaaggcctttgtctcaaaaatatagagagaggagctagagagatggctcagaggttaagaccactggctgcttttccagaggtcctgagttcaattcccagcaaccacatggtggctcacaaccatcagtaattagatccaatgccctcttctggtgtgtctgaagacagccaccgtgtactcctgcataagataaataattctctttttaaaaaatacaaagaagccaggcagtggcggcacacgcctttaatcccagtacttgggaggcagaggcaggtggatttctgagttcgaggccagcctggtctacagagtgagttccaggacagccagggctacacagaggaaccctgtctccaagaacaaaacaaaacaaaacaaaacaaagcaaagaagatgtggaaaggcaaaagtttagttaattctacccgattgcccgcattgttctggcccagggctaaccacagaaggttatatagacttctatgtgggcaggagatccagtcattccctcatctcctgtgtacacacacatatgtgttcgtgttcttgtgtgtacgcagaggtcagcgtgtgtatcatcctcaatggcccccaccttattattgagacagaatcgctctgaacctggaactcattgattgactagaggagatgtcagtcaccctcaggatcctcctatctccacctcccctgcagtgggattatagccaccacgctcagcctttgcatgctgagagccatcttcccaggcgagccctcgtcctttctttttggtgtttggcggcatagctcccaggacatcacttctcacctgtgcatactggttggattcttgtttgttttgctaatgtctcctggacatcccaacccaacattattttctttggctgcatagaattctactgtgtgtggtagcatatatctttccccatctgtctcctgttgcatgagcttgtctcatgtgactgaacagagctgaagggtgaagttcgtcttggtttgaaagttaggtgtgtggtgctataggtctgcttctctcccgaagcatgggcaggaaggtggtacaggaaggttgggactccatagctcctcccactggcagggcctggggtctcaatgagctgtgtgacctggggtaagtctatcaacctttctgaaccatacctctctcttgtggggaatggcaagcacagggcttagtacatcatggtgggtgtccaagaattcacagggaccaaccctgggggcaatgacatagtcagagtagtctcaaagaaggccagtgaacctgagctggctctaccccaatccctccctcactgcctcactgcctcacccccgaccccgagtcccctcagttcctccttttagagtctgtgtgaaccaaaaaataaaaaataaaaataaaaaaattttagccgggcatggtggcacatgcctttaatcccagcacttgggaggcagaggcaggcggatttctgagttcgaggccagcctggtctacaaagtgagttccaggacagccagagccatacagagaaaccctgtctcgaaaaaaccaaaaaataaaaaaaaataaataaataaaaatagagtctgtgtgatatgaggcagctactcagcctctgcttgttggtctctgtgtctgtaaagcaggagtacagtccccacttcgatcagctgtgttgctgtgacagagtgcccgggataacagcttgaaggggagaaaggttagcttggctggtgtaatccggttccagctatggtcgtctgagttcatggctatggaacctatagtgaactagaacatcacggccagagtgtagtggaacagggctgctcacttgatggtggccaggaagaagacagacagatgaagggctgggggaagagaaaggcacaccggccatgactgagcccagcctccaagtcccaggagggttgcgagcctccatcacacgagtttttgtggggatataaaaactaaactatagtccccgtggtattaagggacagggagtgggccaataagctaagaagataaaatgcctcagatgaatcttggcacggggagcacattagctttgagtggctgtgaagtccactcaaagccccaggtccctgcttgggtagccaccttggattcatctgactggcctttctttgcccctcagccattgtgttggtgacatttccaggtctgactcaccccgggtgctgatctctagagccagatgtcactccatgaccttgtccctatgcctgtggtggccccgtgttgctgtggcatgctcagggggacacaggtgtactacagtgcctctgagttctggcagccttcagggttacatcaggccaagggctcagtctgagtcagactctggagcactgatgcccggccagctaaggctcagtttctcaccctgcaggggcatggcgctgtgagtgctaagagagacaagcagggcaccgggagcaggtgcagagccagtgtgaggtgccatctctacagaccagactggccttgaactcacagagctggagatcctcctgcctctgcctcccgaatgctgagattaaaggtgccctgggcatcagtactgtctttcatttcattctttttacttttatttcctgagatagggtctttttatatagccccggctggcccggaaagattcctttattgttttacaatcacattttacatttatttatttatttgtgggaggggctggttgagcagatgctgtgccctgtaagtggtattcttttttttttttttttttttttttttggtttttcgagacagggtttctctgtgtagccttggctgtcctggaactcactttgtagactaggctggcctcaaactcagaaatccgcctgcctctacctcccaagtgctaggactaaaggcgtgcgccaccacacccacccggcttgtaagtggcattctgaggacaacttaaaagagtcggtcagtcagtcctctccttccaccatgtaggctctggctgtcaaacttggtggaaagagctttaccccctgagccatctcaccagctcagcattctcttctgtttgttttccatttttatgtttgtgtgcgcatgcgtgtggcacctgtgtggttgtaagtagaggccagatgctgacgttagctgccttcgatcaccctccaccttaccttttgagacaaggtctctctctgaacctgaagctcattcattcagctgggttggctggcgagtgccagtcccaggacacatgccaccatgctgagctgttcacgtgggtgccgggggtctgaactcaaacttgcacggcaagccctgtaccagtttcttagctcctggttatttgtggttttctctttcagacaggacctcaggtaaccctggctggccttgaactcctgatctccttgcctccaccccccaagtgagattataagcatgtgctatactgcacctggcttgctatttgggacagggtcttcttagatcactgaggctggccccctcaccttgaaatgctcccgcctcacctcccaagcagtgtaaagtaggattcttgcattgggtttcttggcatctcgactgtgtagaaatgtgggcaagctcagagctccagtctcctcctctgtggaaagaagtcatttccacaaatagcaagaacaaaaataccaagcccgtaagaacacagggtgacatttgggacttggaggaaataaaggaatagatgtctgtggtaaggtgtgctctaggcagctgtgcacaggtcctgaggcagaaggaacccagttgttagagaggcactgaggctagcagggctgaaagcaggatgagtgaggtgaggcgaggcagagtcctgtgttgtcctgcgtgggctgtcatgagcctttgcaacaaccttgactctgacccgagaaacctgggaatgaatgggctggattgggctgagatggccaagatatgaggtgagtcccaaggtgggaagcagcccctgagacattccaggcaagatgcgtgacttagagcagggtgggactactgaggcagcagcagaggtcagatgcaggaaacactcctgaagcctagtgtaggattcagtgtccgtgacgcctacagattactcagaagggtttaccctgtgcccccgggacacgagaccacacagcgcatcagaatcaggattccacaagattttcttccctgtgggtaaactgaggctgagcttcagctcagggataagccagctgcatctggaaaccccatctggccagagctagatggcgtcctcgagtttcctgcttctcatccagcagagggcgccatttccccacagaaggccagagtgcaagctgttgtgtatggagaacctacctgggtccagcctcaagcccagatcagcctaagcaaattgcagtgaagacaccccgaggagacagagacccgaccttgaggggctgggcttctgcattgaccattgtgtgagagtgagcattccagaatcctgggaggcaggtgtgctttggctgttctggggtacaatcaacccggcagccttggagcaggtgagggctagcgtgccacccagggccggggcttagctctatccccagtgccagaaatcagaggcagtgccagctttggtgtctggtgagggtcgcatccaagtgagcatagcagagtccttagagaagaggagctgtgcccacgccccttcagatcatcccccagggcagctgcagttctgagaagcagggcagagctttgaaggctcaacccagcttcccagtgaaacgcacctctcctgcctcccacagaggagagatcgcccacatgtgtgaacttgtgttgactctcagccatccctctcctgtgctctgtgacccactgagtcagcagggtgaaggcacaggaagcccgtagatgagaaatcaccctgccagccctagagcgccacccctcagaggggtgggaccagcatggcctggagctgtgccagcagcaaggtcttcctggttctagaaggtggaagacacacctggaagaaggaaatggcctttggcatccctcagctgctgctgctgagttttgtggcctatgtgggtggcatccagacccatgacaggtcctactgtggctttgaatgcttggcacccaggtgtcatcagtgtcacgctatgtgttctccgagagtggtgtattcattttcttctctgggttggcctgggctcccagttgagggcacagtcctcacgtcttggtgccgaagtcatggctcaggcacacgatgccgaaggtcacatggcatctatccatgtgaagcagagatgagcgctggtgctacgcttgctcacctcattttatccggtcaaggacccctgcccagggagtactgtagccctcatttatcatgtatcttcccaccacccgtctagaaactccctccagccctgcccaggggtttgtttccatgatggctaagtcgcatccaattgacagtttgaccacagcaggggcaagcaggcacttgaagaccagaccttggattgggtgagcagagacgggggctgggggcttcccactctgctgagcctgcctgtctccccccaacaggtgagaccttcctgccctactacactggccgggccattgacagcattgtgatccagaaaagcatggatcagttcaccacagccgttgtcgtcgtttgcctgctggccatcggcaggtagccacccaacccatacacaccactcctgcaggagggagggcagaagggagcagggccagcccagcactgcagcaaccgcccagactgacgtggaaccctttggttgggccacatcccagagctgtaccctcttgcctctgaagatggctccagtcccctgaagatagctttctctctccctggctggttggtgaatatgtagcccaaaggattggttttctatactgttctagaagggtctggatgccagtgttaagtcctttacccttgctgtaggacttactggggagtgaggggtctagacctggatgtcatccctacagagtggcctgtcctctgtccttggggaggaggggctgctggtgggtgatgctgcctgccggaaggacaccggctataccgtctctcatcttcaatcagctcattggccgcaggtattcggggcggtattttcaccctcgtatttgccagactgaacattcgcctccggaactgtctcttccgctcactggtgtcacaggagacaagcttctttgatgagaaccgcacaggttggtccctcctggggactttgggtgtccagggtgagctagcttcctgtggggcccctgacagcagcatggcttgccccaccagcacttcctatggtctagttccaggtggagccctgggatactaagctgactggtgacgtttttggtgtgagttggggccaccacagaaccctggccaggcctcttgagctctcggcagtgaccagggcctcctcttgtctagtgctgcctgagagggaggcctgcagaggtccagttcctgtggactgaatgatggatgggaagatctagcagggagagaaacagcatgcccgccatggtcccaagcactgggccaggccacacctgtcccacccatcccatgcagggaccatttccctcctgtagtcgtcgccccgtggctgtcgcaaggcgtcttctagtccagcattccacagtgtatgagaaacgctgctatgcgtttctctctctgagctcaggaggctgtgtctgaggtgggtgtgagggtgtttacccactctgccagtgaggcctagcagagagaagtttggaatctggctgtggtgggcacatgcgctgtcacgttggctgtccccagctgaccttcagccagtttccactcggtagacaggcaggcacctcacacaacacgttgcaaccatgtgtggtacacacccatgaccctgtgacccagggtggcctcaaacaaaacaaagaaaaaaaaaaaagacggtaccaggactagtcttccagaagtgctccccattattcccagatagcagagtgggggagaggtctgactcctattatccatctcagaagccccttagcgtcccctccgccaccccgcccccagcagctctgggcatccttgccacagagggctgagtgcctgtgttccaggggacctcatctcccgcctcacctctgataccaccatggtcagcgacctggtctcccagaacatcaacatcttcctgaggaacacggtcaaagtcacgggcgtggtggtcttcatgttcagcctctcctggcagctttccctggtcaccttcatgggcttccctatcatcatgatggtgtccaacatctacggcaagtactacaaggtaggcggagtctagcccctggcagtgccttggaggctacacaaggctgttctgaggcagtctgtgttcattcacagtcttcacttggtcactgggtgtctcctgaggacccactgtgtgcccagcactgggaagcagtgaagcaggctgccttaggtatcagccaggcatgatcacatccatcactccagtggccaaggactgccactacacgttcagacccaccttagtcagagagaagaccctggtaggaacagaggacaaggccaaagtgaagccgtaagcgtggggtggcgagcggacccgaggaaggtgggcaccctcaggactgtgtgttctgaatagaggggtacagcacaaaactctgtggtaggaatgtgcctggtgggtctgagaagccggcaggtggctgtttgggtaggtgatgggagacaggacagtggcaggtgatgagggcagagtctgaccctctggttttgagggggatggtgacgtgggccttgcctgtgatctactctgaggcagccagaagtccctctgccgttgcctgctgactggacttgctcttcgtggcctcctggagccccagagctgagctccaacacacaaatctgagccccaccacaggctcaggcacccctggggaggtgactcaagaggggagcttccagccttgctgggtgggtcattttccctagctctaggaccctcccccgtgtaaaacagctttccttcaacctccagcaaaaggccaccagccctaagccctgatcatggactctcctctagctcctcactgaggaggaacaggaaatagtcaggatggagctgctccctgcccacctcgttccttctcattggcctctacctctgcccacctcaggccccacctctaagtgggtagagccttaaaggaatttgttcagggtctgccatctttacaaagcacacataccacctgcagccagatgtgctgctaggggcccaaggggtaaaggcaccgaccactgtgcaaacctggggacctgagtccaatccccagggtccattgaaaaggctgaaggacataatcgactccgtaaagctgacccatgccaggggacgtctgcctgtgtccctaacacacacacatacacacacacatgcacacacaccagacgtgacttgggaccccacctcccaggtgcagtgggccttttctcttttctgctctctgtgaccaagtgtgacattcaggtcatagaagcagccctataggaaggacacactcgtgcctgctctggcagccattgtgtttgttactgcagagcagactgctgcaggcctgcctcccctctgaagctgcttgtgctgctgataaactctgccccttagtgctcactgtttctcatactgtgtgcagcctgagcaacagcccgggatgaccatccttacagcagcgcagggccgggtgcggacactccttttctagagctaactgtagtccaagtgtggtcagtggtctcactcaatgtcagtgggggccctgcttcactgcccccccccccccagtgctgggcactgtgagtctcctagccccccaggagctccgctgggtttgctctcttgagtctgtctcatcagttaggaggcgatggggctggggtggacagaacgggatggaggtgtgctcagagggacagtgaggccgtcctgcccatccctgtgcacagaggctctccaaggaggtccagagcgccctggccagagccagcaccacagccgaggaaaccatcagcgcgatgaagacggtgcgcagctttgccaacgaggaggaggaggccgaggtgttcctgcggaagcttcagcaggtgtacaagctcaacaggaaggaagcagcggcctacatgtcctacgtctggggcagcggggtacgtgtggtcaggcgctggggtgagtggatgggcgtccagatatggatcccatgcttgggtgacagtccaggtccccacatgtgggtgtcaagtcatcagagtctttcctggaaagaccacagggcccttccttcggaggcccctgtcccccctacaaggtggcagggtcggtaggagcatgtatcctcaggctagctagggtccaacctaggcctcagctcctccctagagaatggagaggacctggtttgttcctgtcccaacagtctgggaggtaggagctaggctggtctgggagggtgggggcaaggagatacagagtttctttggaggaattagctgtgtgtgtgtgggggggggtacaggggagccaggaggcaaggactactcgggtgccactacctgaaaatgcctgccaagcctctgtcgactcatccacagctagccactgtctgccatacacaaggacacttgtccagctgctggacttcactctggcttggggtggggaaggaatcctgggaaggttgtgggttgtctcatctctcagacacccccaccctccaaatccgtagcatgaggtccccaagatactgtccttcttcaggaaaatacttaaaggaacagaaaggcctcactagcctgctctgactggctgctgtgtggccttattggtgccccaacctctctgagccctgctctttgcaatgagaatgaacagccctgcctggcccagcagaggaacttgaaggtggcatgtgccagccagggctttacaaagaaagccttgttctgctgccaagcccacagcctgctccagctaggggcctttgtagggagctgctgggggaagggtgtgagtgacagatggggcaatggagtttccgttggtgtttagcacttctaaggctgccctccagcacccagtgagatggtttagtgggaaaagacactgtcaccaagcccggtgatctgaggtcctcccctcaagcttctctcctgtctccctggtcttgctaacagggaacagagttgggggacagagtagagggcagggcccagggctggctaaggccgggaagcttacataagccatgcccttctccttccgtgcagctcacactcctggtggtccaggtcagtattctctactacgggggccacctagtcatctcggggcagatgagcagcggcaacctcatcgccttcatcatctacgaatttgtcctgggagactgcatggaggtgaggggcagccgtgggagggcgggggtgtgaggcgagagcaggttccggattctgtggggtgggtaggtttgaaccaaacagaacgcgtggaagacggcagtaagacccatcccagaactccaatagggcacctctaggataacagtgccagagaagcaaccgctgggccggcacaaatggtgaactggtggaggaacacttacaggcacgttgcgtgtgtgctgtgagctcccactgacttcacagcaaccgtgtgccgtcttggtgttacctcagtccccaaggtggacataactatgacagcacctcaagggctgcacacgggagtcaggcaggcatcttccacccatactccgctgccacatccctcagcatgaggtgggacaaaatatttacactctcttgtttctgagagaagccacctcattgcttaaaggcactcggtgaagatggcttctgttttggtccatgtttatactgggtgtgcttgtagccacagagaatgtatacagagtacccacgaagatccatattaaagattaagttagggctgaggctggctcccttggcagagtgcttgctgagcatgtgtggctctgggcttcatccccagctcaaagaggtgctgctgtggggctccaccacagctcttgagaggtgaagcgggagggtgggcctggggcctctgcctagggtgggaggcagagcaggggactgacagctggcagcctgggcatcaagtcagagtccctaacactgcagctgggatgtctccaaggctctgtggtatccccgaagggaagggacccatgctgagcacatcatggcttgccttttgtggacttccttcccctcccccaacacctttaaccctggctgcagagactgggggatctctgagttttaggtcagcctggtcaaatggcaaagtcctgtatcaaaggatcgccttcacctacatgttgagttgtctgaaactgtccggatggacaacaattgccagcttatcacgcgccttttaatcccagctctctggaggcaggggcctgcagatctctgggagttcaaggccagcctgctttacatatggagttccaggatagccaggactatgttgtgagaccttgtctttacaaaaaacagggaacttagaacccgctgtggcagccagaggaaagacttcctgctctgccctgctccccacacatacccgctgcagggttgagtgggatccgtggtccgaccctgggccctggctcctaatgcccagacacagtggcgttacattccccatcgcccttgtttttttttttttcttcatggtcactatctgcctcagcagcaggtggcatccaggggctccctgcatcgcctcaaagctgcagctctgacccgtaacctcccctcaccccatcagtggtaggtgtcaggaaggggctgtgggtgggaccaggatgtgtgtcttccctgcagtccgtgggctccgtctacagtggcctgatgcagggagtgggggccgccgagaaggtgttcgagttcatcgaccggcagcccaccatggtgcatgacggaagcttggcccccgaccacctcgagggcagggtggactttgagaatgtgaccttcacctaccgcactcggccccacacacaggtcctacaggtaagaacagctcaaggtctgccagaaccatcccacatcttggttgtgaggccagaagcaagagaggcaagggcgccactgagaggccgcccattaactctccagtaagagctgctggagagggctggtgtgtcacacgcagagtgcctgcctagtgggaaccaggcccggcttccaaccccagtaccaaaagggttgtgtgtgatggctgggggtacggggcttctttagtgacttgacaagaagccagattggtggactaaagctgtgcggacattggtgtgaatggaaccctcaatttgcatgccacgcccttccagaagcactggcaaagtcatggatccggcttctgtagggggagaggcaggaacacggtgcagagcctctcagagggaggtgacctttaatcagggagcaggagctgaccaggtggctctctacagaaaacagtcagacgaaggcgactgtaaatataaagccagagtcaccaagccagtcctgtttgctcagggtttgtcatcccagcgactgatatggcccagggcaggagggccacaagttcaagccccaccccaggactgcacagcaatgagtgccaggccagtcagtgaaaagagagctgagctatctttccaacattttgggagtctacagcaggaggattagcactatttaaaggctggatagtaagttctagccggccctgggtcccagtataggggaagtagctcagtggttgagcttttggctagcatgcacatgttgctgggttcaattccccagtaccacagaagaagcacatatgttcaaagtgccccagtcctggtatcttaggaagactgttcagaggccagcagcaccgcacagggcagacaggaggctgtcctcctgcctctgagactggaacatcttgtgtccctgcagaatgtctccttcagcctgtcccccggcaaggtgacagctctggtggggccgtcgggcagcgggaagagctcgtgtgtgaacatcctggagaacttctaccctctgcagggcggccgtgtattgttggatggcaagcccattggcgcctatgaccacaagtacctgcatcgtgtggtgagtgccacatgcctattggtccccacacccttccctttcttataagccatgacacggatggaaagaagggtgtagttctgtcactgatgtgacaccccccacccccatgcagaaggttgtggcactccacaagccaccacgtgccccctctcctctcctagaggtaaatccccgccccaccagtgtgacaacctttccttgatttgcatgaatttgaccacccggacttactcagatctcacgactgcttcctccagcctgagcttgctccaggcagatctgaggtgcacaaggtccctcctgttcccgcaggcgcagacggagctgaagtgcagggcacacacaggcctcgcttccttcttctgtaacgttttcatcagcagactcgcactccacaataattcttactgtggcagggattgcgtatggaatgtcttggcgatactcacccttgttactctctcttgctcctgcttctacttaaatgtatgtccttctaaaataacacacacagatacacacacacacacacacacatacacacacaaaagatgatttttttctttaaaagaaagaaaaagttgatccagtgctgactgacacacaagcagaggggcctgtacaggtgttcagtctgtgtactagacacaccatctatccaggcaggagagcccttcactgctggtgtgtgtatgtgtgtgtgtgagtgtggggggggccatgtaagcaaacatacacatctagcgaatgagcacgtgtgcattatcagagcgggatctctggtccttccgtgttagatgagcaatctaccactgagctagcagagctctagtctccatgtgacaggacccacatgctggaaagtccccctgcattgagcatatgtaagcagagatggttagcagagaagggtatgtgacacactgggctgcaggaagagccctgggcagctgcaaacgtgagcgcttagattcccagactgccaagtgtcagcgtgaggaagtggcttcctgcaggctttctcacttcctggcggtgaaagacatgaggccccacttatctgcttattaatcatccagggttcctccggcgaatactgtctccttgactttttttaaattattgcaagcacaagacagtcaagtaccacactgtagccttgagttagtgattttctcatactgtagtgttttttttcctttttcattcattcattcattcattcattcattcatttattcattcattctctctctctctctctctctttctctctctctctctctgtgtgtgtgtgtgtgtgtgtgtgtgtgtgtgtgtttacacgtgtggcatgcatgtttgtaggtatgtgttgagaggcctgaagtcagcccagatcacttccacctcatagtttgaggcagaacttctctgtgaaagccatcatagctgtgaccctctcaccagccagctctaggaaccctgcctttgttctctgaagctggagttagaggcaggcctccatgcctgcccagcaccagggtgcgcttggtgagctgaactctgtccctccgatttgttcagcaagtgctttaaccccagggctgctgtagaggctggacacttaaccacagctctcgggagaggctcacacaggagggttgtcaggatttcaaggcagcctgagctacatactgagttcttggcgagtttggatgacagagtaagaccttgtctcaaaaaaatggggtagggagctgggcagtggtggtgcacgcctttaatcccagcacttgggaggcagaggcaggcagatttctgagttcgaggccatcctggtctacaaagtgagttccaggacagccagggctgtacagagaaaccctgtctcaaaaaacaaaaacaaacaaacaaaaaatggggtagggattagatagaataagggcaactgtccgggaggcctgttgtcatgcaccctggcaaagtcacaaagctacattccatctccctgctctgtgctcaggggaatcttggcttagctcagagcaacaggattgctggctctggattatcattctctgaggcctgaggtctaggatcatctgtgtacccagggcccctgctaggaaggaagagacacagctgagctcagccagccgtgcagatcagatttcagacctgagactcctggcgtcggccaggcgggacttgggagactctgtgacagctggagggttctttgacagactctctaagtcaccttattccccgattcccacttcaacagatctcactggtgagccaggagcccgtgctgttcgcccgctccatcacagacaacatctcctacggcctgcctaccgtgcccttcgagatggtggtggaggctgcacagaaggccaatgcccatggcttcatcatggaactgcaggacgggtacagcacaggtaccaggaggcgactctgagttaggaactggagcgatgcacccaggccctgtcataccatttccttcccattgacatgaaagccccatcacaggaacagctgtgaggtagcctcagggcacaacctcctcctccatcagttttgaacacttggtaaagatcgtgtacaccaccaggcatgatggtacatacgttttcaagttcgaggccagcatggtctacagagtgagttccaagccagccagggctacacagtgagaccctgtctcaaaaaaaaaaaaaaaaaagcgaaaacaaacaaacatggactggacggcttaggggcactgctgctcttccagaggaccatggttcgatcccagcacccacatggtggcccccagctatctgcgactcatgtcccagggaagacagtacttctggcctctaaaggcaccaggcatgtggtgcacaggcatacatgcaggcaaagcaccaacacgtaaaatcatctttttaaaaagatttatttattttatgtatatgagtacacggtagctgtcatcagatacaccagaagagggcatcagatcccattacagatggttgtgagtcaaaatgtggttgttaggatttgaactcaggacctctggaagagcagacagtgctcttaaccactgagccatctctccagctccataaaatcatttttttttaaacaagtaatgtttacctgcacatggtggtgtggggagattgcttcaagttcaaagctagccaagagctcttgaggagactctgcctcaacaaatttgtgtgtgtgtgtgtgtaaaatattaatcacgtgggccacttaaaggcttctttagtgtgaggacagctttggagagtcagctctgtccttccacccagggccgggattgaacttagcgtggctgctgcagaaagtgcctttcccgctaagacatcttccagccctttcttgggatatttttcagacgtagtcttactgtgtaggccaggctggcctggagcccgcatcaccagtttccaagatcagagcactcaaatcacaaacgtgcaccacgaccctggtcttttactggaattccgttacgtaaaaatactgtctttttattctgccttttaatggaaaaagctcagctctttaatttggcgcctggcctttgtccttagcacaccttagtgacctgtcatattggtgcaaggacctgacctgcctcctctttacctgcataagtgtgtaggcttttacagtgactctgtttcctaccgacagacatttgagtcgttcttattaacatctgtcttgtaatgacgctgctgtaatcacacccaccaccacctctggtcctctgtgggagagagctgacggaggacattccctgacaggcttgctgacagagggccgtgcatcctgatggtcacactctgtcattgccgtcagtgtcagggcagagcatcacagtggagttgcccagcccggggaagcaggagctggtcctcggcaggcagccttgcaccagtctgcagtgcactgtgacgggttcggccatctgcctggtgcccgtgggggatgagccgcagtgtgccacccctctgcatggagggctaatctgggcgtctcttcctgagctgccctctgtgggtggtcacagctggagaccctcagaaatgtctgccgagctggtgcccaggtgaacaggagaggcctcctaagagctcaccctgcgtctcctccacacagagaccggggagaagggagcccagctgtcaggtgggcagaagcagcgggtggccatggcccgagcacttgtgcggaacccacctgtgcttatcctggacgaagccaccagtgccctggatgccgagagcgaatacctggtgagtgggggcagcagatgccggggcaggggggggnnnnnnnnnnnnnnnnnnnncaggctgagcagtggccacaggttctctcaggccatggaagggaaacagggagttctaggcaaggacacccagctccaagcagagctacagctgagtgacatgggtaaagcagggtgccagaccagaggatctgatggggtgccccaccctgcaatgctcctgtttcctccctcctctctccctcctctctctactctctttgcttttgtttttcagtcctaactcaaccccaggccttgtacaaatgccgcaccctgcaactacagcagggctctaagctactctttccccagtggtaaagtggatagtattggggcagaaacatagttgtcgcctcaaggagacaacacatagtttattctggagccaaattagagtgactgtgtgcaggaacagactcaggttaccccagttccatgatcaacgtggaagcagtttccagtgtcatgaagttttcatagtaacagaacaacaaaagtcacagcgagacacttttcaaatacattgatgggggtgtcagggaggttacagcaaagctgggagctctgtcacaggcttcatttgcagtctgatgacactcttagctttggttaatgaaaactagggtctgctaacttgacccactccagtgggttttattaaacacagcttgctgaatctacacagtggacaagactgacctcagacagttgaaattcctgagctattgccatatctctaatcagacacacacacacacacacacacacacacacacacacacacacacacacacacggtttccagaaatcctcatcacagttccttatgggctaagcatgacattttgtgcatagattttatcaaatactatttatcaaattttaaaatgttcctcacttggttaccccctcctccgtctggtaatacttacatgcggccacaggacagtcatgcagcaggactgctgtggagtaagcaggcagtggcagcgcacacctttgaacccagcacttgggaggcagaggcaggcggagctctgagtctgagacaaaaagagcaagaattctatcggttaaatcagtgagttaacaaggaaggagaaagcatgcggattaacaaagtttacctattgtttaaagagccagatcggccacgtcccctgtgtttacgtgactggtactctctggactgtcttcctagatggatgtaccttttaattttagcgttccttttagccagctcaatggcatagctgtaagctcccagggagtagctgaccagggctccaggtagactatcacaccgtggctcttgcctgtggacgctacttatctgctttatcgtattggcatcgtcccaggcctactgtggaaatgtagatggaaaaccacagcatagaagaaactagcggagactccagaccccctgacctcctcagcacatgctgactgtagcagcaatgggagcgaggctcaggcctgttgggactcggggtgtcagagcctttgcagatctgatgggtctgtgtactttaatggcagaaatggaagtggggaatctgacagggaatcactgcttctcatcagcaaaatacaagcactgtttaagttagtccctgctgaattgtactgtgggacagtgtagatgctgacttaaccaagaaacattagcacttaatgggtaaacttcttgaatgttgctggtcttagagactagcttgtgtgcattgtataagagttaacccaaggctttgggcgtctctggctggagtgagtggggttcaaggttcaaggcatagctgagcttgtgatagggccatttacagtgtttaagttattgtttctattgatttagttggctcgactttgtttttgagacaggttgctctggctgaccgcaaattcacccccaaccccaggattaaaagctgtgcaccaccacaaccagctatatttttttcttaataagaaaatgtttatttaatttggctgtaagaatcttgatttaaaatattgataccctctaaatggaggggtttttaaaaacaaattttttctagatttatttattatgtgtccagcgtactgcctgtgtgtatgcctgcaagccaggagacagcaccagatctcattatagatggttaggaatcaggctggtgttcttccagaggacctgggtttgactcccagcaccgatgtggtggctcacgacctctgcaactccagttccaagagaatctggtcaggcgttctcttctgttctctgtgggcatggcacacacgctgcacagacattttatatatatatatacacatacacacacacatatagatatatacacacacatatatatacatatagatagatagatatagatatatacacatatatatatatagatatagatnnnnnnnnnnnnnnnnnnnnnnnnnnnnnnnnnnnnnnnnnnnnnnnnnnnnnnnnnnnnnnnnnnnnnnnnnnnnnnnnnnnnnnnnnnnnnnnnnnnnnnnnnnnnnnnnnnnnnnnnnnnnnnnnnnnnnnnnnnnnnnnnnnnnnnnnnnnnnnnnnnnnnnnnnnnnnnnnnnnnnnnnnnnnnnnnnnnnnnnnnnnnnnnnnnnnnnnnnnnnnnnnnnnnnnnnnnnnnnnnnnnnnnnnnnnnnnnnnnnnnnnnnnnnnnnnnnnnnnnnnnnnnnnnnnnnnnnnnnnnnnnnnnnnnnnnnnnnnnnnnnnnnnnnnnnnnnnnnnnnnnnnnnnnnnnnnnnnnnnnnnnnnnnnnnnnnnnnnnnnnnnnnnnnnnnnnnnnnnnnnnnnnnnnnnnnnnnnnnnnnnnnnnnnnnnnnnnnnnnnnnnnnnnnnnnnnnnnnnnnnnnnnnnnnnnnnnnnnnnnnnnnnnnnnnnnnnnnnnnnnnnnnnnnnnnnnnnnnnnnnnnnnnnnnnnnnnnnnnnnnnnnnnnnnnnnnnnnnnnnnnnnnnnnnnnnnnnnnnnnnnnnnnnnnnnnnnnnnnnnnnnnnnnnnnnnnnnnnnnnnnnnnnnnnnnnnnnnnnnnnnnnnnnnnnnnnnnnnnnnnnnnnnnnnnnnnnnnnnnnnnnnnnnnnnnnnnnnnnnnnnnnnnnnnnnnnnnnnnnnnnnnnnnnnnnnnnnnnnnnnnnnnnnnnnnnnnnnnnnnnnnnnnnnnnnnnnnnnnnnnnnnnnnnnnnnnnnnnnnnnnnnnnnnnnnnnnnnnnnnnnnnnnnnnnnnnnnnnnnnnnnnnnnnnnnnnnnnnnnnnnnnnnnnnnnnnnnnnnnnnnnnnnnnnnnnnnnnnnnnnnnnnnnnnnnnnnnnnnnnnnnnnnnnnnnnnnnnnnnnnnnnnnnnnnnnnnnnnnnnnnnnnnnnnnnnnnnnnnnnnnnnnnnnnnnnnnnnnnnnnnnnnnnnnnnnnnnnnnnnnnnnnnnnnnnnnnnnnnnnnnnnnnnnnnnnnnnnnnnnnnnnnnnnnnnnnnnnnnnnnnnnnnnnnnnnnnnnnnnnnnnnnnnnnnnnnnnnnnnnnnnnnnnnnnnnnnnnnnnnnnnnnnnnnnnnnnnnnnnnnnnnnnnnnnnnnnnnnnnnnnnnnnnnnnnnnnnnnnnnnnnnnnnnnnnnnnnnnnnnnnnnnnnnnnnnnnnnnnnnnnnnnnnnnnnnnnnnnnnnnnnnnnnnnnnnnnnnnnnnnnnnnnnnnnnnnnnnnnnnnnnnnnnnnnnnnnnnnnnnnnnnnnnnnnnnnnnnnnnnnnnnnnnnnnnnnnnnnnnnnnnnnnnnnnnnnnnnnnnnnnnnnnnnnnnnnnnnnnnnnnnnnnnnnnnnnnnnnnnnnnnnnnnnnnnnnnnnnnnnnnnnnnnnnnnnnnnnnnnnnnnnnnnnnnnnnnnnnnnnnnnnnnnnnnnnnnnnnnnnnnnnnnnnnnnnnnnnnnnnnnnnnnnnnnnnnnnnnnnnnnnnnnnnnnnnnnnnnnnnnnnnnnnnnnnnnnnnnnnnnnnnnnnnnnnnnnnnnnnnnnnnnnnnnnnnnnnnnnnnnnnnnnnnnnnnnnnnnnnnnnnnnnnnnnnnnnnnnnnnnnnnnnnnnnnnnnnnnnnnnnnnnnnnnnnnnnnnnnnnnnnnnnnnnnnnnnnnnnnnnnnnnnnnnnnnnnnnnnnnnnnnnnnnnnnnnnnnnnnnnnnnnnnnnnnnnnnnnnnnnnnnnnnnnnnnnnnnnnnnnnnnnnnnnnnnnnnnnnnnnnnnnnnnnnnnnnnnnnnnnnnnnnnnnnnnnnnnnnnnnnnnnnnnnnnnnnnnnnnnnnnnnnnnnnnnnnnnnnnnnnnnnnnnnnnnnnnnnnnnnnnnnnnnnnnnnnnnnnnnnnnnnnnnnnnnnnnnnnnnnnnnnnnnnnnnnnnnnnnnnnnnnnnnnnnnnnnnnnnnnnnnnnnnnnnnnnnnnnnnnnnnnnnnnnnnnnnnnnnnnnnnnnnnnnnnnnnnnnnnnnnnnnnnnnnnnnnnnnnnnnnnnnnnnnnnnnnnnnnnnnnnnnnnnnnnnnnnnnnnnnnnnnnnnnnnnnnnnnnnnnnnnnnnnnnnnnnnnnnnnnnnnnnnnnnnnnnnnnnnnnnnnnnnnnnnnnnnnnnnnnnnnnnnnnnnnnnnnnnnnnnnnnnnnnnnnnnnnnnnnnnnnnnnnnnnnnnnnnnnnnnnnnnnnnnnnnnnnnnnnnnnnnnnnnnnnnnnnnnnnnnnnnnnnnnnnnnnnnnnnnnnnnnnnnnnnnnnnnnnnnnnnnnnnnnnnnnnnnnnnnnnnnnnnnnnnnnnnnnnnnnnnnnnnnnnnnnnnnnnnnnnnnnnnnnnnnnnnnnnnnnnnnnnnnnnnnnnnnnnnnnnnnnnnnnnnnnnnnnnnnnnnnnnnnnnnnnnnnnnnnnnnnnnnnnnnnnnnnnnnnnnnnnnnnnnnnnnnnnnnnnnnnnnnnnnnnnnnnnnnnnnnnnnnnnnnnnnnnnnnnnnnnnnnnnnnnnnnnnnnnnnnnnnnnnnnnnnnnnnnnnnnnnnnnnnnnnnnnnnnnnnnnnnnnnnnnnnnnnnnnnnnnnnnnnnnnnnnnnnnnnnnnnnnnnnnnnnnnnnnnnnnnnnttcttttttttttttttttttttttttttttttgggttttcaagacagggtttctctgtgtagccctggctgtcctggaactcactttgtagaccaggctggcctcaaactcagaaatcctcctgcttctgcctcccaagtgctgggattacaggcatatgctagcttttcttaatataggccatgatattttcctttaattagagaattctgctctgttagataaagagatgagtggggattggtctcaggattcacccttggttcccttagaacctcaatatttgaaaacaattactcaacttattaattttatttttatgtgcgagttttttcttcatgtatatatgtgtaccatgcacttgcctggtgcccaccgagatcagaagagggcatcggatccccctggaactgaagtcacagatgcttgtcagccaccatgtgggcgccgggaatcaaactttgcccctctgcaaatgttcttccccactaagccgtctctccagcccctatcattgacttaactcacattcaatgttactaatttctgtaagctaccgcttttataatttcttttccattctcacatgagaaagcaggctgcccattcatgattcttttatggcatgaaaaacatcccagtttccgaatgttaaacgttccccattgagggaaccataaagccagtgaatgtggttccatcttccacatgttcaaatactttcaagtttgaagtctgtaaatcatcacatagacctgactggccccgacccaccacacacagggcttatcccccaacaaatctttttaaaaagctttttctcatttttttctttcctttgaaaaactgcacgagccagaggtggtggtgcaagccttaatcccagcacatagaaggcagaggcaggcagacctcttgagtttaagaccctgggtggtcaaatatgtcttcccagctgggccagtcatgttccttatgacccagagatggagcgaatctgccccctgggtgggcgatcaagtgcctcttacttttattaccaggctccaggaaagtcctcagcttaaggcagcaaggctgtaagaagcagaagccgggaacaggattgtttgaggaaagtcaggagacaacgtcaaatagcagcaaaccaaagtattctaaaggcaaagaaagccaaagaggtagccaagtgcccacagacatctaggagcagggaactgcctgcctgcaaaggctggctgactcctctgatgaaagtggatgatgggtcttggagcccataccgggtactgtcagcacatatatcaccgaagagggagagagctgatgctggagcccatagactccaggcacacggacttaggttatcccaaatcccatgttccaacatggaagcagtaacagaacagattggaaacagagaggcaggttatagccaagaggggaagtctcagcttctctgtcggtcacggtgttaggtcagactgagaatgggctaagaatgacgacttagggggctaaagctagcccaatttaagtcgtaatgagacgcagcaaccttgcagtctcttcacatgactgcagttctattagaactgtctgtgagcgctattagtccgccagcctttgcagacacagcctgtttcctgaaatcctcactcagtgcacatgtccttgatgctggctagtgccacatccctccaagggtcgatctctctcacacagatggtgactgacctgttcccaggccccaggtaccactctagacactggagtcttaggaaaaggctgaccagacaaacaagacctctgcccgcatggcatttctactctcatgggacagacaggtcacaaacaaggaaacagcctgagggttctgtgctacagagaaaaactgtcagtcatccaataccaggaatgggatgggcggccactgtccagcataagcacatctggccatcagtgagtgctgggagggagacacggctgagcattattttcctggtgcagaggttacaggcatttaaagggacagcacggggcgaggaatggcagagtgtcagtgcgggccacagcgtggccctgtgttcaacagaagagatagaagctgactgcaaagaatggtgacgtgactctctctatagtcatgttcaagaataatgctctcaggcccttgaggacatctgtggttataggaggtatatgtatgtcacaagagtcacagaagggcacctgtgcctccgagcccttgttagtaaatgctagggaagaaggccggtgccagggcaggtactgactccgataggacatgtggacatccatgctgagcatctcaggaaggcatccaaggatccctgagcatctgggagtctctactgcacaggagtgttgtcttgggggctgtatggagtcgctagatactctatggcactcactgtgaggaccaggctgtaagtcaccacttagctaagtcctggacacacaggagccagctgtggggagttctggggctgggtaacagagtagaggcagagagaaggccagaagcaaggaagaggcagatgcctcaggctccggcaggcattttggactttttgtaacaagtcacttggttttatttttccagactttttaagtgtaaagaaaacaatgcagaaagttcatagttcccagctctcctttcccccatcctgtcctctgccatgcacagtgcatctgtgtgctctgtctgctgcagtccttcctttactaatgactataaaggccttgttcttggggtgtagttctatggactctgagaagcaggacagcacagtgcgctcgagcgcgcgcgcacacccacccacacacacacacacaggtcacactatgtgagaaactactacaagtttgcatcaaatcccaaagcaaggtgagaagccagtggaagcaagaactgaccaaaacagtaaggagcctggagaggcggtgcacacccgccttggagcacacccaccaccccagcccacccggaggcaggaggagcaaggtcactctccaccccctgaggtttgaggcagaccctgtcttaaaaaccagtgcaggtcagtgagtggctcagcaggtaaaggtacgcgatctgaaacttgccaagtttagtgccaggatgccacctggtaggaggcaaccagttcccacaggttgtcctctgacctctacatgtcaacacatgttcagtgtcacgtgcacacagaccaaatgtgtgtacatatgcacacatacacaggtgtatacacacacacacatgtgcaaggacgagtaatttttaagggaaatgagtggattgctttttttgtcctgggcattgaggctgaagggataaaagatgtctagttcctcaggtacccccctatgttagcacctgggctgtctggaatagaaactcaggacttgagctgccttggtccttattttacaacccaagaactgaatgtcagctggcagcagcagggtaggtgacagcagggcggtggattttctgggggatggtgctgatgctgcgcagccgctgcgcctgctcacctttgctccctgttccctgcagattcagcaggccatccacggcaacctgcagagacacacggtgctcatcattgcacaccggctgagcaccgtggagcgggcacacctcatcgtggtgctggacaagggccgggtggtacagcagggcacacaccagcagctgttggcacagggcggcctctatgccaagctggtgcagcgtcagatgttggggctcgagcaccccttggactacacagccagccacaaggagccacccagcaacactgaacacaaggcctgacagtggcccccaggctgaagcactggaggcgacctgccaagtcccactcctgcttcctgcatcttgcctccttccacttgctccccaggcacccgccagctgccatgggcttacccccttctactgtgtccttcttggctcctccaggcctgccaaggtagagcagcctttttaaaccaagctaccagggtttttactgctcagttcaacgcactccagtcaactctgagatttcaaaaagaacctttttgggactggcagtgagcaagctcactaagatgtttccaagacttctgagccaagagtgcaggaccctttctgactgcctggaggatgtctgggagagaactaagcaccaccctttgcctctcgggagaagcagcctccctgtcccctagggggacacaagggttggcctttccatccttccagtctcccggctctgtgagtcaggccagaggtggggcaagagagtgggaggtggcccactgcccatcacccccctgccactcaaagccagtctcactgtgaaccactgggacctcagcagaggaggggctggccgggcctggtgggcctcggggtgccctcagccccgcacccagcacttgaacccttcaccctctcccctggctggcaccttccctcctgtccacccctgcaactctgcggaggaacctgtcgtttgtaagatgtattctcagattggtggagggggaccaaggcaatgcccagggtctggctttgtcctggtttcaagattttgggagaactgggtcaataaagtgtactacctctgacctctacccggtcatgttttccttggatctggttctcctctgggccttgcacagtacagacagctgtgtaggcggttcagtgctgtcttgaagtccctgtctgtgttgttcacatccctaggaattgagcagatgtgtgtgtgtgtaaactgtctccacataccagggactcctgagttcccatggcagctaaggaccatctgatagcatctgcttttgtcccccacactcccacccagtttgaggtagagaacactgttactaagagtcttgatccagttattttctcttgtcagttaaaagaattaaaaggcagggcctatttaccccaaatttgtgggcctccctttgtgcagcagaccaaccctgagttaggggagggagaccaccttgaactcgtcaggatggtccacagccccaccggcaggagagaaagcctgaccttttgtctcagttgaggcatctgctcctggccctctccccatctgctccatttctaggtcctcagtactactcagcactatggcaagggaggtctgggcctaggcagggcctgtgggtaactcagtttgggcattttgttttgtttttttttttgtttctcaagacagagtttctctatctagtcctggctgtcctggaacttgctttatagaccagggtgacctcgaactcagagatcctcctgcgtctgcctcctgagtgctgggattaaaggtgtgtgccgccaccacctgcctcagcttgggctttgagccagggtctctttctggtgagctgaccatgaacttgtgacatctggggtcccgggtggatattatgcccactaggctaatctgatggaggcaatgcttcactgagattcccctcttaccaggtgtgtctaggtttgtgtcaagttgatgaaccctaaccagcacaggtgtcatagatcttgctttgcctttggttgtctgtggcgactccagtgtgtaaatacgtctttaatgttgtaaggacccaacaagatacactggtgagccaaactggtccagaagaagctgagatggccgaggtgtgcttccgtgtcacagaatgggcctcggtttccccaactgtaaaagggaatgcatttcaagaacttcctgcctctctgctcttccctcggtgggggctctggggtgagcacaggtcgtttgtttcctcttgttgaaaaaaatgaccctactctgaagaaatgtacactctcatagtttgggagaccacaaatctaaagcagggtgtcatggggccctagaggaaaatcttatgtgccccttccgaattttggtgactcctgttgttctttggctgatggtcccagcctccagcctctacctctgccatcaccagctttcctctgcccttagctcaggcctccctctgactttagcagaacccgacagtacactgaagtggcccagggatttcagagccagcttcccttgagagccttgacttagtatgtctgcacagacctttccttcaactagggtccactcacaggttccaggaatttggcatggatatcttttgggggtatccattcagctccccacaaagggacacctgcaacctggctcacgttaaccttggcactcagctggtttgtagaatggaggactaaaagtttgtagtcttcagatgtttccagattaagttggaaataccaactgtagagtggaaaccagctgcttctgcttctctgtccattccccctccccaccccccgccaacccctcccatggaagacaatgtattagagttgaaaaaaaaaaccctagggcagacaagttgtagatctcaaagccgctgggagaaggataatggagaagataaagtcaacattttggagagcagccacttcagaaaaagagttaaggaaacccagagtaccaggaaaagcatgccttgcttggctctggctagccttgaggaagaggctgacaaaaatgaggaagccccccacacacacacacacccagcagaacttcctcctgaggacactggtcactgctttgccacaggctgactccggctgtctccgtgagcagagagatctacagcctcagtgatgggctttccagctcttccaagtccctgcagcttccagatcacagcgtaagcagctgccacagggccctggggtgggcaggcacctccgagcctctcccaacaccagtctccttgtccctctcaggctatggacccgggactcttccctctctttgggcagctccagcacctcagtttataagcccaagcctataagtgaggcctttgcctgtggaagaacctcctggagactgagccagtgccacttttagaggctagcaatgaatttagaaataagtgttattttggacagagttaacgcttacaaaaaatccttaacagccttcacggtccctcacacaaacacctcatgtcacaggttcacctatccccgtgggaccaacacatactcagtcactaaaatgccaagcgtttgggggctgtatcaactttcccacccatggctttctgtttcgcaggttcaaacctgcgtgctaagatgcattcggtgatgtttctcagttgcagtaaatgacacactgtataagactcatcacagcgatgcccggtgtcaccaaggtctaattccaggacactttcaccgcccagaagaaaactctgtgcccatgaaccccacatcctctcctctcccagctcctgctgccactaatctacttgttctcaaactacaggatgtggacatttcgcacaaatcatctaaaaagggtctctgtgtggctgacttctcgctcagcatcatgttcccaatgtccctccatattgtagcatgtgtcagaactttattcctttttatggctgaataatagtccattgtatggagagaccacactctgtgtgtctattcatccacggacggacatctggttgtggctgccctttgactattgtgaggagtgctgccgtggacatctgtggatttgtatggatgtcggtgtgcagttctcttgggttggtgggggtcacaggacgactctctctatcctttttttttttttttttttttttgggttttcaagacagggtttctctgtgtagccctggctatcctggaactcactctgtagaccaggctggcttcgaacttagaaatccacctgcctctgcctcccaagtgctgggactaaaggcatgcgccaccacgcccagcttgtttttgttttttgttttgggtttttttttttttttttttttgagacagggttttactatgtatccctggctatcctgtaactcactctgtagaccagacaggcctctcctgagttctgacattaaaggcacacacaaatacacccagctctagagacagaatcttactctgtagcccagggtggctttgaactcatagaccctcctcctgcctcagccctaagagtgctagaattatcaaaggtgtaagccactacacttgcttgcttgcttatttatttatttatttagagtaaaggtaaagatgcttgctgccaaaccttatgagttgaatttgatacccacagtccacgtagactgggagaatcaactcctgcgaactgtcttctgatccttatgtggatgccacaggtgcacacgatgtaaagagactttaggggctggagagatgatgagtcagcactggctgctcttccagaagacctaggtttgaatcccagcttgtacactgtggcttaaaaacatctccagtctcaggggagccaatgcctcttctgatctctgacagcactgcgtccatgtggtgcacagactaaccttcagacaaagcattcatacacataggctcaggctgggcacaggtactcaggtcagaccggtcaggttattccatgtgtagggctgggaaggcagagagaaggctggcttttgtccagaggctactgagtcaagtttgaggatgtggggtggaatccgcacactggatcaccaactctgctagacccctgagacaccctgagttaaagctcaggctggcccccatagccttgtgggccggggtcaggacaacaaaatgacggttaaaataacacaggatgagacactaggtaaattcaattcactagttctctggctgaatgaaccacagtactgcagtgaaagatggtttaagactttaaaaactagctgggcgttgtggcgcacgcctttaatcccagcactcgggaggcagaggcaagtggatttctgagttcgaggccagcctggtctacagagtgagttccaggacagccagggctacacagagaaaccctgtctcgaaaaaccaaaaaaaaaaaaaaaaaaaaaaaaaaaataataataaaataaataaataaaactttaaaaactgcccaagctacacagaaaccctgactcaaaaaaccaaaaaatgtttttgaaaattggtttgattttgtttcaaagacagggtcttcctatgtagcctcagactcacaatcctcctgcctcaggctccagaatgttgggattcaggccttccttcccctgcctgtggatgtttgtatctacaaagaccgggaacctgttatgtgtctatcagcgtggggttggaaacctgcaggtcaggagagagcaggcattatcttcctcagtgggaatgttcaccaactgagacctcactccctggttattcattaagccagacatttgaatttgaaagaaaggcttgggacaggacagtgtggtagaatattatctgaggagatgctgtgatgtgcacgtgtcccccatggatgtctgagaaatttgatccccaaccccacaggcacagaggccatcgagggctcatgaataggttgactgtcttcacaggagtctgctgtcaaagcaactctagctttctgtgctctcaccacatggccctgtctaccaagcaggaggccatcgcctcagcctctgaaaccacgacacataaatccatttctgttcgtgataaagtaacttggtctgtaccaagtgtggcaatacatgcttaaaatcacatcacttaggaggcagagatgggggtggggggtagggggtgggggtggggtcaatagttcaaggtcatttacggctaaactgtgaatttgaggccagcatgggctgaatgagatcctatcccaaataccaaacaacagtagccgacaagtgtacacatttgcggtgggatctgtctcggaagtttggggacagagcatgaaggtgatgcacaatcatttagttatttcattaagaattacaataagggactggatagatggttctctggttaagagcacatattgctcttgcagaggacctgagattcccagcacctatattgtatggcttataggcttacaaccactgataactccagctccaagggatctgatgccctcttctggcctccaaaggcactgcactcatgtgcacatacccacacagagagatacagataatttaaaaggagtgggctggacaggtggattagcatttaggagtgctagctgatcttgcagaggacccaggtttggttcagttcacagtcatctgtaactcaagttcttaaggatctggtacccaattctggcatgcgtgtgggtaatacatgcatacatgcaaaacactcagatacataaaataaaagtaaatacatctttttttaagttaaaaaaaagggggggagagtggctggagagatggcttatcagttaagagcactgactgttcttccaaaagtcctgagttcaaatcccaatagccacatggtggctcacaaccatccataatgagatctgacgctctcttctggagtatctgaagacagctacggtgtactcacatataataaataaataaatctttagaaaataataataataataaggggtagccagatggctcagtggataaaggccagcccctgacagcgcttaaagacctaagtttgtctccaggtccttgtgcatggtgaaggaaataaagaactcctgcaagttgtcctctgacctctacacagcgctgtcacacacacacacacacacacacacacacacacacacacatccaacccctggcatgcagaggtaggaggatctcagtgggccagcctgagctacatagcctgaccgcgaagaaaccatgctcagctgttgtcctgggtattgacacacacgtctgccatcatgttctatgaatggttttgaatatccaaatgattcctgcacgtggaggatagaaagctgagaacctgcgccaacccccgccttgatgacttgttctgggaagactttctgggaggatggaacccagctccaccggctctgctgactgaacagtgacgttactgagcccagaggagcagggctatcccatggggaagcttcagtccaccctgccatcaccctggggaggcccagcttcctctagagcactggttctcagccttcctaatgctgtggccctttaatacatgctgtggtgcctccatctataaaattattttcattgctatttcataactataattttgttactgttacaaatcgtaatatagagatctgatatgatgccgggcagtggtggcgcatgcctttaatcccagcacttgggaggcagaggcaggcagatttctgagtttgaggccagcctggtctacaaagtgagttccaggacagccagggctacacagggaaaccctgtcttgaaaaaaaaaaccaaaaaacaaaaaacccaaaacaaacaaacaaaaaacaaaaaaagaaagagagagagagatttgacatgtagtatatctgatatgtgaccccttatgaaggggtccatcaatcccaaggggggggatcttgacccacaggctgagaaacactgctctggagtctgaaaagtggacctggatttctggaacattccagagatggaggccagggtggttcatacctataatcctagcacttagaggattctcatgagtgggaagccagacatggctatataaaaggcagatctagattagcctggactacatagtgagactgtctcaaaaaacaaatagtaacaaaaatattccatccagagatgggactttccctagcactgacacagccagcgacgctgaggtcacttgtttctggcctcaggtaggggaacactgtcattgtaaatataaagcttactgaggtggggagctgactctggccttgtaagcatggagatctgaattagatccctaggacccacagaaaaagctggcacggccaggcggtgctgcacacctttaatccccgcactcaggaggcagaggcaggcagatttctgagtttgaggccagcctggtctacagagtgagttccaggacagccagggctgtcatgcttggggtggggggaagctggacacaaagccagagaagtgactcagtgggtaaaggcagcttgccccctaagcctacagacccaagttcaatacctccaaaacccgcctcaggtaaaggtgcaaagagagaatttatgttacaaagacctgtacgaatgccatcctgcctctttgaacttttgtttttgttttttgttttttcgagacagggtttctctgtatagccctggctgtcctggaactcacggtatagaccaggctggcttcaaactcagaaatccgcctgcctctgcctcccaagtgctgggattaaaggtgtgtgccaccatgccctgcctctttgaacttttaaaaccacattttctttttcctctggtctgaaggtccaggcttcggaggtcatttccacacagctgggggacaggtgatgacagaaagcatgtggacctaaagaaactccagtgaccactgcctaggtgtgcgagagaggtcactgtgccccgctgcctaggtgtgcgagagaggtcactgtgccccgctgcctaggtgtgcgagagaggtcactgtgccccgctgcctaggtgtgcgagagaggtcactgtgccccgctgtctaggtgtgcgagagaggtcactgtgcccctctgtctaggtgtgcgagagaggtcactgtgccccgctgcctaggtgtgcgagagaggtcactgtgccccgctgtctaggtgtgcgagagaggtcactgtgcccctctgtctaggtgtgcgagagaggtcactgtgccccgctgtctaggtgtgcgagagaggtcactgtgccaattcctttaaccacaaacccataaggccattactattaacctcccttctccaaaaaaggaacagggggattttaaaacctatgaaaaaaattgcacagctaaatcacagacctaggaactgaggggctggggcatagacgccagtgggagcctcctcgacttgtacacatgaagtcctgggtttaatcccagcacagcagaaagcctccggcacccggtccaggtggtgtatacacatacacctgatgtcccagcacttgggaagtggaagaacgggatccttagcacacaggaagttttaggctagcctgggctacatgagaccctgtctcaaaaaacaaataatgaaacaaacaaaaataagaataaaaaaacccccttgtacctgagcccagacagcgtgagtaactggactcctcaaaccaaaaatggtttgtgttattttaggcaaggtctggctggcttgaaacttgctacgtaaatctggctgatcttgaacttgtggaacgatcctgcctgcctctccttcctcagtgctggctgggatcattctcgagcaccactgcccagcttcaggctggaactcttaaaattacactttactccttttatattgtgtggggtatgggtataagagcgcacgccacaatgtgcacgtggaagtcagaggtcaatgtccaggaattggttctctgcctccttctatcgtgtaggtccagaggactgagctcctttcttagcttggcagcaaatgccctacatgcttaaaagggggacaaaagtagagaaggttgtaggtgaaactggctccctgtggagacatgtgttcagtgtaactgctggttaagaattccagactggctgggtgtggtggcacacgcctttaatcccagcactcaggaggcagaggcaggcagatttctgagtttgaggccagcctggactacaaagtgagtttcaggacagccagagctacgcagagaaaccctgtctcgaaaaaccaggaagaaagaaagaaagaaagaaagaaagaaagaaagaaagaaagaaagaaagaaagaaagaaagaaagaaagaaagaaagaaagaaagagagagaatccagactgggggcagcaagatggctctgcgagtacagcggtggggcatctgcttggaactggtcccaccctagcagcacagatcattacagatgatgatatagcaaacaatgcacacaagtcacgacgggtcagctgccccacactgaggaaggagagataactgtgttgagtcactaaccaggaagccctgggaagaacaccacccaccaccccgggctcccagtggctttggatggtaagaaaggaggaagctgggcctttaaattgctgagtcacctgggcagtgccaacagccacctcagaggatgacgatggcagtcctcatgatcactgtagcacctcaattgagagactgagatcggtcattcagcaagcatttcctgagtgcctgctgtataccaaacacgtggcaggtcaggagaatctccagtctgaggtaatgagatccgaaaggtgacgtgaggagccaagactgaaggtattcaagagagagagacactactgagctgggctgtctgaggaggtgacaaatgacttcagacctgaatgacagtttagaagttcctgaagaagtggagcgtgccagctgggggtgcagctcggtggccatgtgacctaaggagctctgttctagatgtttacccggaagaaatggaaacatctg

SEQ ID NO: 66 - DNA, 3326 bp, Mus musculus
ggcagctgggctaggctccgaccttgtagcggcgcagcgccggctccgagcaaagcggtgcccagagcgggctcggtgagaggcaggatcctgtgtccccgcgtcccggccacggtgtcaccctctgacgactcacctggtggcaggtgtggccctgcccagctgtcagtgatggccttgccccggtgagccaaagcctgcccctctcacccgccggccaccagccagcaggatgaggctgtggaaggcggtagtagtgacgctggccttcgtgagcacggacgtcggggtgaccacggccatctacgccttcagccacctggaccgtagcctgctggaggacatccgacactttaacatcttcgactcggtgctggacctctgggctgcctgcctgtaccgcagctgcctgctgctgggggctaccataggcgtggccaagaacagcgctctggggccaaggcgcctgcgggcttcgtggctcgtcatcaccctcgtgtgcctctttgtgggcatctatgccatggccaaactgctactcttctcagaagtgcgcaggcccatccgggacccatggttctgggcgctcttcgtgtggacctacatctcgctggctgcctccttcctgctgtgggggctgctggccactgtgcggccggacgcagaggccctggagccagggaatgagggcttccacggggagggtggggcccctgctgagcaggcatcgggagccacactacagaagctgttgtcctacacaaagcctgacgtggccttcctagtagctgcctcctttttcctcatcgtagcagctctgggtgagaccttcctgccctactacactggccgggccattgacagcattgtgatccagaaaagcatggatcagttcaccacagccgttgtcgtcgtttgcctgctggccatcggcagctcattggccgcaggtattcggggcggtattttcaccctcgtatttgccagactgaacattcgcctccggaactgtctcttccgctcactggtgtcacaggagacaagcttctttgatgagaaccgcacaggggacctcatctcccgcctcacctctgataccaccatggtcagcgacctggtctcccagaacatcaacatcttcctgaggaacacggtcaaagtcacgggcgtggtggtcttcatgttcagcctctcctggcagctttccctggtcaccttcatgggcttccctatcatcatgatggtgtccaacatctacggcaagtactacaagaggctctccaaggaggtccagagcgccctggccagagccagcaccacagccgaggaaaccatcagcgcgatgaagacggtgcgcagctttgccaacgaggaggaggaggccgaggtgttcctgcggaagcttcagcaggtgtacaagctcaacaggaaggaagcagcggcctacatgtcctacgtctggggcagcgggctcacactcctggtggtccaggtcagtattctctactacgggggccacctagtcatctcggggcagatgagcagcggcaacctcatcgccttcatcatctacgaatttgtcctgggagactgcatggagtccgtgggctccgtctacagtggcctgatgcagggagtgggggccgccgagaaggtgttcgagttcatcgaccggcagcccaccatggtgcatgacggaagcttggcccccgaccacctcgagggcagggtggactttgagaatgtgaccttcacctaccgcactcggccccacacacaggtcctacagaatgtctccttcagcctgtcccccggcaaggtgacagctctggtggggccgtcgggcagcgggaagagctcgtgtgtgaacatcctggagaacttctaccctctgcagggcggccgtgtattgttggatggcaagcccattggcgcctatgaccacaagtacctgcatcgtgtgatctcactggtgagccaggagcccgtgctgttcgcccgctccatcacagacaacatctcctacggcctgcctaccgtgcccttcgagatggtggtggaggctgcacagaaggccaatgcccatggcttcatcatggaactgcaggacgggtacagcacagagaccggggagaagggagcccagctgtcaggtgggcagaagcagcgggtggccatggcccgagcacttgtgcggaacccacctgtgcttatcctggacgaagccaccagtgccctggatgccgagagcgaatacctgattcagcaggccatccacggcaacctgcagagacacacggtgctcatcattgcacaccggctgagcaccgtggagcgggcacacctcatcgtggtgctggacaagggccgggtggtacagcagggcacacaccagcagctgttggcacagggcggcctctatgccaagctggtgcagcgtcagatgttggggctcgagcaccccttggactacacagccagccacaaggagccacccagcaacactgaacacaaggcctgacagtggcccccaggctgaagcactggaggcgacctgccaagtcccactcctgcttcctgcatcttgcctccttccacttgctccccaggcacccgccagctgccatgggcttacccccttctactgtgtccttcttggctcctccaggcctgccaaggtagagcagcctttttaaaccaagctaccagggtttttactgctcagttcaacgcactccagtcaactctgagatttcaaaaagaacctttttgggactggcagtgagcaagctcactaagatgtttccaagacttctgagccaagagtgcaggaccctttctgactgcctggaggatgtctgggagagaactaagcaccaccctttgcctctcgggagaagcagcctccctgtcccctagggggacacaagggttggcctttccatccttccagtctcccggctctgtgagtcaggccagaggtggggcaagagagtgggaggtggcccactgcccatcacccccctgccactcaaagccagtctcactgtgaaccactgggacctcagcagaggaggggctggccgggcctggtgggcctcggggtgccctcagccccgcacccagcacttgaacccttcaccctctcccctggctggcaccttccctcctgtccacccctgcaactctgcggaggaacctgtcgtttgtaagatgtattctcagattggtggagggggaccaaggcaatgcccagggtctggctttgtcctggtttcaagattttgggagaactgggtcaataaagtgtactacctctgacctct

SEQ ID NO: 67 - protein, 772 aa, Mus musculus
WPCPGEPKPAPLTRRPPASRMRLWKAVVVTLAFVSTDVGVTTAIYAFSHLDRSLLEDIRHFNIFDSVLDLWAACLYRSCLLLGATIGVAKNSALGPRRLRASWLVITLVCLFVGIYAMAKLLLFSEVRRPIRDPWFWALFVWTYISLAASFLLWGLLATVRPDAEALEPGNEGFHGEGGAPAEQASGATLQKLLSYTKPDVAFLVAASFFLIVAALGETFLPYYTGRAIDSIVIQKSMDQFTTAVVVVCLLAIGSSLAAGIRGGIFTLVFARLNIRLRNCLFRSLVSQETSFFDENRTGDLISRLTSDTTMVSDLVSQNINIFLRNTVKVTGVVVFMFSLSWQLSLVTFMGFPIIMMVSNIYGKYYKRLSKEVQSARASTTAEETISAMKTVRSFANEEEEAEVFLRKLQQVYKLNRKEAAAYMSYVWGSGLTLLVVQVSILYYGGHLVISGQMSSGNLIAFIIYEFVLGDCMESVGSVYSGLMQGVGAAEKVFEFIDRQPTMVHDGSLAPDHLEGRVDFENVTFYWHTQVLQNVSFSLSPGKVTALVGPSGSGKSSCVNINFYPLQGGRVLLDGKPIGAYDHKYLHRVISLVSQEPVLFARSITDNISYGLPTVPFEMVVEAAQKANAHGFIMELQDGYSTETGEKGAQLSGGQKQRVAMARALVRNPPVLILDEATSALDAESEYLIQQAIHGNLQRHTVLIIAHRLSTVERAHLIVVLDKGRVVQQGTHQQLLAQGGAKLVQRQMLGLEHPLDYTASHKEPPSNTEHKA

SEQ ID NO: 68 - DNA, 57502 bp, Homo sapiens
  misc_feature (1)...(57502): n = A,T,C or G
cctgaatctatctgggtcaactgcaagttccagactgttagctgaaagggacttctagaaggggacccatcctgtttcaggctgccccaacctgagcctagctgggatgagaacccctagatgtacctcaaccatctgggcccacacagggacaggagacagtcatggccaagtcctgtgttccagaggttgctgaggactctcctgggaagcttcccaccactgactccaggggaaggaggaggagggagtggggcagcagccctggcagcagcctgcggggtatatggtaaggtgtgaggagcccaggggcctggaagctgtggctgggatcacatctgctcctgctgtaaaagcttgggcaagggatccctctttaagcctcagcttctcaatccaaaatgagagtggtgcttgtgcttatctcacagagctgttaagaacggcatgactaggcaacttagcaacttagcatttccccttctctctcctggtgccaagactcaggtgtggagggatgagtggggggcaggaaggaggaaagtgagggcctaagtgacccttcagggatcagggactgaggctaggctcaagctgtgtcctcaagctgcggacacaaatctaacgaggaggagctgtgcaggggcaggggactggtacctctgctaacagctgctggaagtccttggcgctaacacagcctcggctgcgcaggatctgggagcagaaagaacactgagcatgactgtatgacctgaggaaatcccttcactctctaagcctcagtttcccctgcttaaaatggggagaggagccccgacctcaaaggatcatggagagaatgaactgcggaaccctgtcaagctcaggacagggctccgggctggtgttgctgtgaggcggcaagctgagcccggccctgtcctaagcaccctacatgcttgttcattccttcctcacaatctcacagggagatactattacccctttacggtgagaaaaccgaggcagagagaggccgtcattcttgtatttgaagatacggtgcgcggcgtgcgcaaagcaaacgaccctggggacgaacttccctcctccactacccctctctgcccactgctccgtagggacgacagcggccactcaccgggccgtagtcccggcgcagctgctgctcgcctcggaagcgcacgtgcagcccatagcgcgccacgtacaagttatcggtgcagaagcaggcgcagcggcagaagtgccgcggagcccccaccgtcgccatagtgaagcacccacagccctaccagcttccgtagagagacttcgggcacgcccccaaccgcgggaggcgcggaaccagcggccaaggggccgctctaagttcccaagggcggaaaaggacgaagacgcacctcgccaggaaacggtctgcggagaaagatgctcctgggccgggttgggaccggcggcctcctcgttccgcctcccagttttcccactacgaggcagggactaatggctccactttacagacagctgaactgggtcgtgccttcacaggacggggagaggaagggactcggagccccaaggcctttgacttaaacgccgacccaccccccgccgtctgcccggagctcgtggagaaccagccgagctgaggacagtttaaagagctcggaggtccgactagttcccgctggtgcttcaatcatccagccctgtacgtttcagtttggatttagcatctaccccgggtccctgcctggcgcttccggtccctccgccacagtctgttggattacctcagattgccccagtgagtgtctccaccaaaacgctccgtctcgcattacttccggtggcgttcccaatggacgcgggagggcggggtcaggtgtgggagggcgacggggcgtggtctcaccgcagccaacaaatgacaactcttgcagaccgagcctcttctctccccggacctttgctcaggaatctaccagcattaaacctttgagctaggtactattatatcaccgtcttacagatgaggaaactgagacccagagaggcacagggacccgccgcaggtcacacatccagtaaggggcaaatatggcgtttgaaccctacagagttccccagttaaccaccacagggcttctgggagtggtggaagtatgtgggatttggggttttctcgtgcagagctgcccggcccgagaaggtgtttaacgttttacagtcgtcttgattgcccagtgatagtgagaggccctgctatctaggaaaggatccatttccccagatcaatgttcattacccgcctaactgccctttttccccaggaggcccagggcaggtcggctccccagccacccaccaggcaggcctggcacatgcagcacccccaaccccaccctcaccccctctccgtttgcagcagtttgcaagatgagtgtgttgtacctatcagtttatttatttgtttatttactttttgagatagagtttcacccaggctggagtgcagtggcgcgatctccgctcactgcaacctctgcctcccggattcaagcagttttcctgcctcagcctcccgaatagctgggattatcggcaggcgccaccacgcccagctaatttttttgttttttgtttgtttgtttgtttgttttgagacggagtcttgctctgtcgcccaggctggagtgcagtggnnnnnnnnnnnnnnnnnnnnnnnnnnnnnnnnnnnnnnnnnnnnnnnnnnnnnnnnnnnnnnnnnnnnnnnnnnnnnnnnnnnnnnnnnnnnnnnnnnnnnnnnnnnnnnnnnnnnnnnnnnnnnnnnnnnnnnnnnnnnnnnnnnnnnnnnnnnnnnnnnnnnnnnnnnnnnnnnnnnnnnnnnnnnnnnnnnnnnnnnnnnnnnnnnnnnnnnnnnnnnnnnnnnnnnnnnnnnnnnnnnnnnnnnnnnnnnnnnnnnnnnnnnnnnnnnnnnnnnnnnnnnnnnnnnnnnnnnnnnnnnnnnnnnnnnnnnnnnnnnnnnnnnnnnnnnnnnnnnnnnnnnnnnnnnnnnnnnnnnnnnnnnnnnnnnnnnnnnnnnnnnnnnnnnnnnnnnnnnnnnnnnnnnnnnnnnnnnnnnnnnnnnnnnnnnnnnnnnnnnnnnnnnnnnnnnnnnnnnnnnnnnnnnnnnnnnnnnnnnnnnnnnnnnnnnnnnnnnnnnnnnnnnnnnnnnnnnnnnnnnnnnnnnnnnnnnnnnnnnnnnnnnnnnnnnnnnnnnnnnnnnnnnnnnnnnnnnnnnnnnnnnnnnnnnnnnnnnnnnnnnnnnnnnnnnnnnnnnnnnnnnnnnnnnnnnnnnnnnnnnnnnnnnnnnnnnnnnnnnnnnnnnnnnnnnnnnnnnnnnnnnnnnnnnnnnnnnnnnnnnnnnnnnnnnnnnnnnnnnnnnnnnnnnnnnnnnnnnnnnnnnnnnnnnnnnnnnnnnnnnnnnnnnnnnnnnnnnnnnnnnnnnnnnnnnnnnnnnnnnnnnnnnnnnnnnnnnnnnnnnnnnnnnnnnnnnnnnnnnnnnnnnnnnnnnnnnnnnnnnnnnnnnnnnnnnnnnnnnnnnnnnnnnnnnnnnnnnnnnnnnnnnnnnnnnnnnnnnnnnnnnnnnnnnnnnnnnnnnnnnnnnnnnnnnnnnnnnnnnnnnnnnnnnnnnnnnnnnnnnnnnnnnnnnnnnnnnnnnnnnnnnnnnnnnnnnnnnnnnnnnnnnnnnnnnnnnnnnnnnnnnnnnnnnnnnnnnnnnnnnnnnnnnnnnnnnnnnnnnnnnnnnnnnnnnnnnnnnnnnnnnnnnnnnnnnnnnnnnnnnnnnnnnnnnnnnnnnnnnnnnnnnnnnnnnnnnnnnnnnnnnnnnnnnnnnnnnnnnnnnnnnnnnnnnnnnnnnnnnnnnnnnnnnnnnnnnnnnnnnnnnnnnnnnnnnnnnnnnnnnnnnnnnnnnnnnnnnnnnnnnnnnnnnnnnnnnnnnnnnnnnnnnnnnnnnnnnnnnnnnnnnnnnnnnnnnnnnnnnnnnnnnnnnnnnnnnnnnnnnnnnnnnnnnnnnnnnnnnnnnnnnnnnnnnnnnnnnnnnnnnnnnnnnnnnnnnnnnnnnnnnnnnnnnnnnnnnnnnnnnnnnnnnnnnnnnnnnnnnnnnnnnnnnnnnnnnnnnnnnnnnnnnnnnnnnnnnnnnnnnnnnnnnnnnnnnnnnnnnnnnnnnnnnnnnnnnnnnnnnnnnnnnnnnnnnnnnnnnnnnnnnnnnnnnnnnnnnnnnnnnnnnnnnnnnnnnnnnnnnnnnnnnnnnnnnnnnnnnnnnnnnnnnnnnnnnnnnnnnnnnnnnnnnnnnnnnnnnnnnnnnnnnnnnnnnnnnnnnnnnnnnnnnnnnnnnnnnnnnnnnnnnnnnnnnnnnnnnnnnnnnnnnnnnnnnnnnnnnnnnnnnnnnnnnnnnnnnnnnnnnnnnnnnnnnnnnnnnnnnnnnnnnnnnnnnnnnnnnnnnnnnnnnnnnnnnnnnnnnnnnnnnnnnnnnnnnnnnnnnnnnnnnnnnnnnnnnnnnnnnnnnnnnnnnnnnnnnnnnnnnnnnnnnnnnnnnnnnnnnnnnnnnnnnnnnnnnnnnnnnnnnnnnnnnnnnnnnnnnnnnnnnnnnnnnnnnnnnnnnnnnnnnnnnnnnnnnnnnnnnnnnnnnnnnnnnnnnnnnnnnnnnnnnnnnnnnnnnnnnnnnnnnnnnnnnnnnnnnnnnnnnnnnnnnnnnnnnnnnnnnnnnnnnnnnnnnnnnnnnnnnnnnnnnnnnnnnnnnnnnnnnnnnnnnnnnnnnnnnnnnnnnnnnnnnnnnnnnnnnnnnnnnnnnnnnnnnnnnnnnnnnnnnnnnnnnnnnnnnnnnnnnnnnnnnnnnnnnnnnnnnnnnnnnnnnnnnnnnnnnnnnnnnnnnnnnnnnnnnnnnnnnnnnnnnnnnnnnnnnnnnnnnnnnnnnnnnnnnnnnnnnnnnnnnnnnnnnnnnnnnnnnnnnnnnnnnnnnnnnnnnnnnnnnnnnnnnnnnnnnnnnnnnnnnnnnnnnnnnnnnnnnnnnnnnnnnnnnnnnnnnnnnnnnnnnnnnnnnnnnnnnnnnnnnnnnnnnnnnnnnnnnnnnnnnnnnnnnnnnnnnnnnnnnnnnnnnnnnnnnnnnnnnnnnnnnnnnnnnnnnnnnnnnnnnnnnnnnnnnnnnnnnnnnnnnnnnnnnnnnnnnnnnnnnnnnnnnnnnnnnnnnnnnnnnnnnnnnnnnnnnnnnnnnnnnnnnnnnnnnnnnnnnnnnnnnnnnnnnnnnnnnnnnnnnnnnnnnnnnnnnnnnnnnnnnnnnnnnnnnnnnnnnnnnnnnnnnnnnnnnnnnnnnnnnnnnnnnnnnnnnnnnnnnnnnnnnnnnnnnnnnnnnnnnnnnnnnnnnnnnnnnnnnnnnnnnnnnnnnnnnnnnnnnnnnnnnnnnnnnnnnnnnnnnnnnnnnnnnnnnnnnnnnnnnnnnnnnnnnnnnnnnnnnnnnnnnnnnnnnnnnnnnnnnnnnnnnnnnnnnnnnnnnnnnnnnnnnnnnnnnnnnnnnnnnnnnnnnnnnnnnnnnnnnnnnnnnnnnnnnnnnnnnnnnnnnnnnnnnnnnnnnnnnnnnnnnnnnnnnnnnnnnnnnnnnnnnnnnnnnnnnnnnnnnnnnnnnnnnnnnnnnnnnnnnnnnnnnnnnnnnnnnnnnnnnnnnnnnnnnnnnnnnnnnnnnnnnnnnnnnnnnnnnnnnnnnnnnnnnnnnnnnnnnnnnnnnnnnnnnnnnnnnnnnnnnnnnnnnnnnnnnnnnnnnnnnnnnnnnnnnnnnnnnnnnnnnnnnnnnnnnnnnnnnnnnnnnnnnnnnnnnnnnnnnnnnnnnnnnnnnnnnnnnnnnnnnnnnnnnnnnnnnnnnnnnnnnnnnnnnnnnnnnnnnnnnnnnnnnnnnnnnnnnnnnnnnnnnnnnnnnnnnnnnnnnnnnnnnnnnnnnnnnnnnnnnnnnnnnnnnnnnnnnnnnnnnnnnnnnnnnnnnnnnnnnnnnnnnnnnnnnnnnnnnnnnnnnnnnnnnnnnnnnnnnnnnnnnnnnnnnnnnnnnnnnnnnnnnnnnnnnnnnnnnnnnnnnnnnnnnnnnnnnnnnnnnnnnnnnnnnnnnnnnnnnnnnnnnnnnnnnnnnnnnnnnnnnnnnnnnnnnnnnnnnnnnnnnnnnnnnnnnnnnnnnnnnnnnnnnnnnnnnnnnnnnnnnnnnnnnnnnnnnnnnnnnnnnnnnnnnnnnnnnnnnnnnnnnnnnnnnnnnnnnnnnnnnnnnnnnnnnnnnnnnnnnnnnnnnnnnnnnnnnnnnnnnnnnnnnnnnnnnnnnnnnnnnnnnnnnnnnnnnnnnnnnnnnnnnnnnnnnnnnnnnnnnnnnnnnnnnnnnnnnnnnnnnnnnnnnnnnnnnnnnnnnnnnnnnnnnnnnnnnnnnnnnnnnnnnnnnnnnnnnnnnnnnnnnnnnnnnnnnnnnnnnnnnnnnnnnnnnnnnnnnnnnnnnnnnnnnnnnnnnnnnnnnnnnnnnnnnnnnnnnnnnnnnnnnnnnnnnnnnnnnnnnnnnnnnnnnnnnnnnnnnnnnnnnnnnnnnnnnnnnnnnnnnnnnnnnnnnnnnnnnnnnnnnnnnnnnnnnnnnnnnnnnnnnnnnnnnnnnnnnnnnnnnnnnnnnnnnnnnnnnnnnnnnnnnnnnnnnnnnnnnnnnnnnnnnnnnnnnnnnnnnnnnnnnnnnnnnnnnnnnnnnnnnnnnnnnnnnnnnnnnnnnnnnnnnnnnnnnnnnnnnnnnnnnnnnnnnnnnnnnnnnnnnnnnnnnnnnnnnnnnnnnnnnnnnnnnnnnnnnnnnnnnnnnnnnnnnnnnnnnnnnnnnnnnnnnnnnnnnnnnnnnnnnnnnnnnnnnnnnnnnnnnnnnnnnnnnnnnnnnnnnnnnnnnnnnnnnnnnnnnnnnnnnnnnnnnnnnnnnnnnnnnnnnnnnnnnnnnnnnnnnnnnnnnnnnnnnnnnnnnnnnnnnnnnnnnnnnnnnnnnnnnnnnnnnnnnnnnnnnnnnnnnnnnnnnnnnnnnnnnnnnnnnnnnnnnnnnnnnnnnnnnnnnnnnnnnnnnnnnnnnnnnnnnnnnnnnnnnnnnnnnnnnnnnnnnnnnnnnnnnnnnnnnnnnnnnnnnnnnnnnnnnnnnnnnnnnnnnnnnnnnnnnnnnnnnnnnnnnnnnnnnnnnnnnnnnnnnnnnnnnnnnnnnnnnnnnnnnnnnnnnnnnnnnnnnnnnnnnnnnnnnnnnnnnnnnnnnnnnnnnnnnnnnnnnnnnnnnnnnnnnnnnnnnnnnnnnnnnnnnnnnnnnnnnnnnnnnnnnnnnnnnnnnnnnnnnnnnnnnnnnnnnnnnnnnnnnnnnnnnnnnnnnnnnnnnnnnnnnnnnnnnnnnnnnnnnnnnnnnnnnnnnnnnnnnnnnnnnnnnnnnnnnnnnnnnnnnnnnnnnnnnnnnnnnnnnnnnnnnnnnnnnnnnnnnnnnnnnnnnnnnnnnnnnnnnnnnnnnnnnnnnnnnnnnnnnnnnnnnnnnnnnnnnnnnnnnnnnnnnnnnnnnnnnnnnnnnnnnnnnnnnnnnnnnnnnnnnnnnnnnnnnnnnnnnnnnnnnnnnnnnnnnnnnnnnnnnnnnnnnnnnnnnnnnnnnnnnnnnnnnnnnnnnnnnnnnnnnnnnnnnnnnnnnnnnnnnnnnnnnnnnnnnnnnnnnnnnnnnnnnnnnnnnnnnnnnnnnnnnnnnnnnnnnnnnnnnnnnnnnnnnnnnnnnnnnnnnnnnnnnnnnnnnnnnnnnnnnnnnnnnnnnnnnnnnnnnnnnnnnnnnnnnnnnnnnnnnnnnnnnnnnnnnnnnnnnnnnnnnnnnnnnnnnnnnnnnnnnnnnnnnnnnnnnnnnnnnnnnnnnnnnnnnnnnnnnnnnnnnnnnnnnnnnnnnnnnnnnnnnnnnnnnnnnnnnnnnnnnnnnnnnnnnnnnnnnnnnnnnnnnnnnnnnnnnnnnnnnnnnnnnnnnnnnnnnnnnnnnnnnnnnnnnnnnnnnnnnnnnnnnnnnnnnnnnnnnnnnnnnnnnnnnnnnnnnnnnnnnnnnnnnnnnnnnnnnnnnnnnnnnnnnnnnnnnnnnnnnnnnnnnnnnnnnnnnnnnnnnnnnnnnnnnnnnnnnnnnnnnnnnnnnnnnnnnnnnnnnnnnnnnnnnnnnnnnnnnnnnnnnnnnnnnnnnnnnnnnnnnnnnnnnnnnnnnnactcctgctttttggacagtccatccaagtaatcgtcttcaagtacaattagtatatttgcctttgtttttgcaccaatagtaacatggttcaactttattctctccttggtttttactcaatacatttaggaggtcattccatacctttatataactctatgtcttctatttttttttttctggctacagagtattctgttgaacaggtgttctctaattatttggccagttccctatggaagggtatttaggttatttccagacttttgctactgtagtaactacctttaagctagtaccttagctcccttgcacaagtctatctgtagaggaaattccttctgggttaaaaaaaaacatagtgttgtaagttctgaacaaattcccctctaaagaagctgtcccaccaagtagcagaggacatttccaattcagagagtgctccaaaaagcctctgttcagggctgggcacacatggctcacgactctaatcccagcagtttggaaggccaaggagggcagatcacttgaggtcaggagtttgagaccagcctggccaacatggctaaaccccatctctactaaaaatacaaaaattagccaggcgtggtagcggacacctgtaatcccatctacctgggaagctgaggcaggagaatcacttgaagctgggaagcagaggctgcagtgagctgagaactcgccactgcactccatcctggagtctctgtctcaggaaaaaacaaagcctctgatcagaggatccagggatgtgggcagttctagccccacctgctgcccctctgggccgtaagtccactcccccacccacttcccacggttcaggccacatggacccttttctggtcctcaagtggccaagttggttcccacctcagagcctttgaacttgcaggccttagcgtaggatgttcctccctccccgtggctcacgccttctcacctttcacttacacaattttatttattttactgcatccagtacctgaatggccttatgcacttacttgctgatgttctgtccccttcacgccatgaaggctgggagttttctgtcttttcacacacagctgtgttcccagcacctggcagtcactgaggacatatcgctgcctcccctctccaatgccccgaatccctgatcttgcaccaattttctccgtaaaatgtattcccttccaatatatctcatttgcttatatgtgttgtctgacaccctcactagaatgtcagctccagaagggcaaggatcttgttttgttaattgtttaatttcaaatgcttaaaagggcatatggcacgccgtaggcactggataaatatctgttgggtgaacgaatgaaagaataagtgaatgaatgaggaccataacccaccctcctggactggctggctgtccctccagggaaaaaggccagttaaaaagctggcctccttcaggtgaaaccatttccgtcccctcaggatgggcccgtggctccaggtggaggccagcacgcagtgtggagggcctggttggccagatgtgggaggagtttgccacaggtgagcaggtggccagctgtggccccgcccccaggaggcccgtccccacccggaggcttcgccagccccctcctcgggggccccgccccgtccaggaaagcccgcccactcctcctgaggccccgcccctcccgggaggctccgccggtccctgccccaggatccccgccccctccgtcactgaggccccgccccgtccatcagcctgtctcaacgcacgccagtctcagctccgaccttgcagcggcgcagcgcgggtgggaggcggggaggagcagcgggaagagcggagcgaggaccgcgtccggcgcagtcttcaatgagcagcgcggaaactgcaccccagacccgagcctgctgcgcgccccctcccagagctcacctggtgccaggtaacaggtaagggcaaggcaccctagacccctggttttgggacctttccaggccagggtgccaggccaggcacgcgttggggggcgtctgggcacccctgcctcggtgggaataggcatctcggttgaaggtgggagcctccctggagccctcccggagcccgcagccgcagctcccagcccccatccctgcagcatcctttccgcgcccgtagggcgaatgttgccattttttttaacccccaaggcgccgctgcctcttggaaaatgtgggaggtgttggaggatcctgggatggctgtcgttcccccaggacggggctggcgcgccttctgagggctcccactgtccatgtcagggcttcccagggatcctgagcaccagggctttggcagaagcctgggggatctggcctgttcctgctgacctgggcaaagcccttttctcagtctcctcagcaggccagtgggctgccgctgctccccgccatccacgctggcagtgaggcctgtaggttcccaggggagcctcttttatttctgggcctctggaaaaaaaaaaaaagcctcctcccccggcctgacattaactgagacagctttaagctgggctgacaggatccccgcctctgcccattccccttttccggatagtgcagggccgggtgacaagaggaggcttggagggagggcacctcgcgcctctctgcctctcctagagctgagagcacctgagacagcttctcaagtcccagagtgaggctgggccccacgtgggctgccagaggctcagcagggatgaaatcaggatggacccacgcagacccagcccgctcctgccccagagccagggacccccacagtcaggccctcccacccagcaggcctctgtcagtcagtgctttgctgcgcagcgaatggaatgggcttatctgggtctgggcccacaccggggtaaaaagctcaccatgtcaggggtgaaccgaggccactgggccacccaagttctttggccccttttcttgcaatccctgaatagcctggacaggggacccccgagtctccatcctggagaccctggatgcgggtctccatcctgccttcgtcctttttctgcgtgtcacttaacctcttctgtctccccagctgtaaaacgaagctgatgaccacagggtcctcccagggaagtggggaggcctggctgctttgggaggtgccaggcacatagtagggcccggtgaagggtctctgttgcagtgtcataataacttttatctattgtctcctggccttctctgcaaagggtctctgttgcagcgtcataataactgctatctatcgtcttctggccttctctgcagctgatgcctagagataccccaaccaatgtctcctaccctgggaagaaaagcctttgacaagacccctggtggggacaaggccacttgcttatcctgtgccattctttagtgcacggagtcagggcgagccacccctgtcttcctgggccttgtccggttctgggtggggcctattctggccaccaccttgtccttgtccctcaggccaagcaggtcacccatgtgctcacaatttgccctccagctccacctggccgagcccagcgcatcctctgagtcaggcagttggagagcggtgacaggcctctaagcagccttggctggtggtcacgcttctgcccagtagctttaaaaataacggagtaactgtccccaccgaggactgtaacccgacccggggctggagtccactctgctaggagtctgtggtagaaggactagtgcttgggggcagggacccaggtgctagcactgctctgccccagcctggtggatgacctgagacaagcctcaccccctccctctgtgggcctcagtttccccatctgcaaaatgtggctttggtagtctgcgatatgagtgtttgaaattttgtttattctgatgaagataaataggcttctggaggcggggggcatgactggtaccctgggctgttgggggatggggaaggaattcccccagaggctgggagtcaggttgggagagtcagccaagcccctgggctgctgtccaggttttgagtctcttgcggatctgcctcctgttccacttctgagcccgagcccctttctggggactgagggaccccatgtgcccaccacgaggagagcagcagctgaggcggctggcagcacctggtgcagccggcagtggcttggctgggaggcctggaatggcaccaggccaggagcttccctccctgggctctgactggagctcacccactcgctcgctccccacggcctctgcattgcagcagacaggagcctgcgtgggcagcacaggcagggctggggagggagccaggacctgggctgagggtgtccgaccatcctacccacttccccttgcccttgaccctgcttggccctgaccgtctttggaggggcagctgctgactaagcaactgtcatctctgcgatgggcttcggtgtgcctggaggtgtgggggtgaaagcagggcccaggcttggaggttgttatatccccccactccattccccctctgcatctcagaccccttctcagcattagtaggggttgtgcctacctcctggagaggctgttttgaagggttggagctatggagttgagagtacagattttggaactggacggccagggttcacatcccagcttgtgacccaactctgtgggtcacctagctctgtgacccagggcaggtcacttaatctctctgttcctcagttttcctaactgtaaaatggggataatgataggacctacttcatagggctctggtgagtgctgacgcatgtaagtgcctggagccaatgtcagctggcaccagctgctgtcattgccagcaattagcctcagcagtcttatcacctctgccacacggcccagccctctgctggggacccttttccttagatgaacacttcccggtagcattttccttcactctgtcacccaggctggagtgcagtggcgcaatctcggctcaccgcaacctccacctcccagtttcaagtgattcttctgcctcagcctcctgagttgctggggttacaggcgtgcaccaccatgctcggctaatttttgtatttttagtagagacgggatttcgccatgttgcccaggctggaatcgaactcgtgagctcaagctgttgcccatcttggcctcccaagaggcccagatgggattacaggtgtgagccaccatgcctggcccctggtagcattttctatattgaatgttatcttagtttaggggtgaagaacacagattctgggctcagacacctatgaatccacatcccagctctgctattcagaagctgtgtaatcttgggcaaattcttcacttctctgggcctcagtttctccatctgttaagtggaagggatgacagtgcacatctcacaaagttgctgtgaggattaaataggtggggccacctggatttgaagcacatggtgcagggcagggctcacaggaagtgcagtgttacatccctgtctgcttgtagttattagacaactgctttgtgccaggcatgcagtagacaggtggagaggcagatgctggggtcctacactcactgactgcctcaagtcatcctggcttgggcccttgttggctgaatgtctggatcaggtggttttgtctctctgtgcctcagtttccctaactgtaaacgggaatatggaaaccctggcctcgtgggactgtgtgaggttccagtcatgccacagtgtgagcggtttgggcacctgggcgccagagcttcggggagaggatctctctcaggatggccccttcccagccacgacagtcatccccgctgtcacccagcgcctcacccctcctcttgggggatctagagcccagcccattttgcagatatgacaacaaaaggcccacgggaggaaggactggagctgagacaggaggtagcacccagggacacaccccagcccggtcctaaccctaccgtggacaagccccactcacaaactcaggcctccaggcccacttcccgggtgtccctgcggctctgggggagtcctgagggacccagtgccgggagatgccttggataaagcagacatcaagattcagaaaaccaaaggggcctagggctgggcacgagggccaacctgggcaggaggaaaagattctggaaacttccaagcagatgccaaggtttctggattgctgtgtggcctgcaagccacccccacagctgtcaagttccctcttagaccaaaatagtttatttggggttgcagagatagaaggcctgacgtgggaggagaaaagtggacaaacatttattaagcacacactgtatatggttgattacaatcagcagcaattatgcaccaggcactctgcccagaactgacacattgaacctcacactcacattttgcaaatgaggaaacaggttcagagaaatgagtagtggtagtaaagacagcggctgtttattaaactctgcttatctcagcttcgtcctcactatggatgcaaaatcctccagatactccccaccctctctgatctcatggggccttgctgccttcccaaggggcactcctgccttggggctctggcactgtttcacctgtgccaagtgcttttccccagatagccacttggcagacttccataactctttcaagtcttgctcaagtgttacctacccagcgaggtcttctctggccccctatttaaaattgatctctggccccgcacagtggctcacgcttttgatcccagactttgggttactgaggcatgtggatcacttgaggtcaggagtttgagaacagcctggccaacatggtgaaaccccgtctctactaaaaaaaatacaaaaagttagctggtcatggtggtggggtacctgtagtcccagctacttggggggctgaggcaggagaatcgcttgaaccagggagacggaggttgcggtgagccgggatcgcaccactgtactccagcctgggcgacagagcaagactctgtctcaaataaataaataaataaaataaaattgatctctgtcttcccccacccctatcctattcaccctcaccccatcctatttacccccctcttttttccaccacaacccttatctctttttttaattaaaaaaaatttttttttttagagataggatcttgctgtcaccagggctggagtgtagtggcatgatcatagctcactgtggcctcgaactcccaggctgaagaagcgatcctcccatcttggcctcccaagtagcttggactacaggagcatgctaccacactcagttaatgtttgtttgtttgtttgtttgtttgctttttaaagacagggtctcaccctgttgcccaggctgctctccaactcctggcctcaagggatcctccaaccttggcctcacaagacacacattatttccttattatcttttttttttttttttgagatggagtctcgctctgtcacccagctaaattttgtatttttagtagagatgggggtttcaccatgttggccaggctggtcttcaactcctgacctcaggtgatccacctacctcggcctcccaaagtgctgggattacaggcgtgagcccatttccttattatctgtctcctgcatgagtatgtcatctccaggagagcagggatctttgttctttttgttcatgacaaagaacaaagaacagcacctggccgcagtgggcactcagtaagtatcccttgaatgagtggaatcttagtacccgggaagttgatattgccattttacagatgagaaaactaaggctcagagatgtcaagtgactttctcaaggtcacacagccagcgagtggcaaacctgaaccccttgtgctgatgtttgctgttgtccctacaggcctggcctcgccctgtggatgatgatggccttgcccccgtgagctacaacctggccttcagcacccgcccacctccaaccagcaggatgcggctgtggaaggcggtggtggtgactttggccttcatgagtgtggacatctgcgtgaccacggccatctatgtcttcagccacctggaccgcagcctcctggaggacatccgccacttcaacatctttgactcggtgctggatctctgggcagcctgcctgtaccgcagctgcctgctgctgggagccaccattggtgtggccaagaacagtgcgctggggccccggcggctgcgggcctcgtggctggtcatcaccctcgtgtgcctcttcgtgggcatctatgccatggtgaagctgctgctcttctcagaggtgcgcaggcccatccgggacccctggttttgggccctgttcgtgtggacgtacatttcactcggcgcatccttcctgctctggtggctgctgtccaccgtgcggccaggcacccaggccctggagccaggggcggccaccgaggctgagggcttccctgggagcggccggccaccgcccgagcaggcgtctggggccacgctgcagaagctgctctcctacaccaagcccgacgtggccttcctcgtggccgcctccttcttcctcatcgtggcagctctgggtaagtaaggacctcggggacatgtggccaccagaacatcaaattaggtggatatgactgccttagattttaaaagattttacttacgtggttcagacatcaaattgatatgaaaaggaaaagaggccaggcatagtggctcatatctataatcccagcactttgggaggctgaggtaggaagatcacttgagcccaggagttgaaaaccagcctgggcaacatagcgagaacccatttctattttatttatttatttatttattgtatttatttattttttcgaaacatagtattgctctgtcacctaggctagagtgcagtggcacaatctcaggtcactgcaacctctgcctcccagcttcaagtgattctcctgcctcagcctctcaagtagctgggactacaggcatatgccaccacacccaactaatttttgtatttttagtagaaacaggttttcgccatgttggccaggctggtcttgaactcctgacctcaggtgatccactggcctcggcctcccaaagtgctgggattacaggcgtgagccacggtgcctgccccatttctattttatgtaatttaaaacgaaaaaataggccaggcgcggtggctcacgcctgtaatcccagcactttgggaggccgaggccagtggatcacctgaggtcaggagttnnnnnnnnnnnnnnnnnnnnnnnnnnnnnnnnnnnnnnnnnnnnnnnnnnnnnnnnnnnnnnnnnnnnnnnnnnnnnnnnnnnnnnnnnnnnnnnnnnnnnnnnnnnnnnnnnnnnnnnnnnnnnnnnnnnnnnnnnnnnnnnnnnnnnnnnnnnnnnnnnnnnnnnnnnnnnnnnnnnnnnnnnnnnnnnnnnnnnnnnnnnnnnnnnnnnnnnnnnnnnnnnnnnnnnnnnnnnnnnnnnnnnnnnnnnnnnnnnnnnnnnnnnnnnnnnnnnnnnnnnnnnnnnnnnnnnnnnnnnnnnnnnnnnnnnnnnnnnnnnnnnnnnnnnnnnnnnnnnnnnnnnnnnnnnnnnnnnnnnnnnnnnnnnnnnnnnnnnnnnnnnnnnnnnnnnnnnnnnnnnnnnnnnnnnnnnnnnnnnnnnnnnnnnnnnnnnnnnnnnnnnnnnnnnnnnnnnnnnnnnnnnnnnnnnnnnnnnnnnnnnnnnnnnnnnnnnnnnnnnnnnnnnnnnnnnnnnnnnnnnnnnnnnnnnnnnnnnnnnnnnnnnnnnnnnnnnnnnnnnnnnnnnnnnnnnnnnnnnnnnnnnnnnnnnnnnnnnnnnnnnnnnnnnnnnnnnnnnnnnnnnnnnnnnnnnnnnnnnnnnnnnnnnnnnnnnnnnnnnnnnnnnnnnnnnnnnnnnnnnnnnnnnnnnnnnnnnnnnnnnnnnnnnnnnnnnnnnnnnnnnnnnnnnnnnnnnnnnnnnnnnnnnnnnnnnnnnnnnnnnnnnnnnnnnnnnnnnnnnnnnnnnnnnnnnnnnnnnnnnnnnnnnnnnnnnnnnnnnnnnnnnnnnnnnnnnnnnnnnnnnnnnnnnnnnnnnnnnnnnnnnnnnnnnnnnnnnnnnnnnnnnnnnnnnnnnnnnnnnnnnnnnnnnnnnnnnnnnnnnnnnnnnnnnnnnnnnnnnnnnnnnnnnnnnnnnnnnnnnnnnnnnnnnnnnnnnnnnnnnnnnnnnnnnnnnnnnnnnnnnnnnnnnnnnnnnnnnnnnnnnnnnnnnnnnnnnnnnnnnnnnnnnnnnnnnnnnnnnnnnnnnnnnnnnnnnnnnnnnnnnnnnnnnnnnnnnnnnnnnnnnnnnnnnnnnnnnnnnnnnnnnnnnnnnnnnnnnnnnnnnnnnnnnnnnnnnnnnnnnnnnnnnnnnnnnnnnnnnnnnnnnnnnnnnnnnnnnnnnnnnnnnnnnnnnnnnnnnnnnnnnnnnnnnnnnnnnnnnnnnnnnnaaaaaaaaaaaaactctcagcagtttgagaccaaaaaaaaaaaaaaaagatattaatattttagttgtgtgtgcctacgtgcaggtgtggcctggtttgtgacatgaaatgtatttgtgcctgtgagtctggtccaaacagtttgaaggcaccactcagcaacatgggtgggaaggtggcactgcatggttggagctcacaggttctgggggcaacgaggcctgggcacaaatccctgtcctgctccctacccagccgagtggccctgcgtaagttctccagcctttctgagcctcacttccctcctctgtgcaacaaggattgttggagtccttatttcctgacattttagatgctgaaaagaacgggagagctgggtgcagtggctcatgtctaatcccagcactttgggagaccaaggctacaggatcacttgagcccaggagtttgagaccactctgggcaacacagcaggaccctgtctctaaaagaaatgtttttttaattagctgggcatggtggtacttgcctatagtcccagctactcaggaggctaaggtgggaggatcccttgagctcaggagcttgagttatagtgagccatgatgacgccactgccctccagcccgggcaacagagcaagacctgtctctaccaaagaaaaaaaaaaaaataggagaaggactaagtacagagcttggcttgtcatggtaagtgctcagggttgttagctattatgagttttaaaaattttaagctgggcgcggtggctcatgcctgtaatcccaacactttgggaggccgaggtgggcagatcacttgaggtcaggagtttgagacgagcctggccaacatggtgaaaccccgtctctgctaaaagatatataaatattagccgggcacagtggctcatgcctataatcccagcactttgggaggccgaggcaagtggatcacctgaggtcaggagttcgagaccagcctggcaacatggtgaaaccccatgtctactaaaaatataaaacttagccagatgtgctggcatacgcctgtaattccagctatttgggaggctgaggcaggagaattgcttgaacctgggaggcagaggttgcagtgagccaagctcacacaactgcactccagcctgagtgacaaagtgagactccatctcaaaaaacataaataataaaatagtaaaataaaaatgttaactgacagagacagagcctagagaggtgacaatgcaataacaatgccagaatgttctgagagaggacaggcaaacccagagctggccctgactctgcagccctgtactcctacgatctacctctgccctctcagtcccatctcctcaacatctgtgtgaggttaggcaagttatttaacccctctaagtcttagcctcctcttctgtgacatgggcatagtagtacccctccaatggggttggaaaggtcagtgaatccacatgggtgagacaccttggacagctcctggcacatagacacctcccagtaatactagcaggtgtgaggactgggatgaccccttcccattaaaccaggcagtttctcctggctcatgctgggcggcccaaaagtcccctccttaggaagccaccttagattctgccaactgtggtaactttgtctgcacctcagttatagcttttatgacataaaaatcatatgttcaggctgggtacggtggctcacacctataatcccagaactctggggagctgaggcctgcagatcacctgaggttaggagttcgagactagcctggacaatatggcaaaaccccgtctctactaaaactacaaaaattagctgggcatggtggcagccgcctgtaatcccagctactcagaaggctgatgcaggaggatatcttgaacccaggaggtggaggctgcagttagctgggattgtgccacagcactccagcctaggcaacaaagtgagactccgtctcaaaaaaaaaaaaaacaaaaaaacaaaaacccaaaaaactatgcatttatgctgggcacagtggctcatgcctacaatgccagtactttgggagtctgaggcaggaggatcacttgaggccaggagttcaagaccagtctggccaacatagcaagaccctgttatgtatgcattcaccctcctgcctcccctcccaggtcctgagcccctcaggggcaggggccaggtctgactcaccctggatcccagtagctggcacagagatgggctcactgaatgaataaatgaacaaaagtatgaatgactgtcatgcctgtgcagacagatggtgccccatgccatgaccttgtttacccgacctgctggggccctgccgtcagctgctgtgtggtcggggaatgcagacatccttaaatactgctgagcagattttcccggcttgcaggattgcatcaagagtcagggcgcagactcgaggctcaggctcccgacttcactgataactttaggcaagttattaacctggccaacgctcacttgaccattctgaagtgagggctttcttggggtactgtgagaaagaagtgagaggaagcttggtgcctagcacaagtaaatacttaatcagtgttagggccaggtgcaatgccatgtacctgtgaccgcagctacttgggtggccaaggagggagggttgctttggcttaggagtttgagaccaacctgggcaacatagcgagaccccatctcaaaaaagacaattaggtactgtgattattaataattatttttcaatcaacaagcattcagcagtgcccagcttttctgtaccctcagaatcttaaaacaaacaaacaaaaacaaaaaacaaaaaaccacccattgggaaatgttagttttagggttgagtatctcttattaaattaaggttctttagaggccaagtgcagcagctcacacctataatcccagcactttggaaggctgaggtgggcagatcacttgaggtcaggagttcaagactagcttggccaacatggtgaaactccgtctctactaaaaatacaaaaatcagccgggcgtggtggcacacgcctgtaatcccagctgctcagaaggctgaggcaggagaattgcttgaacctgggaggtggaggttgcagtgagctgatatcgtgccactgcactccagcctgggtgacggaatgagactctgtctcaaaaaataaaaaataggccgggcacggtggctcacacctgtaatctcagcaagggggggcagatcacctgaggtcaggagttcgagaccagcctgaccaacatggagaaaccccgtctctactaaaaatacaaaattagctaggtgtggtggcgcatgcctgtaatcccagctactcgggaggctgaggcaggagaatcgcttgaacccaggaggcagaggttgctgtgagtggagatcgcaccattgcatcgcagcctgggcaacaagagtgaaactccgtctcaaaaaaaataaaaaaaatacataaaaaacaaatggagtccttttttttttttttgaggcagggcctccctctgtcacccaggctggatggagtacagtggagtgatcacagcgacttcagccttgacctctccagctcaagtgatcctcccacctcggcctcccaaagtgctgggattgcaggtgtgagctaccttctgtagcctaagattctttaatatggatttcatggcaaaccaaatgtataaacttgggcaagtgacttaatctctctgagcctcagtttcctcttttgtgtaaagaatacatttccacaaatggaaggaataattgtaccaaacctataggattactgggtggcctttgagacttaagaaggtaggggagcagatatctggggtaagtggctgggtgtggtggctcacacctgtaatcccagcattttggaaggccgaggcgggcagatcacttgaggtcaagagttcaagaccagcctgggcaacatggtgaaaccctgtctctaataaaaatataaaatttaggccaggtgcgatggctcatgcctgtaatcccagcactttgggaggccaaggcaggtggatcacgaggtcaggagttcaagatcagccaggccaacatggtgaaaccccatctctactaaaaatacaaaaattagccaggtgcaatggcaggtgtctgtaatcccagctactcgggaggctgaggcaggacaatcacttgaacccaggtggcagaggttacagcgagctgaaatcgtgccaatacactccagcctgggcgacggagtgcgactccatctcaaaatatatatatacatatataaaatttagccgggtgtgatggcggtcacctgtaatctcagctacttgggaggctgaggcatgagaatcacttgaacccaggaagtggaggttgcagtgagctgagatcatgccactgcactccagcctgggtaacagactgagactccatctcaaaaaaaaaaaaaaatgtatgtggtaagagcactccaggcagaaggactagcccatgcaaaggtcctgaggcaggaaggtgcccagttgttcaagagcagacaccagttagctggagcagagggagtgagatggggcggggagaagacaaaggtctctgctagcggctcaatcatgcaggtccttgtgggctattgtaaagactttggcttttaccatctcactggatgagaagggggatttggactgttttgagccaaggagcaacaagatctgaagttagttccaacaggatcctgccttctactgtgtggacaggctgatgtgagcaaagttgagagcaggctactgagatagtcccagtgaggttaatgacttggaccagggttggggcagtagaggcagtgaaagtggtcaggttctggaaatggtctgagtatttgctggtgcattggagagtttcacgtaattcttgtgcagattcagcaagagagtttgccggcatgctttgcacagcccctggtacccagtaaggcgattattagcattggtgcttgctggaatcagatattccagaatattctgtcacagctcatcgttgccctcttcttttctgtgggtaaactgaggcagaaactcaggctgggtggaactctgcagcctcagctggagacctcgtctggccaaggactgtggggacacaggccctctaggctgccacctcatggtcccagcagagggcaccagaactgcacagaaagtctcactacccaagtgtctgagccaggccagactgtgctagccagacctgcccggggttcattcactgacctttattgagcacctactgtatgcccagccccaaacctggctctgctcatggaaagaacttcagtggaaacaggtcctgggatgaacaagggcctggcctggcctggtgatgccactatttccttaagaggagagtggacattccggattattgtcgggggagtctcatttctgctgctgtaacaaaataccacagactgggtcatttagaaaccatagaaactgatttcgtactgttctagaggctgggaagtcccagatcaaggtgccagcaggtttggtgtcgtgagggccactctctgcttccaagatggtccctccttgctgtgtcctctggaggggaagactgctgtgtcctcacgctgcagaaggtggaagggcgagagatggcaaaccaggcttacaagccctttgaaaagggccctcatcccatcctggagagctctgccctatcacattggcgattatgtttcaatatgtaaattttgggagatgcattcagaccacaggaggaagggaaaagaaagagcccccaggttgaaagccagtttaggtttgagtcccagcctttccccttgctgtgtgacctggagtaaattcctcagcctctgtgagtctcccattccaccccaggattgttgtgaaaacacagtaaggcaagcgggtaagaaagcacccagcaaggtgtcaagtgccccaccaggaggggtggggtggcaatttccagcattgcttggaaccagaatagcaacgtcttctgaggttccagaatttggactctgaacccattgagaagaatgaaatcaactttggcgtcaatcagccactgattgccatgtggcctggacgagtcatctcattcaacttcactttcagccggacgctgtgactcaggcctgtaaccccagcactttgggaagctgaggtgggtggatcgcttgagcccaggagttagagaccagcctgggcaacctagcgaaacctcgtctctacaaaaaaatacaaaaaattagctaggcctggtggcgtgtgcctgtagtcccggctactcaggagtctgaggtgggaagatccactgagcccaggaggttgaggctgcactccagcctgggcgacaggagtgaaaccctgtctcaaaaagttaaaaaaaaaaaaaaaaaggaaaatattttagaaaaagaaaaacaaattaatttttctcatttgtaaaatgggggtgattccagggcctgctccaaagggaatgaaacaaagttcaggagcggtggctcatacctataatcccagtactttgggaggccaaggtaggaggattgcttcaacccaggaggttgagaccagcttgggccacatagtgagacccctgtctctacaaaaaaaaaaaaaaaaaaattagcctggcatggtggcacatgcctgtattccctactcaggaggctgagacaggaggatcacctgagcccaggagtttgatgctgcagtgagctatgattacaccactgcactccagcccgggggacacagcgagaccctgtctcaaaaaacaagagaatgaagcatcctgcaggagccctggctcgatgcctggtagccactataaataaagaagaaccagcaggctgtgtggatgcaaggcccagtgctcccctgttctctgaggaggggggcattaagcaccctggggccccacgatgggcagcaagagtttgccgagggaggaaagcccaccggtggagtgggcagaggggttggtgtgtggacttctggagcctcaggaggaagggtgcgggttcccctggctgcagacgtccctgaggctgccctgcctcccccaggagagaccttcctgccctactacacgggccgcgccattgatggcatcgtcatccagaaaagcatggatcagttcagcacggctgtcgtcatcgtgtgcctgctggccattggcaggtagctggctcaacccccacgccctgccccgcacaccccgacctgcaccagggagggaagggagggcctgttcctaaggaagacaggggccagggaggccctggaaatgcccctggtgggcctgtccctcagctggtcaccctgggaaccggcttccacactgtcttagagcaccctagaaccacaccctctggtccctgaaaagggcttcagtcctcagggttccctgctcaccctccctggctgttttccaagtaggaatctggtcccaaacagaaccggctttgtctgagctgttctggaaggaagagggtctggctggcacatttgggtctcttgtcccacaactgtcccctttgccctcaccttgaggggggctcccactgggaatgagggggaccccgcagggatgccagccctggagtggggctgcggtggggctcccaggcctgccggcagcgggagggggcagccgggtgtggtcactggtctggaaggacatcgtgctataatatctcttatctgcaattagctcatttgccgcaggtattcggggcggcatttttaccctcatatttgccagactgaacattcgccttcgaaactgtctcttccgctcactggtgtcccaggagacaagcttctttgatgagaaccgcacaggttggtccttccagtgccctaggtgtcctgggggctgggccccacccctgtgggcttgcctggcactgaggaatgaaatgggcgtgtgggtggtctcagccctctgtcttctcctcctgctgttagttcaggctgggaacaccctgggcttggcctgtgtcctgggagctggcttgctcactgaggttttggtgtgggctgcggcctctgtggggcccaggccaggccacccgaggtccctgcaggagccaaggccttgctttccattgccccatggaaaccaccaggtccaggactacccacgcctgtggccgacagagaccctgctcccatgggggtcagcaggtgagggccaggggccacaacggggaagacgatagaatatccaccaagatccaagctctgagagacaccggcctgggtcgaagccctggttcctccactcacgaacttcacctctctgatcctctgttttcttgtctgtaaaatgggaacacggatagtagccaccccatggggtccttacacagctcttagcacaatgtccaacttaggtaagaagtgtctgcgctttcctgcccgccaccagccaggttgttatttccctagaagggaagaggagttaccccctctgccagtgacagggaggagacatgggtttgaagtctggctcagtcacggacaggctgtgtgactctacgggggccttcctgttctgagccccagcctcctccgctgtacagcgggatgtcatgaagcttaagcaagatgctgatgactgggattggctcagagtagccctcgaggggtatctgctcttctcccccaccccccaaccccgcccacaggtagggaggcccggcttcccagtgtctgtctcagaggccccttagcatcccccaccgccacccccaaggcccgggttgctgtggtgagagctgagccgcgtgtgttccaggggacctcatctcccgcctgacctcggacaccaccatggtcagcgacctggtctcccagaacatcaatgtcttcctgcggaacacagtcaaggtcacgggcgtggtggtcttcatgttcagcctctcatggcagctctccttggtcaccttcatgggcttccccatcatcatgatggtgtccaacatctacggcaagtactacaaggtaggcctgccctgtctctgctggggactgtgcgccctggcagcccccaaacatccccttaggaggggctcagggggccactaagggctagtgaaggacaggtcttgaggctgtgtttgcattcattcattcatttcttcgctcattcaataaataattattgaccacctgctatgtcccaggcactgggatacatcagtgaaaaagacaaggcccctgccttcctggaacttgtatctagtgtcagagacagatactaggtaccaacagcataaagaatgagaatccacaatacagtaaaagatggtcagtgctaaggagaaacatgaagtgagcagagggattgggagcattgggtgtagctgcaattttaaattggatttactggctgggcccggtggctcatgcctgtaatcccagaactttgggaggcacaggcaggaggaccacttgagcctaggagttcgagacaagattggacaatatagcaagaccccatctctacaaaaaaaaattttttttagttagctgggcttggtggcgcatgcctgtggtcccagctacctgggatgctgaggtggaggatcgcctgagcccaggaggtcgaggctgtagtgagcaatgatcgtgccactatactctagcctgggtgacacagcaagaccctgtctctaaaatgaatgaataaatacaagttaaataggtcttgctgagaaggggacatctgaataagggtctgaaggaggcgggcatcttgggaggtatgtgctgagcagagggcacagccagtgaaaaggccctgggttggaacgtgcctggtgtgtatgtgggggtggtgcgggcccgctgtgatgccatcgcgggcccgctgtgatgccatcatgggcaggctgctgtcccctctggccaccccacggcactgcttctgcttccgagctagggccgtgagccaggtttgacctcaccctcctcctgcttcctgaatgggcgggtgcccccgagccctaagggacagacaggctgggttcagacaggcagggctgtgaccctgtgacaggtacaggcaaccccctcacagtcacccaggcccacgtggggtacttctagagcaggggcttggatgcatgacggcctccaggtggtgccgggtaagtcattgtcgcagctccattggagcctttggtgttggtgacctgagaccagggtagcaaaggaagccatctcccacccagcccccggtgaggccactccccacagtcttctccagccacacaggtaggacctcttcccgaagttcctggtcacgagcctccccaccgtcctcactgagatgagaaagtaaatctattctttagagtctgagccatttctggcacgctgctccccaccccttgcttccggccttcccaccagcccctgggatggagcaagaaaccctggagctccccctcagcccccacctctgtgtgcactgcaggccctgccttttagttcagctaagggaggcctcaggaaggctctgtttgggttttccaccccatgcctgaatgtgttgtgtgtagccagcgagtcatctccacaaaccacacacaccgcccatggccaaacatgactcaggcaccctgcatgcttcctgcggctggggcgtgacacatggtcatgggacatgccagtgcatgctcctgtcctggactctcaggcagccttcctggctggcttgagaatcagcatagtgactcctgcaaagtgtgaacagctccacccaggggcctcttccaggactctggtgaacagcagcctgatggccgcacacttgggaccacttttcagctctgcctgtggtgacatgcacatggtgtgggcagatttcacaacccatggcccctgccaccatgtagaacttggctgggagttctggaatctctttatcaaccctcaggctctaacataatttatgttgatgatgtaaatggtgcccctttaatagttggtgtttcttaaatagtgtacaacctgaacaaccgtccaaggcatcccctgctcttccagcacagggtcaggtgttgaggccccttttctgaaaggattaccaaaaactgtccagtcatgaatagcctcttttgaatactggggatgacttaacgatcagcaccgtgccctatccttcaggagctgaaaccattgccccaagagcctctctggagttgactacctgagtgtgtcaaattgagccagaaggggatgggggagaaagggctagatcttgtctttttgtcctaggaacctcttgcatatagctggtgccagcgaagggtggaaaaacccagagaggcctgggggctccagtacatagtgaggctgttttggggtcttctccttcttgtccccctcctgtccatagaggctctccaaagaggtccagaatgccctggccagagcgagcaacacggcggaggagaccatcagtgccatgaagactgtccggagcttcgccaatgaggaggaggaggcagaggtgtacctgcggaagctgcagcaggtgtacaagctgaacaggaaggaggcagctgcctacatgtactacgtctggggcagcggggtacgtgcccctggccaggcagctctggctgtggagggatgggatgcaaagatgggggaagccctcgatctaggacatcagtcctgcatgttggtgtcaagctggtggagaatctgtctgtctttctttttttttttttttttttttgagacagagcctcactctgtcacccaggctggagtgcagtggcaccatctcagctcactgcaacctccgcctcctgggttcaagcgattctcctgcctcagcctcctgcatagctgggaccacaggcgcccgccaccatgcctggctaatttttgtatttttggtagagacggggtttcactatcttggccaggctggtctcgaactcctgagctcaggtgatccacccgcatcagcctcccaaagtgctgggattacaggcgtgagccaccgcgccctgctgagaatctttcccagaagcaaggctgcccctctcccagtcacctgacgtggggtggcagggtgggagctttcttttcccagctggggaaacatccttgctgaggtggggagtcagcaggtccctaggccactttcgggcaggtctcatgtcacagccacacacactcccgacagtgtctggcacactcccgggagtgcgtcacagcctctccttggaggatggggagcacttggatcatgtcactgctacactggacacacatgggaggtgggcaggtcagggcatagctgcggaggaatgaggagggtttggagtgagagggaggagggagctggtggtctacaggggagccaggggaaagaggatatctgggacttcctggtgctgccacctcccaaaagtatcagccaaggaggagaggaggggctaaggtccagctcagctagctgagcctcttagcaatccgtctgctggcagggggtgcctttgcagcttccaccaaggcacggtggtccagacagcagcctagttctggctgggcatgaggaggacagatggagtccctgactagggtgtgggctgccatgggtactcagactccactcccttcccagatgccccccaggcacaggaggaaggcatgggcgctcccatcacagccccttcttcacggaaccccactgggggaggagacagagagctcactgtgtgaccttagccagggcacttgccctctctgagtcatgctcttccccatgaggaggacgaatagttcccaggtggccaagctgaggagcctgggggtggcatgtgtgtgccaggacctcacaaagaaagccttgttctgtggccaagcccacagcctgctccagctggaggcctctgtagggaaatgctcggggcaggggaaggcatgagtgacaagccttggaagacacccctgccaacggccggcatttcagtttgtggctgggtctgccctcacctccccctgcagcctgggatgggtcagggaatggggatggtgggggatctaaggtcccctcgacccacatcccctctccctctgccccagctcacactgctggtggtccaggtcagcatcctctactacgggggccaccttgtcatctcaggccagatgaccagcggcaacctcatcgccttcatcatctacgagtttgtcctgggagattgtatggaggtgagaggccagtgtgtccggggatccagagagaagggaggagtttggggaagagggatcttaacagggtgggggcggggctccagggactctgacaatgtggtatttctctctaaggtaagtaggggagacagcatgatcatatcaagaatgataatactaggcagggcgtggtggctcacgcctataatcccagaactttgggaggcggaggcgggtggatcacttgaggtcaggagttcgagaccagcctggccaacatggtgaaaccccatctctactgaaaacacaaaaattagccaagcgtgttggtgggtacctgtaatcccagctacttgagaggagaattgcttgaaccctggaggcagaggttgcagtgagctgagatcgcaccactgtactccagcctgggtgacagagcgagactccgtcttgataaataaataggcaagccgagtatggtggcatgtgcctgtaatcccaggtcctcaggaggctgaggctagagaatcgcttgagcctgggaggtcaaggccgcagtgagccgtgatcacgccactgcactccaggctggacgacagagagagaccgtgtctcaaaaagaaagaaagggccaggtgcggtggctcacacctcaggaggccgaggcaggagaatcgcttgaacccgggaggcagaggttacagtgagccaagatcgcgccactgcactccagcctgggcaaccaaagcgaaactccatctcaaaaaaaaaagaaagaaagaatgataatactaccaacaagtgacagcaacaccctttagggacagaggtgatttcagaaaatggtcttaacagctctgtgagaaattgaagtgatgaaaagaaaactgaacctgagcggtggagtgactcgtccatcacatttgctcgggaacggggctcagggccagccgggcctgacttcctcccagcctacttccagcgtagtgcctcggaaatgcaagggtgttttagattgtcttgattttggtttccgcacaagcagatcctgagacagaattggcgtgcaacggatttgtttgggaggtgatctcaggaaacgggggtgggagtggaaagtgagacgtggaaggaaggaagtcagcagagtgagttgtggagccagttaccagtgtgggcaactgaggtgggatccttctagcggacagggtaggacaccagcaccagagtcatcccatctgagggccagggagctggggtgtttacacccaagctgccatcagccattgctcaaggtcagcctggagtgagggtgttaattctcttgtctgcctcgctcccacaaaaaagcccgcagcccgcaggcagtaagagattgggcctttgtgtgctgcgctgacaaaggctcaaggatgttggtggggtgttcctagcatctgctactcaggccattgcatctgctggagaatcacacctgccatattatttgactcagcagtaaatctgcccctaggaatccatgcttcaagagtactcacagcagtgggcgaagatgtatgtccagagatgttcagtgcagtgttgtttatttattatcattactatttgagacagtctcacattgtcacccaggctggggtgcagtggtgctttcatgactcactgcagccttgacctcctggactcaagtgatcttcccaccttagccacttgagtagctggggttacagtcacatgccaccacacccagctaatgtttttctttttaggttttttttttttttttttttgagatggagtcttgctctgtcgcccaggctggagtacagtggtgcaatcttggctcaccgcaacccctgcctcccgggttcaagctattctcctgcctcatcctccccagtagctgggactacaggcatgcaccaccatgcccagctaatttttgtacttttagtacaaaatttagtacaaaattgtattttcagtagaaatggggttgcaccatgttggccaggctgatctcgaacttctgacctcaaatgatccgcctgcctccgcctcccaaagtgctgggattacaggtgtgagccactgtgcccggccagctctggggttttaggtgtttactaccggctgttgctgttgtcttcacagtaacaggacacagtatgccgatatcacccccttatcaccaatgaggacattcagcacctaagagcctgaactcaggagacagatgggcctggattcaaatcctggctctgccacttctaggctctgtgacctgggccaagttacttgagccctctgtgcctgagattcctcatcagtaaaaaaggagataatgttagaacctacctcctaacatacagagcatgcttggccggacgcagtggcccacacctgtaatcccagcactttgggaggctgaggcaggcggattccttgagctcagaagttcgagaccagcctgggcaacatggtgcaaccccatttctactgaaaatacaaaaaattaactgggcttagtagtggctcatgcctgtggtcccagctactcaggagtctgaggttggagaattgcttgaacccgggaggcagaagttgcagtgagcaagatcacaccactgcactccagcctgggtaacagagtgagaccctcctctcaaaaaaaataaatagagaatacttaagaaaatgggccgttattatgatttacattcatattctatgtatttttacccaaggagaatatatttatttatagtacacattaagacccattttgaaaattgaaatcaagccatgtctggtgactcatgcctgtaatcccagcactttgggagggtgaggtgggcggatcacttaaggtcaggagtttgagaccagcctggccagtgtggtgaaaccctgtctctactaaaaatacaaatattatctgggcgtggtggcgagtacctgtaatcccagctactctggaggctgaggcaggagaatcacttgacttgggaggcggagggtgcagtgagccaagattgcaccaatgcactccagcctgggcgacagagggagactccatcttaaaaaaaaaaaaaaaaagctatgctatcgcaattgaaagatcaaggctggattcccactgtgccacacccctgccggttccttcgcttccatctgctcctgtggggatgatggcacccactcagctggatggccggtagagtgctagtgatgctgctgtcctcagctccccttactgtcgttatctaatgcaccagtgggtggtcaggtggcctcctgcatctccccgccagaactccttgctttccctatacctgcctcctctctagtagcaggggtgggtcccaggagtcgggtatcggtgggacaggaacgcgtgtctcctctccccagtccgtgggctccgtctacagtggcctgatgcagggagtgggggctgctgagaaggtgttcgagttcatcgaccggcagccgaccatggtgcacgatggcagcttggcccccgaccacctggagggccgggtggactttgagaatgtgaccttcacctaccgcactcggccccacacccaggtcctgcaggtgagggcgcggcttgaggcctgccagaatcagcctttccgtcaccccatttctggtgcacctcctatacaccaggctgtggcagggcagctgggaatatgtcaggcaagatcattgccctccaggagttttgggctccagttggggaagacagatacttaacagaatgattcccgataataagtgctagaaagaaaatagatcagggtgctgtggtagggatggtccatgggaatggtggtaacagtcaagaaggggttcttggaggaggtgacatttgaggtgagacctcaccaggggcctccctgcagagagaacattccagacagaggaaacagcaaatctcaaggtgcttccaagtcctagtgtcttagaaagaacgtttaggggccagcagtgcccaagcgagggagaggcacatggggtgggctgggaagggcacccacctgtgtccaaggtcagggcatccagtcctgggacctgagccgataaccccgcactgtgcctgtgtgttctttgcagaatgtctccttcagcctgtcccccggcaaggtgacggccctggtggggccctcgggcagtgggaagagctcctgtgtcaacatcctggagaacttctaccccctggaggggggccgggtgctgctggacggcaagcccatcagcgcctacgaccacaagtacttgcaccgtgtggtatgtgcacgggcctgggccacacttctccgccctttctgcatctaaccgtctttcttgtgagctgtaacaggtgcggaagagggcactagagataaatggacagttcaaagaattatcaccaattacaatgccctcctagagaaacagaacattcttgtccagacgtggtggctcacacctgtaatcccagcattttgggaagctgaggctggaggatcccttgaggccagcctggacaacatagtgagactccgtctctattaaaaaagaaaaaaagggcagatgtgatggcccacacctgtaatcccagcactttgggaggccaaggcaggtggactgcttgagctcaggagttcaagaccagcatggccaacatggcgaaaccccatctctactaaaaatacaaaaattagccgggtgtggtggcacatgcctgtaatctcagctcctcaggaggctgaggcacgagaatcacttgaacccgggaggtagaggttgcagtgagccgagactgggccactgcactgcagcctgggcaacagaataagactctgtctcatgaaaaaaaagaaatagaacattctggcactccagaagcctcctaccccccgccatgtgtcccttctctttccccaagaagtaatgtgttgacttttagagtcttcatgctcttgcttttcattggttctgccatctctgtgtgcacccctgagctctgtgctgcctgctcggaacttcatctgggtagaatcgtgattggtgtgtggattagtttgtgtcttgtgtctcccactcgacattgtgagtcatccaggttgaggctggggacagagttcattcattttcattgctgggtggtaacccactatacatatgtttatcacaattatttatgcattctgggtatttgggttgtttccctttatttttgttttttgagatgagtcttgctctgttgcccaagctggagtgcagtggtgagatctcagctcactgcagcctccgcctcccgggttcaagctattctcctatctcagcccccctagtagctgggattacaggagtgcgtcaccatgcctgactaatttttgtatttttagtacagacagggtttcaccgtgttgcccaggctggtctcgaacccttgacctcaggtgatcagcctgccttggcctcccaaagtgttgggtttataggcgtgagccaccgtgcctcgctgggttgtttccctttatattttattttatttatttgtttatttttatttttatttttttttggagacagagtctcgctctgtcgcccaggctggagtgcagtggcacgatctcggctcattgcaagctccacctcccgggttcacgccattctcctgcctcagtctcctgagtagctgggactacaggtgcacaccacaacgcctggctaattttttgtatttttagtagagacggcatttcaccatgttagccaggatggtctcgatctcctgacctcgtgatccacccgcctcggcctcccaaagtgctgggattacaggcatgagccactgcacctggcctatttttatttttttgagaaagggtctccctctgttgcccaggctggagtgcagtggcacagtcacaacttactgcagcctcagagtcctgtgctcaagtcatcctcccacctcagcctcccaagtagctgggactgcaggcacatgccattatgcccagctaattttatttttttgtagaaatgtggtctcaccatgttgcccaggctgatctcaaacacctggcctcaagtgatcctcctgcctcagcctcccaaagtgctgggatgacaggtgtgagcctctgcccccggcctgtttttcagttttgttttgttttgttttgttttaccattaccaaaaataccagtgtgggatgtggacaattttgtctatgttttctgttgtacatgagtacgttctcccaaggtataatcctaagagtagaaagcttggtgatagtggatgtacatccccaactgccgtagtttctgtcacaacagctatccccaggtggttataccaatttacattttacaatttacattctactagcagtgaaggagagtttcagctgttccacatttaggtcatctccagtactcaaaataggctattcatgactggacagtttttagtaatcctttcaggaaaggaaccataacacctgtccctgtgctggcctaagagcagggatgccctggatggttgctcaggttgtgcactgtccaagaaatataaactattaagggagcaccgtttacatcatcaacataaattatgtgaaagcctgagtgttggcacagagattccagaactcctagccaagttcgagatggtggtgagggccatgggttgtgaaatctgcccacaccatgtgcatgtaaccagaggtagattgttgtgaaatggtgccaagtgggaggccaccaggctgctgctcaccaaagttttagaagagccccctgggcagagccgttcacactttgcagtaggtaccacgcttcgattctcagacacctaacattgtcagtcctgaatttttgctaactggtgagaatgtagtggtagcttattgtggtcttttgtgttttcctgatgactgaagatattaaacaccttttcatatattggccatttggttttccttcatgaatagcctctcttaattatttatttatgtactttttcttttctttttttttttttaagatggagtctcgctctgtcgcacaggctagagtgctgtggcatgatctcggctcactgcaacttcttcctcctgggttcaagcgattctcctgcctcagcttcccaagtagctgggactacaggcacataccaccacacccggctaattttttgtagttttagtagagacaaggtttcaccatgttggccaggctggtctcgaactcctgacctcaagtgatccacccgccttggcctcccaaaatgctgggagtgagccatggcgcctggactatttatgtactttttgtttgagataggatctcactctgtcacccaggctggaatgtggtggtgtgatcatggttcactgcagccacgacctcctgggctcaagcaatcctcccacatcagcctcctgagggactataggtgcacaccaccacatctggtcaattttttttttttttttgagatggagttttgctcttgttgcccaggctggagtacaatggcacgatctcagctcaccacatcctccgcctcgaggggtcaagtgattctcctgcctcatcctcttgagtagctgggattacaggcatgcaccaccacacccagctaattttttatttttagtagagacagagtttctccatgttggtcaggctggtctcaaactcttgacctcaggtgatccgcccacctcggcctcccaaagtgctaggattacaggcatgagccaccgtgtacacctggccaatttttaattattttgtagagacgggttctcactgtgttgctcaggctgatctcaaactcctgggctcaagccatcctcccaccttagcctcccaaactgttggtgttacaggtgtgaaccaccatggctggcctctatttttaaatttaaaatgttaatttctataaacataaaacaataaaatgctacaagctaatcatattctcatagttgtaatgaatcttgtaactaagacatgaatgttcccctccaccttaccttttgaattccaccacatggaggtagccagtgttaacagtttagtaaatatccttttcaatgtgtttcctatctttatagaaatatatcaatatatgaaggtacacgtttataatttttttaaacaaaaatagaatcatgctgtgtatatgtatctattacaattcagttttaaggatgcactgtcactatttaaccaatccccatttatggacacctagattgtttccattttaatttaattaattaactaattaacttttgctacttatggtgttgcaatgatatcttccatactatatatttttttcattttgtagatatggggtctttctgtgttgcccaggctggtcttgaactcctagactaaagccattctcctgcctctgcctccctaagtgctgggattacaggcatgagccaccaggcctggccatactattatttttgtaggcccagattcctgaaactggaatctagagatgatagctcctttaaattgttctcttagaagggaggggaccaccgccagggcagtctgtgtgacctggagccctgctgtggcctcttgcttcctgagatgagcagactcattcacagcaacattctatattctatccctctttctttttttcaggacagggatggccagtgagctttctcttagaggtcagggaacttggcttatcccagagcagcaaatgtagcaggccccagtttgctgattaggggaggctgagggcttgtgggtacaggcgggagtcactgttggggaagaagagaggcagctcagtgcagtcactgggccctgatcaggtttcaggcctgagactgctggtgtctccaggccccaggcagcaaggctgctggggacagctggatgaacacattcctggcctctcatgctccatgctccctcctccccagatctccctggtgagccaggagcccgtgctgttcgcccgctccatcacggataacatctcctacggcctgcccactgtgcctttcgagatggtggtggaggccgcacagaaggccaatgcccacggcttcatcatggaactccaggacggctacagcacaggtgtggagctgggggtggcccctctcctgggcccacagggtcaccctcagggacataaccctctgagttaagcactgccccctgccacctgctcttttttttgtagagatggggtcccgctacgttaccctggccagactcgaacctcctgcgctcaagcaatcttcctgcaatccccaaagtgctgggattacaggcatgagccactgtgctgtgactcagcaaaatatttattaagtaaattattatagaagcccatacactggaatattatgctgctgggaaaaagaggaagtagaagaagggggaggaggtggaggcggaggaggaggtggaggcagaggaggaggcagctctccatatagcagtatggaaaggtcactgagataggatgctgagtgagaagagccaggtgcagagcataaggagctgggttttttttttcctattaaaggactggggagataaaaataacatgttcatatttgcataaagaaactagacaaggacatgtaagcaactaatgaaagacgttttggtgggagcaggagggaactgaagaaagaacttaaacttttcattatttagagttttatatatttttagtttttttagttttttttttttttttgaggcaggggcttgctctgtcacccaggtgggagtgcagtggcgtgatcacggctcactgcagcctcaacctcttgggctcaagccatccttccaccccactttttatttttgttgtagagacggggtcttgctatgtttcccaggctggtctcaaattcctgggctcatgcaatcctcctgcctcccaaagtgctgggattacaggcatgagccattgtatccagcctgtatttttagatttttgaaccacacgaatagccccttttcaataattaaatatatacaatgtataggggggttggggagatgttgatcaaaagataaaaattttcccttaggaataaggtcaagagacctgttgactatagttttttgtttgtttgtgttttaattgagacagtctcactctgtcgcccaggctggagtagagtggagtaatcttgcctcactgcaacctccgtctcccaggttcaagcgattctcctgcctcagcctcctgagtagctgggattacaagtgcccaccaccacaccttgctaatttttttttgtattgttagtagagacggggtttcactattttggccaggctggtcttgaactcctgacctcaggtgatctgcctgccttggcttcccaaagtggtgggatttcaggtgtgagccactgtgtctggccagctatatttagtaacagtgtactgtgtacttgaaaatagctaagagagtagattttaagtgttctctctttaaaaaagtgataaatatgtgagataatgtatatgttaactggcttgatttagctattccacagtgtatatgtatttcagagcatcacgttgtacaccattaaatacaaactatttttacttgtcaatttaaaagaatttttaaattaaaatatactaaatacactaatttttaaaaaaattacctcgatatgaacttaagtagttctagtaattaattgatataataaatatatattattttagaatagtgttttgaaattcagtagaggtggtggttgtgcaacattgtgaatgcactaaatgccactggattattcactttttttttttttcttgagatggagtctcgctctgtcgcccaggctggagtgcagtggcgcgatctcggctcacggcaacctcttcctcccgggttcaagtgattctcttgcctcggcctcccgagtagctgggattacaggcatgtgccaccatacccggctaattttgtgtatttttagtagagacagggtttcaccatattagccaggatggtctcaatctcctgaccttgtgacccgcccaccttggttggcctcccaaagtgctgggagccaccgtgctcagcccggattattcactttacaatggttatgtttatgttatgtcagtttcatctcaatgaaagaaaaatgaaataataaagaactggtggcgtggccaggtgcagtggctcacgtctgtaatcccagcactttggaggccaaggcaagaggatcgcttgaggccaggggtttgagacagcttgggcaatgtagtgagaccccacctctacagaaaaatattttaagttagccaggtgtggtggcatgcacctgtagtctcagttactcagaaggctgaggctggaggattgcttgaacccagaagtttgaggctacagtaagcagtgattgtactactgcactctagcgtgggtgagagagtgagaccctgtctctaaaataataataattgattgactcaatttcctattgatggacatttgagtctatttgttttattttttgcaataacagcgctgtgggtcacaggtgacctgtgtctatattgttgtgcatgggaggaagtcggtccatggggaaaattggtccaggtgggcttgcggggccacaggccacacatctgtggtgaatacacacaacctttgcactgcacagactcatagacccagggttattgctgcagctcttcaagccatggggctcgctccaactccccttctccaggaggacgggtgagggcctgtctccctgcagcctcacctgcactgtgtgctatcagatgtttgggtttctgccaaatgaatgagtgaaaattggtaacttgctatcaatttgcatgtaggcttaatctgcatgccccttatgagttgggtggggggaacatcatttcatgagctttcaagttgtgggttccagcccgccctttccacagctgcagggcagggcctctcactcttccccggtgctgcccggcctcacccattgctaaattgtctctgtgcctccaccatacagagacaggggagaagggcgcccagctgtcaggtggccagaagcagcgggtggccatggcccgggctctggtgcggaaccccccagtcctcatcctggatgaagccaccagcgctttggatgccgagagcgagtatctggtgagtcacagggtggtgggcaatgcgggggcaggagcggctccaggtggccagagcccccatcgcccagcagatggatgctgagaagagacgggccccaggagctctcccagactatcagcctcctgggctggtgaattcctggtgttgagagtggggagccaggagccactctggacccagcctccaggctccaggcagagctgtatggtgtggggcaagagaaggcatcagaatggggagacctgggtcatgagtggtggcttacacctgtaatcccagcactttgggaggccgaagcaggtggatcacctgaggtcaggagttgcagaccagcctggccaacatggtgaaaccccatctctactagaaatacaaaaactagccaggtgtggtagcacatgcctataatcccagctacttgggaggctgaggcaggagaattgcttgaacctgggaagtggaggttgcagtcagccgagattgtgccactgcactccagcctgggcgacagagccagactccatctggctcaaacaaacagacaaaacaaaacaaaataaaataggcccagtatgatggctcatgcctataatcccagcactttgggaggccaaggcaggtggatcacttgaggtccggagttcgagacaagcctggtcaatacagtgaaaccctgtctctactaaaaatacaaaaattagctgggcatggtggtgcatgcctgtaaccccagctactcgggaggctgaggcaggagactcacttgaacccgggagatggaggttgcagtgagctgagattgtgccactgcactctagcctgggcgacagagtgagactccatctacaaaaaaaaaaaaaaaaaggctgggcgcagtggtttatgcctataatcccagcactttgggaggccgaggcgggtggatcacctgaggtcaggagttcaagaccagccgggccaacatggtgaaattccatctctactaaaaatacaaaagtccgccaggtatggtggcaggtgcctgtaatcctagctacttgggaggctgaggcaggagaatagcatgaacctgggaagcagaggttgcaatgagccgagattgcaccactgcactccagccttggcaacagagtgagactccatctgaaaaaacaaacaaacaaacaaaaacaaaaaacagaatggggatacctggattagcagctccgtcctacagtttataactgtgtgacctcaagctagtgcttcccctctgagtcgcattctcactggtcaggtgggcccagtcatgtatttgcagatggctagcaacctcagtctatgcgcggattgattcatttgttacacagagagttactgagctcttctcaggcaccaggcaccaggcaccattctggggttatcgtgggctaactagacaaagacccttgtccccatggtgtttccattccagtggggaaggcagataagaaacaaggaaggccaggcgcggtggctcacacctgtaatcccagcactttgggaggccgaggccaggcggatcacaaagtcaggtgttcgagaccagtctggccaacatggtgaaaccctgtctctactaaaaatacaaaaattagctgggtatggtggcgggcacctgtaatcccctagctacttgggaagctgaggcgtgagactcgattgaacccacgaggcagaggttgcagtgagctgagatcgcaccaccgcactccagcctgggtgacagcaagacttaaaaaaaaaaaaaaaaaaaaaggagggggaagggaaggaccagaagactggagggccagggtagagctgatcccccattcaccaggtgcctcattgtgtctggccctgagctgtctccctttaagaaaaacccaggaagctggccatcgtttgtgaactgagcctcagagaggttaagcatcagcccataggccgtggcatgaagcacggttgcgggtggggcgtccgtgccatgcaagccaggcccccactgtccccgcagatccagcaggccatccatggcaacctgcagaagcacacggtactcatcatcgcgcaccggctgagcaccgtggagcacgcgcacctcattgtggtgctggacaagggccgcgtagtgcagcagggcacccaccagcagctgctggcccagggcggcctctacgccaagctggtgcagcggcagatgctggggcttcagcccgccgcagacttcacagctggccacaacgagcctgtagccaacggcagtcacaaggcctgatggggggcccctgcttctcccggtggggcagaggacccggtgcctgcctggcagatgtgcccacggaggcccccagctgccctccgagcccaggcctgcagcactgaaagacgacctgccatgtcccatggatcaccgcttcctgcatcttgcccctggtccctgccccattcccagggcactccttacccctgctgccctgagccaacgccttcacggacctccctagcctcctaagcaaaggtagagctgcctttttaaacctaggtcttaccagggtttttactgtttggtttgaggcaccccagtcaactcctagatttcaaaaacctttttctaattgggagtaatggcgggcactttcaccaagatgttctagaaacttctgagccaggagtgaatggcccttccttagtagcctgggggatgtccagagactaggcctctcccctttacccctccagagaaggggcttccctgtcccggagggagacacggggaacgggattttccgtctctccctcttgccagctctgtgagtctggccagggcgggtagggagcgtggagggcatctgtctgccatcgcccgctgccaatctaagccagtctcactgtgaaccacacgaaacctcaactgggggagtgaggggctggccaggtctggaggggcctcaggggtgcccccagcccggcacccagcgctttcgcccctcgtccacccacccctggctggcagcctccctccccacacccgcccctgtgctctgctgtctggaggccacgtggatgttcatgagatgcattctcttctgtctttggtggatgggatggtggcaaagcccaggatctggctttgccagaggttgcaacatgttgagagaacccggtcaataaagtgtactacctcttacccctaacctctgacttctacttgggccaactgcctcatcgcccagttaggtttttccaccagaccacggctctcctctcagccctctctggtggagttgcagagagactttgggtggtccagggcctccccctgtgtctgggagccccatctgcactcctcccatcccagggtctctggtgtagacattcctgtctgcctgtctccacggggattgcgcagggggatagagacgttgccttgaaatcccaggggcctctgtgcttcccgggacagctgaactgaggcccaacaaatgccacctgttcttttccatcggggcccaggcacccgacacccaccccaatccatgcagtaaagaaatattacccaggaggacagctcaatcagcagggaggtttgggcccggacacaggaagacccctgcggtggttattcttacttgctgaattgtgaagaactctggggtcccaggaggagggctctgtgccaactggtagagtagtatttcaatttttttttttttttttgagacagagccttgctctgtcacccagattggagtgcagtggcacaatcttggcttactacaacctccacctcccgagttcaagcgattctcctgcctcagcctcctgagtaactgggactacaggcacccaccaccacacccggctcatttttgtatttttagtaaagatgggtttcactgtgttggccaggctggtctcaaactcctaacctcagatggcctgcccaccttggcctccctaagtgctgggattataggcgtgagccaccgcgcctggccagccttgtctttctcttataaaagcacttgtcattggatttagaggccacctagataatccgggctgatctcatctagcggtcctttgcatctgcaaagacccttttttccaaatacggtcacttcacaggttcaggggtttgacaagggaagcttttgggggccaccactcagcctgctacagaggggaacttgcaaccttggttgaagttaacctcaggacttcctttttgattttaggaagcagagggggttaagttttcagagacttagcatatcttcagatgtttccagagaagttggaaattccaattttcatgtgagatcagctgttttttatgtattggctcaaattattttgacaaaaccgaggaccaacaagcacatgtgtagaggtggtctccagcctgtgcatctctagtttgtagcgtcagtgttggacattcctgttctgcaaagtccctcgcaaggggcttcctggccccagcccagccccgttccagtctaagctcctctcccatctgcctgtctcttctcatccctgcactttcaggctgagaattccagattcttctccctctcctatggagttagctccagtgccttgatttgtaaacccacacccaaaagtgcgccataggcagacaaaagaaccttccagagaccgaattaccttctttttaggaggtacataggagttttaaaaaagtaatgtttaggccagatgcagtggctcatgcctgtaatcccagcactttgggaggccaaggtgggtggatcacgaggtcaggagttcaagaccagcctggccaacatggtaaaaccctgtctctactaaaaatacaaaaattagccgggcgtgttggcacacgcctgtagtcccagctactcgggaggctgaggcaggagaattgcttgaatccgggaggcagaggtttcagtgagccgagatcacgtcactgcactccagcctgggtgacagagcgagactgtctcaaaaaaaaaaaaagtttaattttgaaataattttagatttacagaaaagtcacaaaacaatacagaaagttcccttatgccccacccctcacagtttctcttctcttaaaatcccacagtactggggtacatttgtcacaattaggaaaccaacatagcatgtcactatcagtgaaactgcaagctgtatttgtgtgtcactagttttcttactaatgtcctctttctgttccagtgtcccacattacatttaagataggagtgtttttgtttgtttgtttgtttgtttttagagacaggttcttgctctattgcccagactggagtgcagaggtgctatcacagctcactgtagcctcaaccttctgggctcaagtgatcctcccacctcagccttcagagtagctggggctacaggtgcacatcgccatgcccagctaattttttcttttgctttttttttttttgtagagacaggccttgctttgttgaacaggctggtctcaaacccctggcctcaatcaatcctcccaccttggcctcccaaagtgttgagcttataggcatgagccaccacgcccagctagagatataatgttttcttttgtttgttttattttggcagggttttttgttttagtttttgagacaggatctctctctgtcatccaggctggagtgcagtggcacaatcttagctcgctgcaacctctgcctccctggttcaagcgattctcctgcctcagtcttttgagtagctgggactacaggcgcctgcaccacacccagctaatttttttgtgtttttagtagagacagtgtttcaccatgttggccaggctggtcttgaactcctggcttcaagtaatccacctgcctcggcctcccaaagtgctgagattagaggtgtgagccactgcgcccagcctaatgtttttaaaattgtttttattgcagcaacatgcagacaatataaaacttatcattagtgacatctagtacacttatgatgttgtgtaaccatcatcattatctaattccaggacattttcatcaccctaacagaaaaccctatacccattaacagtcactccccaattcttcctccacacagcccctggccgccagcattctaaaatctggctctgcagattggcccctctggccttttcatgtacatggaaccctatactacgtggcctttcgtgtctggcttctctcatcatgtgtacaaggtccaaccatgttgtggcatgaatcagcactttattccttttcatggctgaatgatatcctattgtatggctatgccacattttgtttatccattcatctgttgatagatatttgggctgtttccacctttgggctattgtgaatagtactgctattagtgctgctaatagtgggaacattcatgttttgttgttgttgttgttgtttgagacggagtctcgctctgtcgcccaggttggagtgcggtgatgcaatctcggctcactgcaagctccgcctcccgggttcatgccattctcctgcctcagccgcccgagtagctgcgactagaggcgcccaccgccacacccaggtaattttttgcgtttttagtagagacggggtttcaccgcgttagccagaatggtctcaatctcttgacctcgtgatccacccatctcggcctcccaaagtgctaggattacaggcatgagccaccgcgcccggcccaacattcatgttttttttgtgggagtttgctttcgcctctcttgggtagatgcctgggagtggaattgctgggtcccatgagaactctgtgctcaacgttttgaggaactgccagactgtcttccacagcggctgcaccattttgcattcccaccagcaatccatgagggttgcaatttccccacatcctcaccaacacttgttattttctggttttgtttttgtttttaattatcaccatccagggccgggaacagtggctcacatctgtaatcccagcactttgggaggctgaggcaggcagatcgcttgagcccacgagttcaagaccagcctgggcaacgtggtgaaacctcatctctactaaaaaatccaaaaactgctagccgggcatggtggcacacacctgtggtctcagctgttcatgaggctgaagtgggaggattgcttgaactcggaaggtggaggttgtggtgagctggtatcatgccactgcactccagcctgggtgacagagtgagactctgtctcaaaaacaaacaatataaaattgtcaccatcctggtgggtgtggagagttatgacttttaaagctgacttttttctgttacaattaatttagcaaatgtcactgtcctccttctgtcccacacagtgtgctgggtaaaccaggagaaagtaattgcagtcgagggctttgggaacagcacagttggccagagagacagatgaggaaaacaagcagggatgagagagaatgaagaggagcacggcaccccagggctggcttagtcctggcgccaggacttagtttactctgtcattgtttctttcccacattagagtttgtcttcatcactgctgtattccccagtgcctagaacagtggctgacacatagtatgtgctcagtaaacagccattaaagaaatgtttgagctgagcatagaggcccatgtctgtaattccagctactcgggaggcttaggtgggaggatcacttgagtccacgagtttgaggctgccatgggctatgatcgtgccactgcactgcagcctgggcaacagagcatgaccctgtctctacaaaatttgaaaaagaaaggaatgattgaactcttcgatatgccgtaacatagtgtgaaaacaatgaacacagtccaatcacctcatttaacagacagggaaactgaggcccagagaaaagaaatgactgcagggttataaatgtatttagcagaatggccaaggctggaacccaggtccccacactccctgctgctgccttcgtctggagagtgtatttcagtttccaacttgccagggctaaagacgaccccaatcccaggaagatggcagactcagcccaagtcaatgcctgaggcagctgctgagccatgagaggtctctgaagtgacttggggtcctaggagcccacagggaccctggtgatgacttcagggtgaagatgtgcacaaagcaccttgcgaggcagagccccttccccatgccccctgctatctgctgcagctcccctgtcgactggactggtctgtgtcaacctcactctgtgtcggcaggttcaaaagccacacctgagaaaacggaaacagcacagaggagggttaagcccgatggccctggctcttcagggttttgttccagaacttttggggtcataaatttcttgggaaatttgatgaaaattctaggaactctcctcagaaaaatacccatgcacataaagcattgtatgcaacttgtgggaaacgtgtggtattttacaattcctctgtcagggggccctgagttaaggaccgttgctccactgggattaacaattaagaattaaaaattagccaatgtaagtatcagtgtggctgggcgccctggctcatgtctgtaatcccagcactttgggaggccaaggcgggcggatcacgaggtcaggagatggagaccatcctggctaacacagtgaaaccccgtctctactaaaaatacaaaaaaaaattagccgggcgtggtggcgggtgcctgtagtcccagctactcgggaggctgagcaggagaatggcgtgaacccgggaggcggagcttgcagtgcgtggaggtcgcgccactgcactccagcctgggcgacagagcgagactccgtctcaaaaaaaataaataaataaataagaagtactggtgtaaggcaggacacagtggtgcacgcctgtagtttcagctcctcaggagcctgaaacgggaggattgcttgagcctgggaggttgaggcagcagtgagccatgatggcgccactgcactccagcctgggcgacagagtgagaccctgtcttaagaaaaaaaatgccgagcactgtggctcacaactgtagtcccagtactttgggaggctgaggcaggtggatcacttgagtctaggagttcaagaccagcctgggcaacatagtgagaccccatctctactaaaaactttaaaaaaaagaagaagaaaaattagccaggtgtagtggcgtgtgcctatagtctcagctactccgaaggctgggatgggaaaatcgcttaagcccaggaattcaaggctgcagtgagcccataattgtgccactgcactccagcccgggtgatagagcgagaccttctctctaaacaataaaataataataataatagattggaaggctacacaaccaattcatgttggagtttgtctgggtattgaagacaaaagcatgaagatatgcaataccttacttctttaagaataaaaatagacttggctgggtgcagtggctcacacctgtaatcccagcactttgggaggccaaggtgagcggaacacttgaggccaggagttcgagaccatcttggccagcatggcaaaacccatctctactaaaaatacaaaaattagccgggcgtggtggcacatgcctgtagtcccagctactcgggaagctgaggcaggagaatcacttgaacccgggaggcggaggttgcaatgagctaagatcgtgccactgcactccagcctgggcaacagagtgagactccatctcaaaacaatgaagtccatatttctaaaaaataaaaataaaaaaattaaaaagactcaaagcaaagagaggaaatcgttagcaatggctagtcctgagcggtgggtaccatgtgtttgttatattgttctatgtacatttctgaatactagaattttcttcaggggtaggagagggaacactgtaaacaaactaaacaaaccctggcatgataagtgctgctgtggcccaggaagacttcctgggagaaatggaaagcagctgttctgacttctgttgactgaaaatagcagtcgttaagccacccaacagcaagccagtgcatccggctgagaacctggcccagacctgagcggccggccgggcgtctccacctcctccctccctagccgcctctattcaatgagcccagcctgaaacaggggcctggcattctagacagttccacagagaagaaactctggaacccagcactgacacagccattgctgctgaccatttgtttctggccccaggtaaggaagctgttatttcaaataataatacggacaattttttaaattttttttttggcagagggagctcagaaggaggttaattctttaatgtttgctttttgttttgttttgagacagagtctctgtctcccagggtagagtgcagtggcgcgatctccgctcactgcaaaccccgcctcccatattcaagcgattctcctgcctcagcctcccgagtagctgggattacaggcatgtgccaccacacccagctgatttttgtatttttaatagagatggagtttcatcatgttggccaggctggtctcgaactcctgacatcaggtgatccacctgcctcgctctcccaaagtgctgggattacagacgtgagccactgtcctcggccaatgtttgctttttaaattgtggtaaaatacacataacataacattaaccattgcatttatttattattgttattttttagagacagggtcttgctctgttgcctagcctggagtgcagtggtgccatcatagctcacttcagccttgaacttctgggctcaactgatccttctgcctcaggctcctaaatagctgggactacagcctgtgccaccatgcctggctaatttttagattttctgtagagacagagttgtggttatgttgcctaggctggtcttacattcctagtttcaagcgatccttctgcctcggcctcccaaagtgctgggattacaggtgtgccccatcacgcccagccaaccattttaaattgcatgatccagaggcattaagcagactcccaatgtttcctttgacatttagcaagcatatttattatcttcttagatctgaatgaccagcctgcagatatcagaaccgagatggattgatgatgatgacaatgataaccattcaggtataaaacattttcagtgcagcaaacacgagtctatgcgctttatgtgattttttttttaagacaggggtctcactctgttgcccaggctggagtgcagtggtacgatctcacctcactgcaacatctgcctcccagactccagtgagcctcccacctcaccctcccaagtagctgggactacaggcatgtgccaccatgcctggcaaaattttttttttttgtattttttgtagaaacggggtttcaccatgtcacccaggctggtctcaaagtcctgacctcaagtgatcctcccaccttggcctcccaaagtactgggattacaggtgtgagccactatgcctggcccactttatgtgactttaacgcttttaatcctcacaacaagtctatgaagcagctactacggttaatgcagttttttcaaaaaagaaaaatgaggttaagtaacctgcaaaaattaagtggcacagcactgggaactgaacacaggcagcccgaaccctgaccagagccctgaaccttttccctagactggggacaggtttataggcttatctaatctccacccaaattattttccacctttgccttttttttttttttttcctttgcagttgtcactaagggctgcttgttgcacctcaggagctggggatagtgaaggagatacctgtgctgagtcactaacaggaaagggctgagaaagaagcatcgccaatggtttctctttcctggtttttattctttcctcagagaggaggaagttgaccatttaaacaggtgagttggctgggcgtggtggctcatgcctgtaatcccagcactttgggaggccgaggcaggcggaccacttgaggtcaggagttggagaccagcctggccaacatggtgaaaactcatctctactaaaaacacaaaaattagccaggtgtggtggggaggctgaggcaggagaatcacttgaacccgggaggcagaggtggcagtgagccgagattgtgcctctgaactccagcctggacgacagagtgagactccatctaaaataaataaataaataaataaataaataaataaataaataaacaaacaaacagatgagtcacccagggggaggtcctaacagcgacctaaggtgacagtgacagtgcctcacattattacagctctttacctttgactacctgagatcagtcattcagtaagcatttattgagaacctccgtctaccagaaactgtgctaggttgtgggtcacagtggagactaagaggtccgagatcacctacatcctactgggtaataaactccagatggtgaaaagatggcagcagacaagagagtgacttgggagaggagcactgtttgagctggggtggtctggggaggtgatatgggagctgagccctgaatgacaaggaggtaccagctttgggtatctagaggaaagaatgatcccaaccacagtctggcacttcctcaaaaagctcaacatggacctgggcacagtggctcacagttgtaatcccagcactttgggaggctgaggcgggaggattgcttgaagccaggagtttgagaacagcctgggcaacatagtgggaccccatccctacaaaaatttaaaaatcagccaggcgtggtagtgcataccggtcgtcccagctacttgtgtggctgaggcaggaggatcctttgagctcaaggaggttgaggctgcaacgaaccatggtggtgccactgcactccagcctggatgacagagtgagacctcgtctctaaaaataataaaataaagccaaaaagtgcaaacaatccaatgtatgaatggataaacaaactgcaaaccgtggtatgcacatactgtgggatatgattcagctgtagaaaggaatgaagtgctggtacatgctataacatagatggtccttagaagcattatgcaaatgaaagatgccaggcagggaaggtcacct

SEQ ID NO: 69 - DNA, 3331 bp, Homo sapiens
cccgtccatcagcctgtctcaacgcacgccagtctcagctccgaccttgcagcggcgcagcgcgggtgggaggcggggaggagcagcgggaagagcggagcgaggaccgcgtccggcgcagtcttcaatgagcagcgcggaaactgcaccccagacccgagcctgctgcgcgccccctcccagagctcacctggtgccaggtaacaggcccacgggaggaaggactggagctgagacaggagatgcggctgtggaaggcggtggtggtgactttggccttcatgagtgtggacatctgcgtgaccacggccatctatgtcttcagccacctggaccgcagcctcctggaggacatccgccacttcaacatctttgactcggtgctggatctctgggcagcctgcctgtaccgcagctgcctgctgctgggagccaccattggtgtggccaagaacagtgcgctggggccccggcggctgcgggcctcgtggctggtcatcaccctcgtgtgcctcttcgtgggcatctatgccatggtgaagctgctgctcttctcagaggtgcgcaggcccatccgggacccctggttttgggccctgttcgtgtggacgtacatttcactcggcgcatccttcctgctctggtggctgctgtccaccgtgcggccaggcacccaggccctggagccaggggcggccaccgaggctgagggcttccctgggagcggccggccaccgcccgagcaggcgtctggggccacgctgcagaagctgctctcctacaccaagcccgacgtggccttcctcgtggccgcctccttcttcctcatcgtggcagctctgggagagaccttcctgccctactacacgggccgcgccattgatggcatcgtcatccagaaaagcatggatcagttcagcacggctgtcgtcatcgtgtgcctgctggccattggcagctcatttgccgcaggtattcggggcggcatttttaccctcatatttgccagactgaacattcgccttcgaaactgtctcttccgctcactggtgtcccaggagacaagcttctttgatgagaaccgcacaggggacctcatctcccgcctgacctcggacaccaccatggtcagcgacctggtctcccagaacatcaatgtcttcctgcggaacacagtcaaggtcacgggcgtggtggtcttcatgttcagcctctcatggcagctctccttggtcaccttcatgggcttccccatcatcatgatggtgtccaacatctacggcaagtactacaagaggctctccaaagaggtccagaatgccctggccagagcgagcaacacggcggaggagaccatcagtgccatgaagactgtccggagcttcgccaatgaggaggaggaggcagaggtgtacctgcggaagctgcagcaggtgtacaagctgaacaggaaggaggcagctgcctacatgtactacgtctggggcagcgggtccgtgggctccgtctacagtggcctgatgcagggagtgggggctgctgagaaggtgttcgagttcatcgaccggcagccgaccatggtgcacgatggcagcttggcccccgaccacctggagggccgggtggactttgagaatgtgaccttcacctaccgcactcggccccacacccaggtcctgcagaatgtctccttcagcctgtcccccggcaaggtgacggccctggtggggccctcgggcagtgggaagagctcctgtgtcaacatcctggagaacttctaccccctggaggggggccgggtgctgctggacggcaagcccatcagcgcctacgaccacaagtacttgcaccgtgtgatctccctggtgagccaggagcccgtgctgttcgcccgctccatcacggataacatctcctacggcctgcccactgtgcctttcgagatggtggtggaggccgcacagaaggccaatgcccacggcttcatcatggaactccaggacggctacagcacagagacaggggagaagggcgcccagctgtcaggtggccagaagcagcgggtggccatggcccgggctctggtgcggaaccccccagtcctcatcctggatgaagccaccagcgctttggatgccgagagcgagtatctgatccagcaggccatccatggcaacctgcagaagcacacggtactcatcatcgcgcaccggctgagcaccgtggagcacgcgcacctcattgtggtgctggacaagggccgcgtagtgcagcagggcacccaccagcagctgctggcccagggcggcctctacgccaagctggtgcagcggcagatgctggggcttcagcccgccgcagacttcacagctggccacaacgagcctgtagccaacggcagtcacaaggcctgatggggggcccctgcttctcccggtggggcagaggacccggtgcctgcctggcagatgtgcccacggaggcccccagctgccctccgagcccaggcctgcagcactgaaagacgacctgccatgtcccatggatcaccgcttcctgcatcttgcccctggtccctgccccattcccagggcactccttacccctgctgccctgagccaacgccttcacggacctccctagcctcctaagcaaaggtagagctgcctttttaaacctaggtcttaccagggtttttactgtttggtttgaggcaccccagtcaactcctagatttcaaaaacctttttctaattgggagtaatggcgggcactttcaccaagatgttctagaaacttctgagccaggagtgaatggcccttccttagtagcctgggggatgtccagagactaggcctctcccctttacccctccagagaaggggcttccctgtcccggagggagacacggggaacgggattttccgtctctccctcttgccagctctgtgagtctggccagggcgggtagggagcgtggagggcatctgtctgccatcgcccgctgccaatctaagccagtctcactgtgaaccacacgaaacctcaactgggggagtgaggggctggccaggtctggaggggcctcaggggtgcccccagcccggcacccagcgctttcgcccctcgtccacccacccctggctggcagcctccctccccacacccgcccctgtgctctgctgtctggaggccacgtggatgttcatgagatgcattctcttctgtctttggtggatgggatggtggcaaagcccaggatctggctttgccagaggttgcaacatgttgagagaacccggtcaataaagtgtactacctcttacccct

SEQ ID NO: 70 - protein, 711 aa, Homo sapiens
MRLWKAVVVTLAFMSVDICVTTAIYVFSHLDRSLLEDIRHFNIFDSVLDLWAACLYRSCLLLGATIGVAKNSALGPRRLRASWLVITLVCLFVGIYAMVKLLLFSEVRRPIRDPWFWALFVWTYISLGASFLLWWLLSTVRPGTQALEPGAATEAEGFPGSGRPPPEQASGATLQKLLSYTKPDVAFLVAASFFLIVAALGETFLPYYTGRAIDGIVIQKSMDQFSTAVVIVCLLAIGSSFAAGIRGGIFTLIFARLNIRLRNCLFRSLVSQETSFFDENRTGDLISRLTSDTTMVSDLVSQNINVFLRNTVKVTGVVVFMFSLSWQLSLVTFMGFPIIMMVSNIYGKYYKRLSKEVQNARNTAEETISAMKTVRSFANEEEEAEVYLRKLQQVYKLNRKEAAAYMYYVWGSGSVGSVYSGLMQGVGAAEKVFEFIDRQPTMVHDGSLAPDHLEGRVDFENVTFYWHTQVLQNVSFSLSPGKVTALVGPSGSGKSSCVNINFYPLEGGRVLLDGKPISAYDHKYLHRVISLVSQEPVLFARSITDNISYGLPTVPFEMVVEAAQKANAHGFIMELQDGYSTETGEKGAQLSGGQKQRVAMARALVRNPPVLILDEATSALDAESEYLIQQAIHGNLQKHTVLIIAHRLSTVEHAHLIVVLDKGRVVQQGTHQQLLAQGGAKLVQRQMLGLQPAADFTAGHNEPVANGSHKA

SEQ ID NO: 71 - DNA, 3503 bp, Homo sapiens
cccgtccatcagcctgtctcaacgcacgccagtctcagctccgaccttgcagcggcgcagcgcgggtgggaggcggggaggagcagcgggaagagcggagcgaggaccgcgtccggcgcagtcttcaatgagcagcgcggaaactgcaccccagacccgagcctgctgcgcgccccctcccagagctcacctggtgccaggtaacaggcccacgggaggaaggactggagctgagacaggagctacaacctggccttcagcacccgcccacctccaaccagcaggatgcggctgtggaaggcggtggtggtgactttggccttcatgagtgtggacatctgcgtgaccacggccatctatgtcttcagccacctggaccgcagcctcctggaggacatccgccacttcaacatctttgactcggtgctggatctctgggcagcctgcctgtaccgcagctgcctgctgctgggagccaccattggtgtggccaagaacagtgcgctggggccccggcggctgcgggcctcgtggctggtcatcaccctcgtgtgcctcttcgtgggcatctatgccatggtgaagctgctgctcttctcagaggtgcgcaggcccatccgggacccctggttttgggccctgttcgtgtggacgtacatttcactcggcgcatccttcctgctctggtggctgctgtccaccgtgcggccaggcacccaggccctggagccaggggcggccaccgaggctgagggcttccctgggagcggccggccaccgcccgagcaggcgtctggggccacgctgcagaagctgctctcctacaccaagcccgacgtggccttcctcgtggccgcctccttcttcctcatcgtggcagctctgggagagaccttcctgccctactacacgggccgcgccattgatggcatcgtcatccagaaaagcatggatcagttcagcacggctgtcgtcatcgtgtgcctgctggccattggcagctcatttgccgcaggtattcggggcggcatttttaccctcatatttgccagactgaacattcgccttcgaaactgtctcttccgctcactggtgtcccaggagacaagcttctttgatgagaaccgcacaggggacctcatctcccgcctgacctcggacaccaccatggtcagcgacctggtctcccagaacatcaatgtcttcctgcggaacacagtcaaggtcacgggcgtggtggtcttcatgttcagcctctcatggcagctctccttggtcaccttcatgggcttccccatcatcatgatggtgtccaacatctacggcaagtactacaagaggctctccaaagaggtccagaatgccctggccagagcgagcaacacggcggaggagaccatcagtgccatgaagactgtccggagcttcgccaatgaggaggaggaggcagaggtgtacctgcggaagctgcagcaggtgtacaagctgaacaggaaggaggcagctgcctacatgtactacgtctggggcagcgggctcacactgctggtggtccaggtcagcatcctctactacgggggccaccttgtcatctcaggccagatgaccagcggcaacctcatcgccttcatcatctacgagtttgtcctgggagattgtatggagtccgtgggctccgtctacagtggcctgatgcagggagtgggggctgctgagaaggtgttcgagttcatcgaccggcagccgaccatggtgcacgatggcagcttggcccccgaccacctggagggccgggtggactttgagaatgtgaccttcacctaccgcactcggccccacacccaggtcctgcagaatgtctccttcagcctgtcccccggcaaggtgacggccctggtggggccctcgggcagtgggaagagctcctgtgtcaacatcctggagaacttctaccccctggaggggggccgggtgctgctggacggcaagcccatcagcgcctacgaccacaagtacttgcaccgtgtgatctccctggtgagccaggagcccgtgctgttcgcccgctccatcacggataacatctcctacggcctgcccactgtgcctttcgagatggtggtggaggccgcacagaaggccaatgcccacggcttcatcatggaactccaggacggctacagcacagagacaggggagaagggcgcccagctgtcaggtggccagaagcagcgggtggccatggcccgggctctggtgcggaaccccccagtcctcatcctggatgaagccaccagcgctttggatgccgagagcgagtatctgatccagcaggccatccatggcaacctgcagaagcacacggtactcatcatcgcgcaccggctgagcaccgtggagcacgcgcacctcattgtggtgctggacaagggccgcgtagtgcagcagggcacccaccagcagctgctggcccagggcggcctctacgccaagctggtgcagcggcagatgctggggcttcagcccgccgcagacttcacagctggccacaacgagcctgtagccaacggcagtcacaaggcctgatggggggcccctgcttctcccggtggggcagaggacccggtgcctgcctggcagatgtgcccacggaggcccccagctgccctccgagcccaggcctgcagcactgaaagacgacctgccatgtcccatggatcaccgcttcctgcatcttgcccctggtccctgccccattcccagggcactccttacccctgctgccctgagccaacgccttcacggacctccctagcctcctaagcaaaggtagagctgcctttttaaacctaggtcttaccagggtttttactgtttggtttgaggcaccccagtcaactcctagatttcaaaaacctttttctaattgggagtaatggcgggcactttcaccaagatgttctagaaacttctgagccaggagtgaatggcccttccttagtagcctgggggatgtccagagactaggcctctcccctttacccctccagagaaggggcttccctgtcccggagggagacacggggaacgggattttccgtctctccctcttgccagctctgtgagtctggccagggcgggtagggagcgtggagggcatctgtctgccatcgcccgctgccaatctaagccagtctcactgtgaaccacacgaaacctcaactgggggagtgaggggctggccaggtctggaggggcctcaggggtgcccccagcccggcacccagcgctttcgcccctcgtccacccacccctggctggcagcctccctccccacacccgcccctgtgctctgctgtctggaggccacgtggatgttcatgagatgcattctcttctgtctttggtggatgggatggtggcaaagcccaggatctggctttgccagaggttgcaacatgttgagagaacccggtcaataaagtgtactacctcttacccct

SEQ ID NO: 72 - protein, 754 aa, Homo sapiens
MRLWKAVVVTLAFMSVDICVTTAIYVFSHLDRSLLEDIRHFNIFDSVLDLWAACLYRSCLLLGATIGVAKNSALGPRRLRASWLVITLVCLFVGIYAMVKLLLFSEVRRPIRDPWFWALFVWTYISLGASFLLWWLLSTVRPGTQALEPGAATEAEGFPGSGRPPPEQASGATLQKLLSYTKPDVAFLVAASFFLIVAALGETFLPYYTGRAIDGIVIQKSMDQFSTAVVIVCLLAIGSSFAAGIRGGIFTLIFARLNIRLRNCLFRSLVSQETSFFDENRTGDLISRLTSDTTMVSDLVSQNINVFLRNTVKVTGVVVFMFSLSWQLSLVTFMGFPIIMMVSNIYGKYYKRLSKEVQNARNTAEETISAMKTVRSFANEEEEAEVYLRKLQQVYKLNRKEAAAYMYYVWGSGLTLLVVQVSILYYGGHLVISGQMTSGNLIAFIIYEFVLGDCMESVGSVYSGLMQGVGAAEKVFEFIDRQPTMVHDGSLAPDHLEGRVDFENVTFYWHTQVLQNVSFSLSPGKVTALVGPSGSGKSSCVNINFYPLEGGRVLLDGKPISAYDHKYLHRVISLVSQEPVLFARSITDNISYGLPTVPFEMVVEAAQKANAHGFIMELQDGYSTETGEKGAQLSGGQKQRVAMARALVRNPPVLILDEATSALDAESEYLIQQAIHGNLQKHTVLIIAHRLSTVEHAHLIVVLDKGRVVQQGTHQQLLAQGGAKLVQRQMLGLQPAADFTAGHNEPVANGSHKA

SEQ ID NO: 73 - DNA, 88441 bp, Mus musculus
  misc_feature (1)...(88441): n = A,T,C or G
tttgttttgtatgtatgtgtgagccatggtccgtgttgaacatggggaggtcattggtcaagttgtgaggatcagttctcttctgccacctgaacctggggaatgaattcatgtcctaaggcttggcagcaagaaggctggatagcaagtgtcttaatttgggtttcagtgctgtgaagaaacaccatggccacagcaactcttaactgtgggtggcttatagtatcagaggttcagtccattatcagcatggtgggaagcagagcagtgtgcaggcagacatggtgctgaaggagccaagagcagtagattccacactgggtggaacttgaacataggagacctggaagcccaccctccgcagtgacatacttcctccaacacaggaacactcacacatgtacacacacgtacaagaaatcgtttctcttttaaggaacatatacttcgggaaggagttataaagtctgtggaggaagtaatctgagttcatagctatcctgaaccgcatgcttagacaatggcagatatcctgtagctggcaatgcttgtttagaggggcgagcttcaccatgggatggagtattttatgtctttttaacttttgttttacagatttattttagttttagttaagtgtatatgtgtgttggtgtgtacaggtgggcattggatctcctggagctgccattatccactgagtagtcttgctggcccttatgctatgataatgacactttgaaatgtcctgacttcaatgctaatggcaaccactgatgtccactcaagggtctgtcccttggctgaacttcattctcttttcttccaaccattgttcaattgaagacccaagctgaaggagcaatggctgcctgggtgagttcctgtggttggtagtatgcatatgcacagtgaagaaatgtataggggttcctaatgcttagcctgggcctgtaaaagttcatttcttcccacatttttttccgtttaaagactgtctcgtgatctaatgttaaggtcagcttgagatctatagcagctgggagtgacatgttggcaatgtgaagttagtgttcttatcatcctagaacctgtaggtcagagtgttagcctgcttttaaaaaaaagggtgagtgaaaatccacttacaagcggtgaatgccagcttagttgccaaagtgcttgacactcaagcatgaggatcagaggtcagtcctcagcacccacatatacaaggtaccgggcgcactggctttgtatttgtaatcacggtactcaggacatggagacaggtgatccctggggctcatattattaggaggcatggattttagaaaacagtaatctatcctcataaatgaccctgaagatgtcccttaacacccccatccccccgctatgtcaatgaccatgagaagacagcatctgtgagaaaatgctgactctgctgtggtcttggtctcagacttcccagttaccagaatttcctgcaatttttaaaaagtgtgtgtgtgtgtgtgtgtgtgtgtgtgtgtgtgtgtacacgccttcctgtgggcgcctgcaggggtgagaaagtgacataagatctccttcagatggagttgtaggtggtatgagctgtccaacatgagtgctcagagccaaactcaggtactttttaagctgtcttgaccattgagccatctatccaatccctagcactggatttttgtattttataaacagcctctggcattttgatatagcatctccaaggggataagtcaccgaacatcctggttaattttttaactgtcaacctgatacatctagaatcatctactaagagggaatcttaactgaagagttgcctcaatcacactggcctgtgtggatgtgtttgggggcactgtctggtttgttagtcggggcaggaggagctagcctgctgtgggtagtaccatccctaggcaggttgtcctgagctctgtaagaaagctcgagcatgagcctatgaatgggacaggaagcaaggcaacacgaagcattcctccacagttcccacctctaatttcctgcttgagttcttgctctgactctctcagtaatggaatatacaccaaagtcctttcctcctttaagttgtttcattcagagtttttacacagtaacttagaaccctgtgaacattccaactgccccttaagtgctggtgaagtcatgatggtcactgaagggatacttggtctcttagttagagtgtggtgctgtgaacagacaccatgaccaagggaactcttataaaggacaacctttaattggggatggcttacaggttcagaaattcagtccattatcatcacggcataaggagcatggcagtgctctggcaggtgtgagactggagtagctgagagttctacttcctgtttcgaaggcagctaggagaagactggctttcaggcagttagcatgagggccttaaagcccatgcctagagcgacacacttcctccaacaaggccatgcccactccaacaaggccccacctcctaataatgtcactccctgggcctagcatattcaaaccaccacacttggtgagcagagaaagttgccaattcaccttgctgaactgctcagacaattcaatgatcagtgactactaccagaacctgcactggctcagcatggataaacagtgtttctcccatgcaggaaggatacttcattttgactttctaaaatgatgctgaaatgttcttatccaattagtgagatgtccttgatacttttctagtcaagcctcatgcttgtgtttctcttcaattttccctccttgtttgtaagtattgccacaggcaatgaacatcctgctaccagcttgtcttttaggtgtttaaatgtgctttttttcttcttggtcaggcagacattattaatattgatataactcccatctcaccctcttctctcattcctaagtacacattttcaccaacaacgggatgctctaccaatgaaaatgctgtgtttagccagttctttattagaggactttgcataaattctgtttttttttcccttagttcaacattgttatatacagaagtcataaaaatacagtggggattcaggagatgtttctgccagtgaagcaggagaatggcctaagcccagatcagtgtagtcccaaaaatctgggtacaggggtgtaagaccatcccccagggctgagggagcaaatacaggtggatccctgcagctctctgggctgccagttagccgcaatgagctctacatttactgagcaaccctttctcaaaagcaaaagtaaaatggagagcgatcaaggaagacgcttgacctgttctggcccacacatgtgcatacatccacatacatactgacattaacatacacacacacactcaaagtattttatatatatatatatatatatatatgtagttatatatagttatatgtatatagttatatgtatatatagttatatatacatgtatacatataactgcatatacattaaacatgtgtataatatacatctatatatctatatgttatatgtatacatatataaaattgcaagatatatatatatatatatatgtatatatatatatatatatatatataatcacacacacacacacacacagaaagtatcatacccaaggatgtgtttgaagttcttgtacatttgagaagctgctgttgctatcctaccctcagaccccacagcctggatccccgttctctgggactcatactgcagatcacctcatctcagggctacatcagtggtcattacactcaggccctgctgctgaagcctttgctgatcagcttcttcctagaaacacacgaggcatgagctctgtctgagagggggttgcagggaccatggaaggctatgctgtacacctcaagtgtgccccttctctgagatgctttctctggggtttccttatgacacctttacgtctctgtgaaatagcatgggagagctgcgtcttggtctcatcctgactgtccttagactgtttcccaacccattgcagcaggttttcttcccttaataacatttatttctaccagacattatcttattaatttacatgcttaatttccctcacttattatcttgtctagtttgttggctgtaataactccagcaccaagaacaacttctggcacaaattcttgtcaaattcaccattccctggaaccacctgcaaagactttaaaatccctttggagactggggtggtaacgcacagttggaaaagttcttaagtgctgcacaggcacaaggacccagttccgtccccatcacccacatggaaagtacatgtattagcacgcatttacaatgccagccattgggggctggagacaggtgtgcatccctggggttcactgaccagccaagcctagcctaaccggccagatccaggccatgagagaccctgtctccagaatcaaggggttgggtcttaaggagtaaaacctgaggttgactcctggccttcatacatgcttacacacttatgcatacacatgcactttcacatacacttgcatctgcacttacacaaacttgctcattcacacacacacacacacacacacacacacacacaatcagaggaaatgctgataacatgttaagtatcattttcttcaggagacacagaatgttgaagtgttctcattaggagacagagagcacagcagatattctccaacatgtttattcattgctgtggagagctgggtccttgtcaaatcattttaaatgaagctaagctaatagagtatgttcatgaaagttattggactttgttaataaaactattctttgtttagagaatgggcttgaggaactcatcagtgtgggtgcgggtgtgtgggtgcgggtgtatgggtgcgggtgtgtgggtatgtgtgtgcaggtgcgggtgtgtgggttcggatgtgcgggtgcgggtgtgcaggtacgggtgtgcgggtacgggtgtgcgggtgtgtgagtgtgggtgcgggtgtgtcggtgcgggggtgcggtggtgtgggtgcgggtgtgtgggtgtgcaggtgcgggtgtgtaggttcgggtatgtgggtttgggtgtgcgggtgcgggtgtgtgggtgtgcgggtgtgcgggttcgggtgtgtgggtgcgggtgtgcgggagtgtgggtgtgcgggtgtgtgggtgcgggtgggggatgggggatgtgctggtgtgtgggtgtggaggtgggattgcaggggtgcgcaggggtgtggctgggaggtaaggggatgagggtgcaggtttgtgtgtgggggtgcaggggtgcaagggggctcagggccggggagtgagggacagtggtgtcggggtgtggaggggtggaggggcgtgggtttgtgggtgtatgcgtgtgtggggtagatgttgggttattttatcttcagtccagaagacatagggtttaaacctgaagtattcaacttgtggatcatgacccctttggcggttgcatatcaagtatcctgaatatcagatatttacattatgattcatagcagtagcaaaattagttatgaagcaggaatggaataattttatggttaggatcaccacaacatgaggaactgtattaaagagctgcatcattaggaaggttgagaaccgctggtttaaatcatcttgtcatgtcctgtcacatctctaccttttcattgtacaaatgtctcatgctgacagccttggtggcacagactctaattctagctactcgggagtctggtgcaggaggattgtaagttcagggctaacttgagttacagagtgagttcaacactgtcctgggcaagttagtgaggtcctatctcaaaataaaaagtgaaaagaaggttggttcagtggcagagtgctggtctaggttgtgcagtgctccacagtcagtccctcagaggaaaaagaggcaagtacgctaaatatagaatgcaacgttgcacaagtgtaaaagcttaccacttaagaacagcatacagttaagaactttcaggaagaagagatagtaatgacagctcagtgagtcaagtgcttgtcttgcaagcatgggaactgagtttgatccccagaacctaagtttagaagaagaggaggaagaagaggaggaagaggaggaggaggaagaggaggggaggaggaagaagaggaggaaaaggaagggagtggtggagggggaggagaaagtgaaggaggaggaggggaaggaggaggagactgcagcctggaggcttggaggcctggagagatggcttagtgcttaagagcacttgctgttcttccagatgacttattctgtttccagaacccatgttaggaggctcataattgcttggaagtcctcttctggccttcatatacacccgcacacatggggtacacacacacacacacacacacacagtcccagttttttgtggtaaacaccataaccaaaatcaacttgggaaggaaagggtttatttcattttacaacttatagcctatcatgaaagaaagttagggcaggaactcaaggcagaacacactgtccaggagagtcaaataatacagttagctactcttgtttatttaaaacattggaaagggtggctagaaaactggctcttggtagttgtcagatcacaaacacttgtaactctagctccaaaggttttgatcccttcttctggactccaaaaacaactacactcatgtactcgaatccacacagagatacataacacattttgttttttatctaaaacattgtgaaggcatttataacggggaaccgaggtctcgacacctttgacgtgggctactctacaaccgggtatttaaattcacctgtcctgaggcagcggtccatgtttgaccccacatggctacaattttcagtatatatcaagtcagcgatggaaagttttagggttataaaaatgaggtcgttggagagttatggatgggccctttagacatgagttttactgtgtgagagcaagagctctaacccagggggagagctctcttctcagcacctcactttgttctcccgttatgtgggggctcaagaaactttctcttcctttggttcaccttggagctcactgctcatcccagactggttggttagaaaggccgaggggtcggcctgtctctgcctccccaacagaggaatacaagcacacctccaccgctcctggaattttccactgggttctgaggatcatcctcagatctgaatgcttgcaaaacaatcactttatagcctgggttcagcctttagtcagggcaggaagttcttaagactcttcctaccacttgtgtgctctgcgtccagagaagccattgttctgtttggataaaccccaaagtacaaaatacaaagttctccacggacaaacatttacttcgtatttaagtttttgaagacttcaggtataggagctgtaccagtcagggctccctagagtaacagaacttatagaactaatctctgtggagagtcattggatctattggaatgacttacaggctgcagtctagctaatccaacaaccgctggctgtgaacagaaagttcaagaattcagaagttgctcggttccacaaggctggatgtctcggctggtcttcagtttacatgttgtcccagagtaggttctaatgacagtgaagaaatggatgtgctagcatggtgagagaacagtcaggcaaaaaaaccagaaacctttcttctatgtctttatatagacttccagcaacaggcgtggcccatactaaaggtgtgtcttcctgcctcaagatccaggtcaaaggctgtgtcttcctgtctcaaaggtctggaccggaactggattcacccacttcagaccaagcagaaaaatctctcccaggtgtgttctctacttctggattgtagttcatttcagactgtggtggtttgaataggaatggccttcatagattcatttctttgaatgcttgactataaggagtggcaagattaggtgtggccttattgccataggtgtggacttggtggaggaaatgtgtgtgacatggtagaagcaggctttgaggtctcctatgctcaaattacatgaagtgtggcacacagtcttctgctgcctacaaatcaagatgtagaactcttggctcctctgggaccaagtctgcctgcatacttccatgcttcttgccatgatgatagtggactaaacccctgaaactgtaagccagccccaatgaaatgctttcctttataagagttaccctagaggccgggcgtggtggcacacgcctttaatcccaaagcttggaggcagaggcaggcagatttctgagttcaaggccagcctggtctacagagtgagttctgggacagccagggctatacagagacccaccccccaaaaaaaaaagagttgccctagtcatggtcccaagaattgctatcatagaagctggagagatggcttggtagttaagagctcttactgctcttacagaggacctaggtttgattcccagtggctatgagatagctcataattttctgtaattcaggtaccaggggaacctcataccctcgaatttctttgagccagaggcatgcacatggtatgtaggcatacatacaggcacaacagtcatacacctaaaataaaataataaatctaagaaaaaacaatcaaaagttatcagagatattaagaggaagaaaggaagcaaacacaaaacctctttaatggcaagaagcatatgtttttccagttttccacccgtccttcagtaaagatctctcctacagcagaagacttcatgtcacttctgcctccatctcttacaaaatgaaaataggctggtaagctgttctgcagcaggtgctgggctggcaggaaaaagacaacccttttgtatagctgccatcctctgggacagacaaggggcacattgcataagtggtacagcagctaatcgtatgtgatcaccagactctgcattttacaaaacatgtccccagaaagatgcagggtgtcaggatgagatgggtgaggattattttccaaaacaaaattttcctggaaataaaatgcagagactaggaaggaacaaatgtaatgatctctttttgagttctctgtccccaggtccacatgttaatagctggcacaagagtgtgttaaacatggctggaactgggtcttagctgggactgactcaggagctgggagctgtccaagccaggcttggaaagaaccaaactcagaatctgatacccagggaaaggaaagggagccagaaggcaagagatcctcacgacacagggaaatagcttttaagaagctccgtgaaggccaagaaactagaaagtgggaatagttaaaagaactctggtgatataacagttgaagggagaaatactagaggtagaaggatttaagaagggaagggaccggcaaggagatggtagagaaaagagggtgggtgttcaagtaaaactaaggatatatgaaaatgccataaggaaacgtgctactttgtaaacgaaaaaaaaaaaaaaaaaaaaaaaaaaggaactgatcatggtggcgcattcctataaactataggggaacaaagtcatccttaggaagtgctaagccaggctggctaagacactgtctcaaggaacaaaaaaaaagaaaaaaagaggaacaataagaaagcattttaagaaaacttaggaaagaaaggaaaaagtaggaaaagaaaaaagaaaaagaaagagaaacatttttaaaagaaagaaaaagtaccttaggaggaatcttgagttcagcacctcctctgaggggaggatcggttactcgggatccagccccgcccagcagtgctggctgtccttgcgcaggcgcagtggttcctcgcttcagcactagtgcgcatgctccgcggggccacggttctctgacctgctgtggtagtgtcagctcctgtgaaggaagtttccgctttgcaccccacccggatcacagttcggttgtagggcccgctctctccggctccacatcagcgcatctggatcatggggttacccaaggggccagagggccagggactcccggaggtgaggacctctgtccctgacaccctggggttgctggggagagagggccgagcccagggcggcgggcagggaccagcctggggtggcggggacactgtctatggttgctcaggtgtgtctgtcccaaggcgggccctaggtaccctggaggggcagctgactggtcccccggcgtgccagggtgcatcgtgtcgctgggtgcaaacttaagggttcctgggtcctctggggacagaggaaacatccagatcccggcccagatgcaacctcacacatcacgaggtccccgggaattcctatctcgggttgtctggaggcccctcacattgcgagactggcttcccccgggccaaggctgctgcgcttaggagtctcagcagtcacgagatgagcggtgggactgtcctgctcccggtgtgcagcgggcggtgaccttgggacacacaccttctgcgggacccatgtggccagcctttcattcccttttgtcaggaaggcacgctacctacccggcttgtagcctcctgcccctccccccgtcccacgggccggggagggtgaaggaagtttggaagctctgcgcacatcagggtgatgacagagttgaggacactctctcctgtggtgcctgtgtcgggacaggaacatgctgcgtgttctaaggagggaggaccttttcagaaatggtttagtcgagtactcagccagtactcattcgatcctatgaacaggactaccacgtaggctgggaagaaaagtgcaaccactctctaacggtgggctaccgttagagcttggctgtgggatttccagttgtcctcctagttgctttactcaaagctctgagcttagagaagagtcccagtttccagagagaattagggaacacctctaaggcacctggatctctttctaaggctggaaggcaggctttggcagaggtgtggtgtgcctatttgacactgtgcctagtgcccgttcttattcagctgcgccgatcttgcttccccgtgcccctcacaaatccttctgttacatcttcatcctactcattacagagtcgaagtgttctgtgtccaggtgatgaagggtgggtatgtgtggccctgggttaggtaaagtttcatggggtctgggttgtaatagttcagattttctttgccatgtaaaaatctctgtctgtctgtctctctctctctgtctgtctctctctgtatgatgaagtgcatatgtgagcatgtgtggaggtcagaatagagcctcccatgtcaccctcatgaatgctgaaaacctcctttgagacaagtactcattggcctggcacttcccaataggctagattggttggccagtgagacccagggatctttctgtccctgggattacaagtgcacagtaccatggctggtgtgtttatatgggtcctggagattgaactctgatcctcatgtcgtgaggcaagcgctgggctattgttgcagctttaaggcttttcttggccgtctgctatggagtcctgtgtagggcttccagttctaccctagttccttcaaactagtggaagtttttctaaaagtaataaacacaccactttcatgagtaggtgtgactcctcatagatagccaggaggctgggtctgatttgttactcttttctagcttgttctacatcgtgagttctggagcagctgtgggtagggagatgagaggggtgggcatacatagtgagatcctgtctcaaaaaagaaaaagcaaaacacagaaagaccaaaatgactgttatagtgtgcacacagatatagacttaaaaaaaagatataaaggctaaaagctagcatgagtataaagttgaaaagctccaaataccgagggtttagggcagagtgcttacatatgtgcctgagctctgggttctgtccccagcacagtgaacagtgagggtggggtgcctgtaatctcagcactggggaggcaagagaactaggaatgcaaggtcactgtccacatagaggaatggagaaggccaaccctgggccacaggagaccctttcttaaaagacaaaacaaaattgctgtcacctggctctcactaatccagttaactcctgctggtcaggttttgaatccctttgtgtgtatatgaaagaaagcaatagctagacccttccagcttctgagagctacagtgcagggcagatgggagcttctctggccttgtttaagagctctctgcgatccatctctatcagtctctggttatgaatttatttccctttacttacgtatatgtccatgtgtctgtatgtgcgagtgaatctgagtacctgtgaagtcctgacgagcgtggcagataccagagatgagtaaaggtggtggtgagatgcttagtgtgggcttggggaactgaacctgggtcccctagaagaacggtatgtgccctgaaccactaaaccgtcgtctctggcctccagtgtcctacgttagtaactggaggtattatccagtgtgctggggttttatggtttcaagaaggatggttttttgttctctgcatatcagcacatgaccactttccattctgtgtaagcgcgttaatgtgtaaagtgaatttggaatcaaacatccccattcagtgtcttaggccaaaaacttatttcattggttctatttcaaaaatacagttgtacatcctgaaatgacaggcagccggtggggatgctatatgcaatgaattgaggtgggagattgtccttctgggctatagtgtccccttcttggcagtatctttatgacacatgatggctgaatactcgaaggaattctgtcttatttacctgtgtgtgtgtgtttgcatgtgtggtgtctagacatgcctgtatgcgtgtgtatatggatgttcatatgtgtgtatagatggtcacacgtgtttgaatacacatgtatgtgagtgcatattgacacctgaggttggcatcagttgtcttactctgccatttttctaccttattcattgaggcaaggcctttcaattgaacctagagtttactagctgggctagtctagctataaatagctagcctgtggtctttgctttccaagtgctgggctcacaggtgggccaccatgcctgcccaggatttgcatgggttctggggaatctgaactcttgtcctcatgctaatatgaacatccgactcttggcagcggaaggatttacttcatttccgttcagtggagatggcctttaccagttacgtgcatcccttttgttctaggtggagacgagagaagacgaagaacagaatgtcaagctgactgaaatcctggagctcttggtcgcagctggctatttcagagcaagaattaaaggcttgtctcctttcgacaaggtaagagaaagcctcgatagccactgtgccgtctctctgcaggactgcgcggttactcaaggtagcggaggataaactgattgtgtttttacttcctctgtacccgtggtccagattcctcggggatgtactcggatttcctgttcaaagtcagtagatgcaattgggttccattactgtgcacactattttagggactgtaaacaagcaagagagtattttctcaggccgggagactcctcagtcagtaaagtgcttgctgggaaagcatggggacctgacttggatccccagaacccatgcaaaaaaaaaaaaaggaaaggagagagggagggagggagggagggagggagggagggagggaggaaggaaggaaggaaggaaggaaggaaggaaggaaggaaggaaggaaggaaggcaggcaggcaggcaggcaggcaggcaggccagacctgtggcatgcttgtgatttcagtactgggcaagtggagacaggcagatccctggggctccccggccagcctagccaaattgatgagttctaggacagtgagaccatgtgtctcaactagatagatggatggatgactcctgaggaatgacacccagtgcggacctgtggcctctacatgtatgcatgtgtgtgcacaaacatacgcacacaggaacactcacacatgtacacacacgaacaaaaaatcatttctcttttaaggaacatatacttcgggaaggagttataaagtctgtggaggaagtaatctgagttcatagctatcctgaaccgcatgcttagacaatggcagatatcctgtagctggcaatgcttgtttagaggggcgagcttcaccatgggatggagtattttatgtctttttaacttttgttttacagatttattttagttttagttaagtgtatatgtgtgttggtgtgtacaggtgggcattggatctcctggagctggagttagagtggggaccgaactcaagttctctacaggagcagcagacacttttaaccgccaagccatcccttcagccctggggtggtggtgtttaatttagcagagctgtgaacagttaccatgcacaggacctagtgttaggtgttgagggcacagagataaaccatagcccttcactcaaagagctccaccgtcgtagagaagagtgacaagccaaccagcagtcagggcctaaattatatggtccccagtctcctcaggcacctgggaccaatggtaaggcaggccagggaggctttggaataatgctgcaggccccagggatcgctctcctccttctttgtcgcggaatccgcaagggatgttttataagaagcacgtccagacctcctccatcgagcttctgcgtaggtgggtctgggctagcgacctggaaatgtgtattttatcgtatatctcagccattaaataaggaccagaaaatgtctgccttgctgcccacatgcctggttggtaaaagacatcctctctctccatctggcatgtgtcagaacctgggctagaaatctctcagctggggctggagagatggctcagctatctgctcttccagaagtcctgacttgagtccccagcaaccacatggtagctcgaaatagttataatgggatctgatgctctcttctggaccgtaggtgtacatgtagatagaacactcacatactttagatatatttaaaaaacaaaaagaaagaaaagaaagagacagagacagataaagaaatctctcagctgatgactcagtaggctgtgcatgcattaagatctgagcttaatctccatataaaaagccagctatggtagtgggcaggggtaatcccagtactgaggtgatgaggatccctggtgcgctccagagtcagtgagagaccctatctcaaaaaccaaggcaaagaacaatacaggacaccattgtgtctctctggcctccacatgccaatcaacaggcgaacacaaacgcatactcactcacacatgagcacatcacataaaagaaatccaagcgcgtactatctgacccttgcctaggaagaagagcaatgagtgctaagactgtctctgtaggtattggtggattgcgcaggacagttgatcaaagaaatgagagccactgcaggatgagttcaggcttctcaccagcaaggggggaacctctgtgggactgaaccccaacagtctcctggaagctctttttattgttacacaaaaggcacctttagcatagcaatttcgcataccaaaatatttcatctgacctatgggctatcgtgaaggacccatcatcaaagcaactctcagccatgagagacttcctggtttgccaggcctgtctccagagtaagatgtgcaaaggctcttgagataccttcaaggaaacaatcccatcaaatctcagataacaatcactaacaaaagactacttcaaagcctaggcaccatcactccagatacctgccagatacaacagttctgctaaaacagtcagctcctccgtcacactggaagtactttgagtgctcaggaatcagccagggccagtagcttctgtagcagacagtatagggatgggcactgccacgatgggcactgccaccactgcagaaggatttatgacggtgccagctgatgagtggtgggtagggaagacagactctctctagagacacattgtatgggagagctgcagagagagctgtcagtaaagttacactgtatgacgacttaagctcagtccccagaatccatgtaaagatctgggtgttgtggtgagcacttgtcacctcggcactggggacatggagacaggaaaatccatgggcctctccggccagccagccaaatcagatcagcaagcgagagaccagtgagagaccctgcctcaacaaacaaggtgtacagcatgagggtcaataccagatttgatatcttgcctctacatgcatgcacacacacacacacacacacacacacacacacacacatgaacacatgtgcatacacaccagatatttatggttttctgagctttttgagtctgtatgggttgcttaggaaaggagtttcctcccctggcctctgttcccctccttgaggggctcatgagcagtctcctctcttacaggtagtaggaggaatgacgtggtgtatcaccacatgcagctttgatgtggacgtggatttgctctttcaagaaaactctacaatcggtcagaaaatgtaagttactggggcttgccatagatgggccaaatgatggggaggagggctttatagcaaagatggttcttatgtgtttatatacagattcctttgtatttttcctgctttgaagctgtattgtgtgtgtgtgtgtgtgtgtgtgtgtgtgtctgtgtgtgtgtctgtgtgtgtgtgtgtctgtgtgtgtgtctgtgtaggccaggggatgaccttagctcttgttcctcaagcactgtccactctttgaaaagacatctcttactggcctggaacttgccatatatatgctaggttgacaggccactgtgccccagggcactgccagggtactggattgtctccacctctccagtgttgggattatagtggtgtggcactatgcctgacttcccctacctttcattgaatgtggagtgtgtgtgtgtgtgtgtgtgtgtgtgtgtgtgtgtgtgttaggattacaacttaggtccttgggcttgcaagacattctttttactcactgagccatctccccagcccaagcttctgtcttttaacccattagcatcgtgtagtctctcctgatttctaagtatttagagtcgactttttaatgtctttatttggccttatacccccaactaccatcctaacattgccttcaaaatggtaagggcataatatttatgataatagttaagtagattcttaaatgtatagtcatttttatagtaactactatataagggacaggatcagaaaaaaaaggaaatacagtcttttcaacctaatgatactttaaaagaatggtgtgtgtatttatgtgtgtgtgagactgtgtgtgtgtatgtgtgtgtgtatgactgtgtgtgtgactgtgtgtgtgtgtatgactgtgtgtgtgactgtatgtgtgtggtgtgtgtgtgagtgtgtgtgtgtgtgtatgcgtgtctgtgtgtgtgtgtgtgtgttgtgtgtgtagatcaaaagataacttgagggagtccatttctccatcttttaggtcccagggattcttttttttttttttttttggtgtttcgagacagggtttctctgtagccctggctgtcctggaactcactctgtagaccaggctggccttgaactcagaaatcctcctgcctctgcctcccaagtgctgggatcaaaggtgtgtgccaccatgcccggcagcacacttcttaacccaccaagccttcttgccagtgtaaatggtactttttaaaggagaaaattgaaagtatcaggtgaaaagagtcttcattaatcctttcaataaatatttatcaagtctgtgttactactgcagctcagacattattcaggtactttggaaacattaagaaattccctgacttcataaagtttataattatcatggcacagactacagatatcaaataggtgaagtgtggggctgaagacagcttggtaattaaggatacactgctctcgcagaggctcagggttcagccctcagccccgagcttgggcagctcacagctgtctgtgtcttagttacttttctactgctgtgataaaataccatgaacaaaagcagcttggggaggaaagggtttattttatttacatttctccatcacagcccatcttagaaggaagtcagggcaagagcctggaggcaggaactggaggggtgatgcttgctggcttgctctccaaggcttgctcggactgttttcatgtacagcccagagccgccagctctggggcagcacatccacaatgggctttcccctcacccttatctaattaagaaaatggactacgggcttctccatgggtcattctagtggctgtgttttctcagttgatgttccgtcttcccagatggctacagcttgtgtcaagctgacataaaactagccagcacagtccatgactccagctccaggggatccaatgcctgttcttgaccacacatacccataattaaaaattaaaatgtgaatctctgtcctgcctttgaatttttgagacaaggattcttcccccccccccctctctgtatgtgtgcatgcgtggtgtgtgtgtatgtgcgccatagcttgcatgtagagttggacacaggtaaaagttgcttctttcttaccatgcaggtcctggagactgaactcaggttgtcaggtttggccgcaattgcctttatcctcttagccatcttgctgtccccgttgtttctcatgttttaggtctgtctgaacgagagctggtgacttgccagatgtccaagaggtggtcgggctgggatttagatccgggacaaatgaaccatcatggaggaggaaatagtgaatgtaacacgtaaaactttaaaagagtccgctcgatgtgctggtgcacacccgtaatcttggcattcaggaagctgacgcaggaggattacagttttgacactatgcttaactgtatagcaagatcctttctaaaaagaaaatacccttaaagtatcagacagtgttatactaaaatctcaagctcagaggtttgcctggtgatccacatgtgtcccttgtttgattttgtaatgttgctgtggtagacaccatgatcaaaagcagcttaggggagaaaagagtttatttggcttacaggtcccaggctgtgaagaagtcagggcagcatgcggaggaagaatgggagcaggatccatggccgaagcctgctcactcgctctcagattgatgcttggctgactttcttacacactcagggtgacctgggtcgggatgctgctgcccaccatggagtgggtgatcctagagcagttaacaacataacctcccaaccactcacacaggccagcctgatctgggcagttcctcaattgcggctctctgctcaaatgacttcaggctgtgttaggttggccgagcttttaaagaagctctgacttttccgaaacagttctgctgactttttaggaagtctgagttcctgagcagagctgagggtggctggcgaatgtttctaagaagtcttcctgccttctctgccctgcctccctactgtgtgcttccttccctattgctcccgccaccagggttagtgctggcagccactcctgcttgttgctgggactgcctgggcttggctctagtttctgggaggcagttttaagagactcataaaccccaacatgacttgctatatcctcccctctgggcacttatgaattgcttgattaagctgccagtgaggagtggctagggagagccctctggaaaagcaagaaggttggttgtgtattgtcgaggtctcagccgctggatttgaagctcccaaatggaactttttcaagctcgagctctgtggcccactagggggagcactcttcctgctgaagatggcactaaagaccagcgtggtggtgtgctgagcataaagacactcagagccaaccagggcctggaacttgtctcccttggattagtgtggattctgggtaggtggtccgcagcaccacatgaccaggacgtggtggcatgaacctataaaaccagttccaaggtggaggcaggaggatctatctttcttgtctaggagtcaagtttgaggccagcccgagctgcacaggaccttgccttaaaaacaaaacaaaaaccagaaaaacgaaaagaaaaaaaggaaagaaggcaataggtgtaatacatgatgggaagaatcctttgtgaccttacatgcatgtagctgaattgtgcttctcatgttggtctactgggatgaacttggtcaggtctgtcactgtcaccctgaccaggctgggacttcttcacagttctgcctagactttagagctgtctttagaaccactcagtgtgtcctgactctgcttactgttttcttctggacagtgctctatcggaaaagattgtctccgtcctcccaaggatgaagtgtccccaccagctggagccccaccagatccagggcatggattttatccacatattccctgtcgtgcaggtgagggcttctgcgtggattcttgcctcttaactgggagttcctggaacacacctggctctcacagcccagcctggacccaggctgtagtgtgggatgggtctggggccctggaccctaggtgtagcgtgggatgggtatggggccctggaccctaggtgtagcgtgggatgggtatggggccctggaccctaggtgtagtgtgggatgggtctgctgccgcgcagctgacagggattcttgccagcaatctcaaaaggcagctgtgctccctgcacggtagtagtttcactttggcttctgctgtgacctttgaaggttcccaccaatggcttttgttttcccttttcatatgtgcattgccgtgtgcatatgtgtgtgttgcacatgtgtttgtgggtacatgagtgtggaggtgcatgtgtggggacatacaagtgcgtgtgggtgtcttgtgtatgtgtgcatgcacatgtgtgcatgcatgtgagtacatgcatgtgaaagccagaggacagtgttggccattgacccttacatgactacttgccaagtagactcgaccagccggctaagacttgtctgtttctcttgcccatactggatctgtctgtgagagcagatcctctttgcaagtgctgcagcagtcatggtggaaagtgagtatctgaccgacattagctttgacagcaggaactccacagcgggttctgtgagaggctctgggatgcagccttccccttctctactgcatcacactaggtatggtccatcaaagcacatctccccagacacagtggacacaggcttgagaggtcagaacggggagaggggctggtgatccgcaggaaggcagaggtgaaccgagacaatcgctctgtggttgctgctttctgtttgttttagttttggttttggattttggatttttgttgttgtaattgtttgttgttgttgttgtttttgattgtttgagacaggtttttccctttgaagccttggctgttgtgaaactcactctgtagaccaacctagccaaactagtctgcctctactcccagatgcggaagggtgtgggcaaccacacctggctacatggttggttctcatcttcaatttgatacactgtagaacctaactggaagagagttgcactggattgtgtagatcagcttggcctgtaggtgtgtctgtgagggattgtcttgactgctgtaattgatgtgggaagacatagactgaaagtgagcaatgccagtcctggattgggtccctggactctatccgtagagaaagctagctgagcattaggcgtgcgtgtgttcctttctctctgttcttttctgagctgtgactaggtttgaagatcctgactcgacttcctcacagtgatggacctgcgattgtgagataaaatagtgtttgcttttgctctcctaagtctttgttttttttttttttttttttggttgttgttgggattttctatcacaacaacagaaggagccaggacaaacaccgtgtgatccagagtcatggttcttggtgcctgatgctatctctccctgatgctatctctcaccctgctctgctatgatttcagttaatgtccaaggtctctgggggtggggtcggtggtagagtgggaataaatggaagatgctaataacaggaatgttcttcctaggatatacacagcacaggaatgtaccctgtggagtatgtgctgtgtagcatggttttttttgtttgtttggtttttttgtttttgtttttgtttttcatgaagtcaacttattggggcaactgcttcctaatcgtgtcttttgcttgtagaatttgagtccttgcgatgattctggacgtaaagcatctgtggaatcccagtgacctgaatttgattcctaggccccacgtaaagatggaagaagagaagcaactccacagagttgtgttctgacctccacatgcaaaccatggcacacaagtcatcagtacaaatgaactatagatctccctattcctgccttaggagtgcctccctatggcttatatacctaggtgcctaggcagctggacctggccgagtttgctgtgcacttgagaaataaactaccactgcccccgtattgttttgaggatgtgagagttctctctgaggagggactgtcaactctaacaaatggttctttcttctgatgtgcttgtgaataacggaaagaatgaatgaagagcaggcattatccacagtgtgtgagtgtgagtgtgtgtgtgtatgtgtgtgtgtgtgtgtgtgcatgcgcatgatgtgcatatttatgtttgtgcatacgttgtgtgattatgtttgtgcatacgttgtgtgataaaacattttctgggaagacgtaacacataggcctgctcacctaagatagggagcccacaaaagattaaagtacacatatcaccaaagtccaatccagtgaaccaatgggggttttattagagtttcttacaggaatccgttcacgtgagggcttacttacaggagcagaaatgactcaaaaccagctgggaatctgagcacactgcacagcctgctggttgtggcctgtggcaggttggagaatatcctttccagctctaagctctgccaggcagctttcctggtttccgtttcttctaggctgctggtcttgtgtcagagtcttctttggtccgcttcttctaggctgctggtcttgtctcagggtcttcttcactttggttgtccgagtgtcttctttgcaggttggcttccttctgtctgagggccattctcagcttttattacttactctgccagggaggggtctagtgaatctggtcagtttcagggatttcctgatgttattttgatcttgtttacgttccagtccttgcttaaagagcttccctgtttcagtcttgaaggaaaaaaactgcacaacagcatatgtgtttttaattacatgatgtttttttaattggaaactcggactagcaaagccaactgcttccagacaccagctccatgagactggcaacttgaacagaaaccccatgttagtcacttgatggggaaacctcccagttgtagctcccggctttatcttgtagctgcagatcatttgaggagagtaatgtagtgtctgtgtaaggtcctataaaggttgtacctgaaatgtcacaaggattcagagaatgttctagccagtgatcccagggcctcaggccctgtactgctacaaactcttctaccacctgaggatttctttcatctagcagaagaggggttgtctcaagtggtctctgtagtgtctgtctgtctgtctgtctctgtctctctctctctcaatcacccactgacattaagatgaatgcatacctgtcatcccagcacgtgggatcatgctcacccacacagtgagtttgaggtcagcctgagctccatgagaccctgttccaacaacaaaaggaatgccaaggaactcccccttctcttgaagagacggacaggcctatagctttcaaatgttgcacagttacttacggctagtcacacgaggtcaccgggtcctgtcacctcagaggcccaactggctgctcttgtctcgtagcagtgtgttctcatggtttcttcccacctgggcaggtcagtcgtgccgacatgaatccccgggctgcacagtttccctgcagtaggagtccattcctgtcatctcacctcactttctcccacagtggctggtgaaacgagctatcgaaacaaaggaagagatgggagactacatccgctcctactccatctctcagttccagaagacctacagcctcccggaggtcagtgctctgccccgcttccttctgcttactcattgtctgtcctggtgtatttaatttcttcctctttcaggtgtatgtagattgagtgtgcttgtgtgtttacatgggtgcaggtgcctaaggaggccaaagacatcaggttccctggagctagagttgggaggtggcgagccacctgacccgcatgctaggaagcaaccttgagtcctcttgcaagagcagtaagagctcagctgttgccgtaaatctccaaccccaataaacccatgcaaaggacacacggcttggttgtaatatttataagctgcacgcctggactgggcaatataccactacactactatactccccagctatgagatcccttgctacttgtggctcctccaagccacgtggttctgctccatcttccttccacctcctcgtcctcctccttcctctctctcttctgtctcctcctctctaaaacttccagccccaccttcccttctaccgcccagtcacaggctctggcctttatttgaccagttaaaatggggagaggttcacatggaatcacctgagtatgtgatcccctgctcatcggggcagcccctgttgaggaagcagaaatagcatcaaaacacaaacagcagcagggcactgcacagcactcagccactgagccatctctccagctctctggggttttctcagtctttaattttattcatgtataaggtgtagcttgatcatatctacttccaactcctttcctgcccaggctgggcagtctctaacccgttcccttcccacacccatgccctccttctgtactgtctattacccgactggttcaggtagtgctgcttgctggaacattgactgatcttgtgcagatagccaccgatcatacagtgacttccagtgtagagagccatgtcatgtgttcacagccctccccacccgctccatctctcacattctctctgcattcccctctgtgatgtcccctgagccatgcagcagtcccatacatgtcccatgtcgcatttaaggcgagcacttgacaggcaggtattctcggtgctttggctggtcgttgttctccgtgtgaactgctgacccctacagaagcatcatctctggcaaagcttgtgcgtgctcttccttcctgttctctggtggtgtaagtgtgcactgggagagtcctgggtgcttaagcataggtccccctgcaccccaccccccctcccctcccttccccttggcgcctctgagcagcctcgtgttcattagaactgctccttagatggctgttaaggataaagcaatttttttgtgaattgcaaaagcttgtgcgtattatgtacatggccaggtgtgtgtgtgtgcatgcacgcacgtgtacacacacgtacataggccacatgttgatatcagctacctccctcagttattctccacattttttttcctttttgccccccgctcttcgtttttgatctatggctccctctgaacctagagctcatagattcatctagactggctgatcttcctgtctctacccccagtgctgggattccaagtgtgtgccacctcgcctggcttttagacgtgggttctggggtgtatccaatccaggtcttgatgcctgtagaagtactttactgactgagctgtgtccccagcccacggttctatttttgtgagaagctttttaggagactgcttgtggaggagcacgtttcctgcgggcacagttagtagtaactgtgacacgtaagagcaccaagcactcaggtactctagcacatcgctgcctccctcttcatcctgacaggtgctccttcatgcaggcggtggtgctcctgtttcgcagatggcagagctgaggcttagagttgaggttacatttagtgctttgaagggctgggcatgagagtgtttgtctcagtcactactctctccgtggcccgcctctctctcactaactgtaagtccctgtcagcattatttgtagaggtcctagctttttcccatgggagattcataagaaaattgagagctggggaaacagctcagttggtaagcagctgccgtgcaagccagaggtactggatttgagtcccaagtagacattttaaaagctaggctatagtaccagcactgtcataaaagctaggtaggtccctagggttcccaggctagccagttttgcttacttggccagcttcaggacagtgagagactatctctggctaatcggcacctgaggaagaacaacttcggttgtcttctcgccactacatgcacgcacacacatgtggacctgcacatgcatgaacatacacgtacctcgacacagacttttaaacagctcctttggacttctttacgcacagcagtgaggaacaactgttggataagggagacctgtgtgtgcagctgacttttttccttagtagaattggctgagtccctgtgttctgtcttgcaggatgatgacttcataaagagaaaagacaaggccgtcaagacggtcgttggcctctcggtaagtccctgtcccagcactgcacggccttcagcctcccctgtagacgtcacgtgtcccccaggagctggcagccaggaatgtgtgctagacatccctgccggctcgacacacttcgtaccaggacacaggagcccgctgctacactccaagtcccgtagtgccagttataagggagaaaaatcagaatacaaagcgcggtccccttcttaaactggtagcgggagtaacggcaccgctctagagaatgaagcacggtagctggcgaaggcaactcactgccctggcccctccccatggtggctctgggaagacagagtagctttgagcttctgcaggaaggccaccgtacgtggtgagttctggccactggattcaatacacatgagacatgtgcccagtgggggtggggagctttgttaagctgcttctggccagagccaggagactgcagccgctggctttgcgctcaagagaatacagcctctatgcctgatgcacagtctctgtcttccagaggcagcatactacagcacactgtgagtctagcttatgacgtcattgtgtcatagtgcatctactcaacctcatttgcaagggctcagccgtagacagatgagaggacaggtctggctgctagacctcacctttcaccttgtttaagatggtgtattttggttattttttgactgtgtacagcaggcctgagagtttctggtgattctgtctacactgccagtctctctgtagcagtgctaagattaaagatgctcaaattatacatctgtttttgatttttgttttttaacgtagcttctaggtccttattcttccatggcgggtaccttttatccacagagcccttaccacaactaagctgcttattttggtttttaagttagtgctcgttaaatagcaagtcagccagcttaaatatcaactgtgcgtttaatgcagacgacagggtggcagtaagattagaagctgagtttgcctgcctcatagagctttgtgagctggctcaggaatctcttcagaacaataattctggacttgaatttgtgttgtcccgcagtgacgacactgaaaaagcaggtcacttgatggtagcagacatgaggagctcaagcacagcagccggcaccccttcctcttcctcctctattctgtcagctctgggagggaaaaaccttgacaagtttgtttttgagacaaagtttcaccatgtagcccttgagtaccttgaaattgtggtagtcctcctgcctcaacctcccgagtgcctggattacaggcgtgcaccaccatacctggctcagctacacaattggtacagattcatggagtctggagatggcgcctgtgctggacccgtgagaagaggatagtgtcccagggacagcgctgctaatgggagagacaggcaggggacaaggttggagctgcgtctggataaacatggatgaatatcgtatgttgtctcaccgtctccatcacttagaacccggggcttcacttggtttgctgttttattactgtgaaatgttagaaaagaaggaacgtggttgtaagtgacaggtgtctgctttggggcggggtgtgacacttggtgtaagcacctgtggagccctggtgggcgggaatcctggattgaagcggctctgtcaaagatgccgcaatggtcagctttgattgtcaatctgacacaatctagaatcacctcggaagacagtctcaatgagggattgtctagaataggttggcctatagggggctgtcttatttattcactgatgtggagacccagcctactgtgggcagcaccgttctctagaagggtttctgagctgtgtaagaatggagaaaatgagctgagcacaagcaagcgaggtgcattgctcctttctctctgctcagacagtggaagtgatgtggtcagctgtctcatacctgctgtgacttccctgtgtggtggactgtaatccagaacaatgagctaaacgatcccttccttccctaagcaccttttctcagagtgttttaatcacagcaacagaaaggaaacgagcccagttatgctgggctgtgagaatgagtgacttcaggccagtggaggcagcttcccccttgagtggggcgtggtgtggcccactggagccttccagtgcagagcgccagattggtagtggcgcttcacttctctggatttcaataaagaagttgtccctggcgattgtgagggcagcgatcagagggttgacacgtccggggtatatgtcagggggtaggcagtgctctccctaccttgccatttcagatgtgggctcagggatcactgtgccatgtgaaagcaattgtgatggtcccttcgaggaaaagtggctgtcaggcacacaggggttctctgtgttagggtcaccttaactctttaatgccattcatgtcattctttatcacttgccaaggcaaagtgtcagaactgatcagagtgagggagaacgtatttgaagagtcctcgtgctgatgtcattccgtcgctgtcacttaatgctttgttagctatgggcaggttgtttaaacccaggaccagtgagatggctctgtggatcaggatgctttccaagctaataacctgaatttgattctcatcccagactccatgtgatggaaggagagaactgactcccacaggttgtcctctggcctctgcatgtgcaccatggcatacgtgtgcgccctccctcagacatacacataagagaaatagtgagatagaaatctaagctccgcaggtctcatctctaaacagaaacaagcatgggaggcagtgcatagggagtagccagtacaggcctggtatgtgctcatagcgagacagcgaggctgggaggtgactccatagggaaagagctggccacataatctcgagggcctgggtttgagtgctggaacccacatgagcttgcagtctagttgccaggagacagcacgagaggatccctggaggatgctggcagccagcctagccacatctgtgaagtttggtaaaagcaagagaccctgtctcataaaacctcctacaagctgtcctctgacctccacacccaggctgtgggcatgtgcctgcgtatgggtgtatgcaggcacatacacacatactgaaaaagggaacaaataaataaaacgtacattttaaaaaacaaaacaaaacaaggtagaaatcaaccgaggaggattcctacagctgacccctcgactccacaaatcatgtgcacccccaaacaaacacaaagagaaaatataagaggttaactctatataatgaacgtctaaagtatttcagttttgatttctctgttgtgtgtgtacatacttgtacatgagtatacatgccacagtgtcctcctgctgccacgtgggtctcagggatgaaacccagtcctaaggctcaccagtatgcagtctgacccactgaggcatgtggctggccctgtgtgacttttcaaaagtgaacatagccaaacagtattgttaatctcagccttgaaattgacacagtcgtgttaacaatgaacaagacactggacgtatcccggaaatttttgtagtttgtggtctgttggaaggagctgcccatcccagaagccgtcagtggcagaaatggggtaagatgcctgttgcttgaagagtgacttagcaggggctctgtacatggcttgcagtagctggtgttaggttttcattgatcaggctaccccatacctcagctacagatggtactgtgagtggtgggagagggtcagctgtagaggcagcccgtgggtgctggagatactggcacatgcaagtaaggagaaaagccaaggcatttggagcctagtgctgttctaggctaaagctatcctaggcccaacactatatcctaggatcttagacaaattatttatttagctgtgggaggagggttgttttggttttttactgaaacaggtctcatgtacccccaattgcctttgacactgtatagctggggatgagggataacagtgaacttgtaatcctcttcctctactcaggagagcgcagcaacaggcatatcctaccataccctggctatgtggtctgaggatggaagccaggactccggatgctaggccagcactccatcagctgagccgcatccctagcccctgcttctttggcattacactgagaagaatagtgtgtgccctgcctttgcctctgcctgagcggtttcagagagccaaaggtaagatgcatatgaaggtgcattcttaaagtgtgcatggagccagcctgaggccgctgtgcagagtgagcactccccttgactctggctttcctcatgctattgttttgaagtcttttcttagaagaatccaatttcctgtcttgagtcattggctctttcactggtaactgaggagaacagcagttaagcgcaattatgcagtgttattataataggcgagcttggtgggaattaaattacacgcagtcccaggttcaggggcccattctccttttcatttctgtataagtctggcttgcattatttatagtttgctgtttgtatagacaatgggggtgaactgggggatatttttggaaggactttatgagagcagccctcaagcatcatgccagatatttgatgcaaaacgtgagatgggctggtgagctgccttagtgggaaagggggcttgctggcaaacctgagagaacccagcccgctcccgcaagttgacctctgacctctacatgcacaagtgtgattacacgtacaataaatacatgtttaaaaagttgagatcatttgtgtgtcacaggtacacttaacttcataaagaaaagtacagtgaggctcaggaagctgggttatctccaaggaaaggtcctaactgagtgaagtgctatgtttgaaggggcttatcctgggccgtgccggctagggacaggcttgtgctgtcacagtgcccattggtccacacacagagccatctcagcagtcaggaaggacatttatgggggcgggggatggagtgacaaatcaggccatcagaaggtggacactagtgattgattattgaacatgtactgcatgccacctactttgatcaagatagatagacagatagatataaatattttacatgtatacatatgtacagatatgtgcacattcaaccagaatgtgtgccttataaaatagacctatatttattgtatgtagtgtgttgattgcatacaatagcaggacagttaactgtagtcctacctgctctttaggctgaagcaagaggatctcttgagacttgagacaaagagttcatctagataataaagcaagacactgtcttagaagagggggaacggacacagggcattttagttttcttaagctttttgatagtgaagcttcggggcacatttatttctgttactgtgacaaaatccaccaacagaaagcaacttaaacaagaaagggtttattttggtttacaattccacagggatagagtccaccatagtggggaattcctgactgccaggaagcagaatgcttgcatctcctccacacacaggaagcagagagaacaggaagtgggcgccaggcacaaagccatcacgaatcatgtactccttccatcaaggctgcacctcctgaactttccatagtctttctaaacagcagcaccagctgggaccaagcctgtggggacagtttacatccaaaccgcaacatccacattgctttcctgttagcctatgaaagaactgtggtctccttcactgtgtagagagaccttttaggacgactgattatcacaatgtctgatagtgagctgctttgtgggaaggtcagcgcatgatggctcttcacttgacaggctgtgttcggttcagaagaccagaggagaccttcctttatttcaaagccagacagcatcataaagagatgctcttctaaagtcatctagacttttggtgtgattttaataaaaacaaagagtttgcataaggaacctaacaggcaggcgctgggatatgaataggcgtgaattcagatagagcagagctgaaggcttcaagcgtgatcttaagacgagaagcactgagcggcggtgggtcattggagcccaggcctgcctgtgtgaggcggctcatggtcagaagtcagacgcccggtgggtaggacggggatgctttgttttccatttgtaaaactatggcctcctacctttcaccacaccacagagattttaaagctaaacataaactataatgtgaatatatttccttagtatgttaacatatgaggtgttttcttccgtgtctgcttgtctcattgttccttgcttaagtaagctacatgtgttggtttcctttgtgttgttacaaaaaacaccctcagaaaaatgtgagagagggtttattaaggctgcagttgcagttaataaggcttccaggtcgcagcccgtcgttatagggaggtcaagacaggaacttcaaacagccagtcacagccacagtcagagcagaggaaatgagcgtgtgcgtgcttagctcacgcgatggtgcttaaccggagggaggtttgtgtgtgtgtgtgtgtgtgtgtgtgtgtgtgtgtgtgtattcctcatggttgtgatcacaggttgaactgatctagacagttccttactgagaatctacccaggtgattctagattgtgtcacactgacagttaaaaccaacaattccagtgtaaactctggaattagaggagcatattgttaaaacgaccttagctaagtccatcagcagctgtgtacagagccggacgtagcagcacgcgcagtgcgtcataatcccagcactctgcagctggaggcaggatctgaagttcagggccatcctcagctgcagaaggaaagggagggagggagggaggaaggaaggaaagggagggagggagggagggagggagggagggagggaggaacgtgaaggaacacgggagggagggaggtgagggacgtgagtggacacgtggagggacgggagggagcggacgggaggaagtgaacggaacacgtggagtggagtggagggagtggagggagggagtggagggagtggacgaactgttgggagcgaaggaggggaaagagaaaaacagtctcgaaggccggtcctgtcagtgagcttctgccctggccgtgagaccttttcccttcttggtacatgaggcttgtggcctccacctcgttacagtggtagaggcagctccagcatggctaaaccttgggctccagcttcctgtgtgttacactgacagaaacacaaatgaggagagtgggggtttatttggctaccatctattggtgaggggcactcagggcatgaactgggccagctgctacctcacagtaagcagagagagggagcgcacgcaagcaagcgtactgcatagtgcccagctggctctctcttctctcttatagtctgggcccacccccagggaatggtaccactgactctcagcctcagtgttctcacagtgattaaggcgatcaggacaatctcccacagacaagttcacaggccagcctcttcctaggtgatcctagcttgccttaagttgaaagttagcattatcacacctagactctgtcctgctgcccctgatgtgagctaaccgggtgggcgcccccatcctttagtaaaggtctactctgctggcatggctggaggcacccagccacaatccaggggagcctctcatgttgcctttctcgtcccctcaggatgcttacaagccccggcgaaagtaccgacggcagcggggagcagaggagctgctggacgaagagtcccgagtccactccacacttctggaatatggcaggtacagagtgggtgctggtcatcgtgtccaaacccagcaccacatgaaaaagtccagagtggcggcacacacttgttatcccagtgaggaggtggagacagggagatagatgctggggctccgtggccagacagcctaaactaagcctgttgagtaagatccaagccactgggagaccctaccttgaaaaccaaggtggaccctgtcctgaaaaggaaggttgttctctggcttccactcccctgtatacacacacaaaagaataggtattgatatatttagtggatggatagatagatagatagatagatagatttatagaatatacatctaaataaaggctttttgagttttcatgtcagcttactagccctctctcatcctcaagggtgctttacccttcttaataaactgtcgaaagaaagaaagaaagaaagaaagaaagaaagaagagagagagaaagaaatgaaaggaaggaaagaaagaaagaagcaagcaagccaacaattaattttttgttaattaaaattggacagctgctggagtggtggggtatggtgttagtctaagactggcaggcagaggcaggtggatctcagtgagtttgagaccagcctggtctacagagtgagagctccaagctagccaaggctacatggtgagatcctgtttcaaaaaagaatggagacagagagagagagagagagagagagagagagagagagagagagagagagagagacaagcaagctggcttctgcctgattgagtccacatttgcagctgtgactttctggtttcgtctctgtgcccacctttgtagttctctggaaatggctgtgaccgtgcatggactccgaccttcttggggagttggtgcagaggccagggctcgaacgcccctctttttaaacagacagtccacagagcacatgcagccatttcgtatgccctgcagtaatcctttagggcaaagattgatctgaatagaaaaatgaaagccttaatagtaagccttattacttcttaaaattatttgtcctggagagagttttactttatagcctcacttctttaaaaacatgcaagcacaggcttcccttggtcaacactggatattaaccttgcccatgtcctgcattgtctatccagggtgactgatcccttgatgtgagtatgtgcctgtgtctcctgcctatgtgtggggatagtgttccaactcttgtgtggctgacgctaactctctcactagcatctccctgtgtgtcttatggtgccttccgctgagaaatagtggtaagcaagaggaaattagacttagctgttctagctttccaaggaaaggcagtgcttattagtgtgcgtgtatgttgtgtgcgtctctctgtgtgtgtgtgtgtgtgtgagagagagagagagagagagacagacagacagacagacagacagagacagagagatgagggctgtgtgcaagccatggcctgttttgccgcagaccttttgggtccctatgtctgtgtggaacggggtctctggacgcgggtgggcaaagggtggatgatgacagacagacacacacgcaggagagtttgtgtggaatctgaatgtaattttacaactcgagcatcagactttttatgcagaggacaataaggaagttgggtgacatattcgcaaggtacaattgaggtaaccggaatcttacataaaacagaggaatgcaaacacaaaaggtctaacgggaaccacccaggatagaatacattgatatcagctgggatcaacgaaggctccacctaaaattcactaatcttagaagccaggtcaagggcttcgcgtccttgccatagttcctattttagtctcttgtatagtccaccttccccttaggccattgtaaatatgtgtatgggtgtaactctgctatagtatctattctggtttctcctttggtctgaaacttccttcttcctaagcgatggtaaattcctgtgtaagggagtgacttagcttttacaatcttgctgaattctaaacccttgatcttggtcaaggatgcccttggactgttggaacactgggggaaggctttagccatgtcagagcacttataggaaaaactgaaagagagcacgtggatccatactctagactagcgtggtactggaactcgggaatgaaaaattaatgtatgggtagagaacactagcctccaggaggagagcttccttgaaactcttttgcctcatgagtgacttttaagcctttcggcttgtccagttgactcgaccagagagcgtagcactgtttgtgtacagggtcagctctttccttccacctccatgtgggctctaggattcgaactcgggtctttgagcttgcatgaaagcacctttacccattgagccatctcacctgcctctggtagtgtggtggtgtttggctttgtttatctgcttgtttggggtgattctctgaggtcatctctctcccacaaatgaaactagtgtttcagaagctaccgagtctgttcagcattccttctgctgctgagaattgaatatggttttccaattcagagaccattcataccagggacattattttgagagggagcaggaactgtataaaattaaagtgcatagccccctgttaaaaattgttaataaaggcctggagaggtggcttgtttggtaaaagtgcttgctttaccatgacgaggactgaaattcagtcccaagagcccacacaaaacacacagtacaaaactgcctgtgattggcattcacttgtaactccagggctagaaaggcaaaggcagaaacaccctgggggctccctgcggccagcctcctctaacgggtgagctgcaggccagtgcaagaccctgccttaaaaatgaggtgggcacactcacacacactcatgaatgataaaggattgtgctgaaagcatggtgtgacctctgtctacactgtggagtagctgggagctcccaggaactgaatcatgggactcagtcactcagactccagactatgacttggaactacagatttaagccaccctaaattctgggttccagtgtggaagcagtttcatatcttaaatccgggcacttttcatatacaccggtggaaacgttaggtaggctcagggttacagcacacttagagaagtcacagccagaggccttggatgccatctcataactcttacccttttggttggtggaaaaaaaattctttaaatagtttattcttgaatcaaatatatgttactaaggccctggaacatgaattcctacatggaaatggtttcctgaaactatagaacaaannnnnnnnnnnnnnnnnnnntacatataataaataaataaatcttttaaaaaaaaaaaaaaaaaaaaaaaaaaaaaaaaaaaaaaaaaaaaaagaaaggcaaaggcagaaacaccctgggggctccctgcggccagcctcgtctaacgggtgagctgcaggccagtgcaagaccctgccttaaaaatgaggtggacacactcacacacactcatgaatgataaaggattgtgctgaatctgtctacactgtggagtagctgggagctctcaggaactgaatcatgggactcagtcactcagactccagactatgacctggaactacagatttaagtcaccctaaattctgggttccagtgtggaagcagtttcgtatcttaaatccgggctcttttcatatacactggtggaaacgttaggtaggctcagggttacagcacacttagagaagtcacagccagaggccttggatgccatctcataactcttacccttttggttggtggaaaaaaaattttttaaatagtttattcttgaatcaaatatatgttactaaggccctggaacatgaattcctacatggaaatggtttcctgaaactacagaacaaaaggcttttttaaaattaaaactacatcaggtagatgtgttaacaaaccaaggagatgtgctatgggcagagatgctgctgtccggtgacattcttagtggaagcaggtggtatgctaaattcatttcatcaggttgtatcggattagaggtgggcagtgaatgactgtgaaaagacttaaggatatcaccaaggtagttcagctctggatcctccacattccaaccctccacaatcctgaacttctaggtctaccttgtaaaaggttagctctgatgtggcttttcctgttaacttggcagcactgactaatctgcagaggctgcagtaaggtcctttacaggactgtgtggagacccaaactttagccttaggttgaattccctgtactttggcccactgtcctgcaacgtctgccatgtctgttttggtcttttccagttctattgcaaagttaggcaatgtttataacatcttacttcctgcattttctttcacttgtatttttttttttttaattcaacaaacgttagaaactcaaactgtaaaagcagcagcatccaccagaagggtacagacacgcgctcaagcaattgaccatgaccaacagagtgggggcttgtgtgggtgctagaaggtcaggtcttgctctgtatgtgtgcacttggacaagtgggagcttttgagacacagagcagagaggcagatgaagggagagaactggtgtgaggctccaggtggacagtagatggagcaggagctgctcggatgagcctgagtggggccttggaggagggagctggccagactgcttaggaacctgcagtgcatcttggaaagtgcggttgggtgggcggtggaagagcaggaggggaggggtgaagctgcagaccctccctagacagtgacagcagcacactgctcccatgggcaaggcgtgtcccaagcagggcagagcaaaaccttaatttgtgtttctcttaagtgcttgcatgcaactttatttgaaactaagatcttagaggctggttgttcacattatatcttttgtttggggttgaatcttttgtgtgtgtgtgttattgtatttgctttaggaaaaaaaaaaaaaagcatagtttttgttttaagccagaaaataaactaactgaagctgaaatgcagccatgcgcctttaaattttagctctgctaaagtgagtccacatgaatgacattatgtttgggttatgtgtgaaaataaaatatgggcgtgacttgaagtcattaaagcaatattaaagtctgcactggctttaaatacattgtctgtttgcacagatgtttttaaggcttttagcttgcagtgtggttttgatttttagcttgcagtgtggttctgagatgcaattcctgattcgaagagtaacgcgtgcccttaaaggatgctctctactgtcttagcattcccgtgtgtagcatctgaacagcaaataccgtgactggccagattcagaatctgataggttatgtttctggggacagcacatggaatattttctctaagcattgaataggctaaatccttttcatagtctgtgaaaagcctaagtgctggggctggggagatggcctttgtggtaaagtgcttgtcacgcaagcctgagggcctgagctcctgagctctgtacccagcactgtgtaaaagccagttggaagggtgtgcacctgaatcctagcgctgggaggcagaaacaggagggtccctgggccttgctggccagcgaagttggtgagctcctagttcattgaaaactaaatgtctcagaaaaatttagaaagtgactgaggaagctatccaatgtttgccagcctctaccctcatgcacacacacacacacacacacacacacacacacacacacacagagcatccaataaaaaatgcacttgttggaatttattgagatttgtgaatagtaattaagttgtttctcatggcttacaggagatacggatttagtcgccagagcaaaacagagaaggtaagacctacctagccaggtggtggcagcaggccctgggcaggcaggggtcctgggaatataccaggcacctttgtcccctgcttgttcgtcttggtatctctagcctgccgcctctgcagtccaggaacagaggcatccgagagctatagagcaaggatggttgaagtccagttgatagatgtgatgctgtgtcaggcacgcctcaccaaccctgactggcctgcatcagaagcaggaacttggcctggaggccctagattatccgatctcttttagttgggccccagatgttttctttcacaggctacccctctgtaagccagtcttgttcccgctgagtctccaactctggtgctcagccgttttctcatcttcccttctaggctgaggacaagaaaacagcacttgctgcagggctgtcagctgcagagaaagtggatgctcacgaggaagatgagcttcaggcagccgaagaggtgtgtggcatgtggtggctcttggaggttcaagtttgggtcacttgagggaagcattagctctcacccacagctctctcaagcagccttccactcacagttcccttttttaaaaatgttatgaggttcgccattacccctcattaaagcagcagctctggggtttcaccacagagacctgggcaggcgctcgctccagtcagtctcacacggttggtcagaactgctcctcactgttctcttcctctttcagcagcgtattcagtcactgatgaccaagatgaccgccatggcaaacgaggaggtgaggacttgtaggggagggggttgtgtagtagagatgcagatagagacttggccccatcctgatctgtcctaggggacctgaggcaggggaataccatcttcagagccctctgtcttcagaaggaagccttttatagtgcttagcactgacatcagggccttctaagaaggaacctgttggtactctgttcccgcaggagtgatgcactgacctttacggaagagcaagggtcagtcctgcttatctgaaaccgtgggagcccgtcttcttctgagcgcagctgtctaggcgatgaaatcctaagttgccagagagccttctcacaggtcaaggcctgcacagaaggagtaactctgccctggatgagaaagacctgtgggaataaagagatagtttagacagatggggcttctgattcctttctcttctcatctgtgagcctcaggtccccaaatgtctggacatgagggtggagatgaagggatcctagaggtaccctggtcttaaagaggaaccagtacctaaggggaagttagaaaggatacccaagacccaagaccagaggggaagctagcatagctactaaatgacttgagagagagtggtcattccaggggcaaaggaagcaaacacagccaactgagtgctggagacaggagaggcagggcagctctgacgcttgtcctgagctttgtgggtgagtcagaggtcaaagccaagtgactttcctggggcagtgctgtgtattttgtatttagacaaagctctgtgatgggcacgtgtccctaagaatatacgtcatgtgattgcagagccgtctcaccgcaagctccgtgggccagatcgtgggtctctgctctgaggagatcaagcagattgtgtctgagtacgcagggaaggtacgtgactgcctgccagcgcctgggccttgggtcacacccatggcttcatcctccccttcccagaagcaccagcaccaggcttgcccatgcacagccatctacgcccgcccatgagctaaattcatttggttccaaggtgctaatttttttctataaatattaagggaaaagtctgtcttgaaatagcagtcacatctaatatgtcgccacctgcaaatccaggcagtcatctttcctgccctgtcaggctgcttataactcaggcttagtttggcttttttgcttttaagaagacaaacttcataactcagccaagcccaaggcagaagtttttcctggacactttattattgagaaatgtgtagattgaacaaaagcctcagtcatatttcaatgttacttctcttcccaccctaaagagaggccagggggccttaaatatttcagagatggagtgatgaccatttttaaaatagctttaattttttattattattgatctattggagggggaggagagttatcacagcatacatgtcgaggtcagagagcaactttatggaatagattttctctttctacctttatgtgggtcccaaggttgaactcccagagcaagcgccttcccctgctgagccaactgggcagcccggtagtgaatcattttgcacataactgagtctagtgtggctgtgctttggcctgggtgagagatgatttacaaggctctcttgggtttttcatttcctgttgtgataaaatgccccatgcaagcaacttctgggggaaagggtttctttggctcacggttctgggttatagtccatctttgctgggaggtggagtcaggaggaatgtgaagcagctgatcccagccacagtgagagcagagggcagtcagttaatgcgagcatgagcatgcgagcggtggctccctctcctgttcctctgcccagggcccagcccatgaaatgttgcctgtgtaccttgcccactccacccaactacacaattctctcacagtcatgcccacaggctaacctgagcctcactgagcctcctcacttccagggtgagtctggactggggctagtttgtgactagagctgacatcagaagggtctgttagctcgtccctcctttctcacctgtgctctgagtgaagggtgcttggggaattgctctcccctagggccaaagtgaggtctccaaggcatggagcttcagagcaggacagtgcgtaggtcgatgtctggggtgggtttcctgtttccctgtcgtccaagggtatgcttctaaacatggctttccctagctctcatggactccaaaaggtctgtctttgcatgtatcacctagaaaggggagcactggcgtgccatctgagactgaaccaagagagattttgcctactgtaaatgtacagtaaactcaaaagattgcaattcatagttgtgaaaggggaataaaaatcactgccccagaagtgtcctggtttcctgtcagtcgatctaagtagcaaggctgtgagtctgacataattctagactgcctgtaaagagctttagtcagcgaagttcaagaggaaggagaactagatgtgtttccactctgcctgtgtataaatgtaattgtgtgtctgtttctgtgtgcatatatgtggatttgtgtgtctctgtatatgtatttatgtatgtgtgtgcattggtatttgtgtatatgtctgtgtgtatatatatttatgtgtatgcatgtgtctgtatctctgtgtatatgtttgtgtgcatatgtgtctgcatgtatgtttgtgtgtatgcttatctatgtatatgtctgtttctgtgtgtgtgtcggggggaggtgttgtttacatgtataatatatgcctgcttgttagcatggggcatgcatgtggaggccaaagtcattgaaaatgacttgtgaggcctggtcctctcctcctaccctgtgggtcccaagaggtgagcttgggctgtcaagcttggcttcaggcatctttacctcctgagccagttctctggccctcagtctcttactgcgattaatgctttcactaggtttcattgattctgctgttcaggtctatcgaggcttttccatttgtatccacttaccctactactgtttgtcagagaacatctttgtttccctgtgacacttgagctttactctgcttttgtgtttcctgtctaatttaaaatacaaaccaacctttgtttcttatccttctgtttgcttcaggttccatcaggaaaccttgctgttgtgtttgcttctttctgtcttgttgttgcatccagccaaagactggttgtgttcaacctggaccccactcgtgggtcgcattgggtttattgctgcatgtcacacctctgtagaggtgcacagcagctagttaagatggtgttgaaaggtttagctctgttttggatgctataaggaagggcctgtgaccttgactctcaacatgggctcccacacaccacacctgttgctttgttgccttcttgtctcagcaccataggttggcttggaactgggctctggtgtcctctgagatgggcattgctgttatcagttttgttaggagtagtaccactgtggtcagagatgaagacaaagtgttccaagcagactccattagtgccatttaagaattgtccaagctggactgttacctgtgtgcatttttctttagtgaggagaaaggacccccccactttcgcagggtagaatgtaaagaagatttttgccaacaagggataaattgaacagcctgcctaaagcaagtgcttgaaagaaaagggctaggctttgggatctaaaagtgaggaagaaataagaaaataagtgtcagactcagctttcagttttaagattcacaggttcttctgacagcgtgatgtgatgagtagcccacgtgtttcaacgcaggctgggagatagctaactcagtttactatggttcttgtaaggctgcaggttggggggtatgacaaagcatttgtagttgtcatccacgagtgaggctctgggcttggtaggtcccatctccctgttcctacctgacactctcagaatgttctagaaggcctcacgaagccttttattgttgatatctaactttctccagagaggagcctctcactgtggtttgcagacaacataacagcctgactgtgcaaactactctgacttcactaatcccaggggcatcctaagaagcagccaggccggggcatatgcagggtccttggaagagccctaatgctgctgctgctgagtcaccacctggcatgttgtcgccttggtgcttagccagctaagtcagccttagctgatatgtctgggggaggtcctgatgggtcttctggggggattctgtgggtctgaaggtgtaggggatctgtgttctgcaaacagagtctgcatgtcctctctgttggcatcttgtacacttttaattcatgactgtttatgtgccggcagtcagtcttcaccttctatgttgtttgaaacctctcttgttctgtgctgagttctacagccttgctgacccatttgcttccagaatattcttctgtctctgcctgtaggaatgctgcaccatctccccagcccagcatttttaatgctaaaagaatatttaactgtttctcttttttacacctttatttacttgggtgtgtgtttgtatgtatgggagcaaggagagtgcgtgctgtgacttatctgtgaaagtcaaagagagctgtctagacttggttctctctcccaccatgtgggtcctagtgttgaactcatgtcgggcatggtggcaagtgcctttactcaatgagcatctcgctggctgagataagttggtttttccaagctgtcttcttgcttaagaccttctgccttcctccctcttcatacatatttgtccttgtctgttgctgtcaaaatggaccacattctattgtttaattgagcaactcacttactaaataccacggttgttggtgccgaggaaataagtctgtaatgttatatacatttgcagatgaagaaagtgcaggttatagaggctcagtcatttcttcattcgtgtgcagctctagtacgttcctggtttgtgcaggaccacctgcctttacagcctgtctgtttagccagctggagggtcatggggggtggggtgaatgtatgtgccctctgtagttcttcttctgagcctgcagcaaccacgtgcttcctcaggcatgcacacctccaccgactgcctttgtactgcattggaaaggatgagtgcactaggtatggacgaaccacagaagtaagagaacctagtacagcctggggcttacacagcacgacaagccttctggctactgaagttccttttaccatcttcatcgttgtcgtcattcttttatcatcatcaccactactaccactgctgtcatcattgtgtgtgtgtgtgtgtgtgtgtgtgtgtgtgtgtgttagacacatgtgcgtgttctatgtgtaaagtcagaagacaaagtcagttggttttctttttcctcctgtagtaagccaaggcatgcactccctttgccctcatatatacgacaagcacataccagtaactaaatggggatcaagctcaggagacaccttctggcctgtggaaactatagacgtttcttctggggtatccagtgactttttttttttttttttttttttttggtttttcgagacagggtttctctgtgtagtcctggctgtcctggaactcactctgtagaccaggctggcctcgaactcagtaatctgcctgcctctgcctcccgagtgctgggattaaaggcgtgctccactacgcccagcttccagtgacttttcatgtcactgtagaacacattataacattttcaaatagctctttctaaagtatagtattttaggcaaaagagatagcttatccaattaaggtacttgctaccaagtctgaggatcatggggggaagagaaaactggctccagcaagttgtctccccatctccatccatgtgtacgcatgcacacacaaaaggagtaggagtcagtatcagttctgaggtaaagtacagcatcccagcccagtgctgtttcctgtgcctcctctgtcatcttatttccatggggacatgtgctcatgtcctcaagagccttatttatggaaggcattcttctcccagctggttctggaaggccccgcccctgaccttctgaggactgcactctggcacccagtttgagagcacctttgtctcagcagataattagacctggggctggtccaagcaagcacatgcagaactgcagaggaaagaaccttccctctggagagctcagatgccgaagcagctcagcctaggtttgcaggtggtacattctcccctccccacacacacatgatgatttttgttttatattttatttccttaaaatacattactcttgtattttatttgacaatatcatacatgtctgtctataatgtatcttggtcatttttgccccaattaccacctctcccattcccactgcgcccttcttcccaaaaaattctcctgattttgtatcttttgtgttttgctgctggtggtggtggtggtggtggtggtggtggtggtggtggtggtggtgtgtgtgtgtctcccactgagtttaattaaggctacttggataagcctaggtgaggactgtttattgtagcatgggcagaccctactaatggctacacaataaagaatgtgattctccttccccacagcaagcagcaacagccagtagttccttgggtcaccaggtgacctcatgccctcctcccactacccctaggatggaaagttggctggtttgatcttacaagtgtctcgtgcaggtaatcacagccatccatgaggtaggtcaccactgtggtgcgcttgtcctgcctaagagacagcgtctcagagcacccctcgccctcatctggcctgtacgttctttccattcctgtccccctgccttcagtgcaccaccgaggactgccccttttagggctgacctgttcacataacagtgtgaactgactggaaaagagtgcctcttcagttctgccacccacgggcctggccagtgtgcgtcccagcaatgctgctgctagagcactcgagggagagctttatgttggccggctcccttctgggcttcctgggaactcagcttttgtcaggaccctttgcctgtgctggccttcttcttccttaaggccttcacttgaaggcctggccaactgttttagtcagacagcctcttctcatatttctatattaaatcctgagagacattcatctcggtgtgacaggctccggtcatttattttcctctcactccattccttgtatccaagttgggatctgtgattggcagtgcctctgtagactggagatagtgatttcccacaggaacatgctggtctcattaaattagcacctagaggccttaaggacgtttatatactaaatctgatagggtgggcccagaagaaaaaaattaatactttatgtgcctacttgaggttctgtcttcatgttatgtaactgccctggttttgtgacttggccactgtttctaggttatgtgtaatggcttctaacaatagttgtaaagacaatggggggcttcggagatggtgccatcacacaggcatgaggaccggagttcagtccctaaaactcacataaaagtgggtgtaggtatggtgggcacatttgtaatctcaatgctgaagaagagagactggaggatccccagggcttgctggccagacagactaccataatcagtgagccccgggttctaatgagagaccctgcttcacaggaaaagagtgaacaacccctgatcgacatttagagttgttctatgactgctactcatgtgcgtacatgtctacccagacacacactcgcactcacacacacacaaacacattaaaaagaagcagaacatggatcagggagagtggatggttggtccatgaggagtgcctcagaaggtcacttgcacactactgtatgtccagaggacagcagacagcagtgagagacagggacatcgtcctgtagactaactgtgggtgcttctctgtaagctgaactgtcacatacaggcgagtgtgtttcggggttagtggccctgattctcttgtctgttcctgctggcttcagtgctttgactgccaggagtttttcgattacatgtacatgctaggagtgtgtgtacacaccgtggcatacacacctgggcgactcccatggagggcagtaagacagcttacagaagtctgttctctcctcccgtcatgtgggtcagaggatcaaactcaggttgtcaggcttggtgacaggcttacctgcttagctacctgtctagcctgcttgtgagttgtgactgtggattcaccatatttcactaaaaactttctgtggaagtttttggaggcagaaggtttcagctctgtccttcctgggaggatctcgtcttgtttcttgggcactcgggtacacctcaacactggtctgttttagagtcctgactggcaggtgttttctgttgggttttgagacagagtctcacggagctcagtctggcttccactcagtctgtatgtgaggatgatctgacctcctgatcttcctgcctgtgcctcccaagtgctggggttgcaggtgtgcacacttgactcctggctggcagttttatgggcatgcagggagcactatggatttagatggcagaactccaagaagctagccaaattttattgtgtaccttttccttttacactgaagccaaggctaatgtggagtctttattgatcaactgtaaaaatcaaagctagacattacaaggttttggaaaataccctgaaggaagtaagccatcttccgtgagggcacgtgcctttggagtcccacattcacttacattttggcctctcggatttgcatcgcgtcttcctagctcatagctgtggtttgttgtctgtttgcttggtttcaattggaggctcacaagatgtcggaaaacctaagttccattgatgactgtggagcgcttcgacccccatgtaaggtgggctgcagggtcctccctttctcatcctggagactagattgtggccggaagggactaatgggggagggggttcctagactagaagaaagttagaagtggggatgtagctgaggggtagagcacttcgctcacactgggtttgatcttcagtgctgaaaaatgggaaacagggatgcaggctagcacataggtaaccttcaggggctccttcgattctgacaggataccaatgtaggaaatgtaatcatttcttatttctcttgggtgtttaatattttgaactagactgctgccatcaagtgacatttaaagccatctcccctaagaacaggtgtcatttctgtctgtcatattagaaaacatgagctctgcagccgagcctgttaatccactctgtggttttacaggcacgttcttaatctgcaattgttgaacaaaatgagatcagcatattaacccttgctcctggtggggacacagggcgtgtttgtcgatgctcagccttttcagaacagatgttgtattttataaacagactgttaagataccaaggacttaaaatgttcccatggagggttggctgtcaagccccatcttgtcttcgccatcttaccaactttgcaccattgttaaaggtgtggtgtatcttggtcctcttcagcctgttctcctgctgtagctttcagtcagccagtgtcagatgagctaggctgttttaagggcctgttttctgccttcagtctgggttctcctggctgttagaaagataatttgggagaaacaaaaatttagagtgtataatacaaagtatgtttgaaaagcaatgagactaggttaagaacatcttcactatagctctaggataaactgctttgttgaaaggcttcccatctggaccagcggcttcctgaagcaccacttcacttagactagagaaaagggtcaacatggagatagaagtcaggatcctgagttagttaacgtgaaggaacactttataaatgaaagtttaagaaactgcaggggctgcagggatggctcggtgggtaaggtgcttaccacacagcatgaagacctgggttcagatccccaccatccatttaaaaagtgggatgcagccgcacatctgtaatcccatccaggaagatggagactgtaagatcctctggggctgcatgtatacgttcacttagtacgagcagaaagattttgaaagcccttgtttcctggaacatattgtaataaagatagaacagatttgaaaagacttaagggttcttcctgtgcgcatgcattttctatttatatgattctcagtgagagagtggattggagagagaaaattttcattcttcctaaaacccttggtggggtctgtcaactcatttgcttcccaaacaataggtccattgttgagttccaggaactgagaagattaccaagtgtaatagtcaaggttgtctaaggagcagaactctgtgtgtgtgtgtgtgtgtgtgtgtgtgtacaagatttgttagagtggcttataggctaccatggctgtcttcaagtggaaagtccaagaatcgaatactgttcagtctatggggataaatgtctcagctggtcttcaacttacatcagaatcccaaagaagtagacttgaataccagtgaaggaatgcctcggcagcaggatagatgaacttgccagcaagagtaaggacaaataggcaaaagctttctttttccatgtcctttatataagctgccaccagaaagtgtgacccccaaattatctaatcaagagaaacccttcacaggtgtgcccagccatttgggttttagttaaatccaaagcaagttgataaccaagaataactgtcacaagtgaactagaagaccctttggatgaagaaatatttctcaacacatttagtttcagcaccctgttcaaagattcctaaaattttctgaagactggggaacttgtggattgatttgtttatggataataatcaatgtattccatgtcaacattagagcaacgatgtcacatgtaacatctagggaattacactgcacagacatgacaaaatgcgtgtggagattgcaggtaccaccttagtgtttatgagtcctataaaaagaagttaagagagcctctccaggcttgctcaaaattcagctatgggtgaggaaaacaagaggagagacagacagacagaaagagacagagagagaccaaatagtttgaaaaatcctttttctggaaatcaaaatatctactggtctccttcaagaaagacttgtaagtaaatattagagatatggcttggaatagctgcatgtgagctgcatgtactaaaaaagaagctgagaaaaaggcagtttttattccagagactgactataaaagctgttgatgggagggagaagggttgtgaatttgagaccagttacctgggttacagagtgggatattgtgcgtgtgtgcatatgcatgcacagacacacacgcacgcgcacacggacagacagacagacagatgtgactcagttggtggaatgcttgcttttgcttggtctccagccctgcatacaccaagcatggttctgcacttttgtgaccccagcacttgagaggtggagccttgagggcatgctcagctgcaatgctagttctagggcagcctgggcaaacagagccacactgtactgagggggtggggggcagggatgggaaatgaattattccaaacaaaacagcaggcttgtgtaattctgatagtgatggcaaacgtcctcgggctgtgcctgtgctgttttggagggcagggtcaggggttaggttggatattaaaatctcattcggaaatgaggtgcaagctacaaacagggccaaatgaatcatactgttgaggatgggccagtcaaagcgggtaaggtacggtgagttcgttgtaactctggctttgaagtgacttggactagggatccctcctacattttttttcttctaccgtcaagtagttcagaaagagtttatccttcaccaggctataggttgtaccttgatgtaggcaaaattaatcttaaaatgttaattcccgttccagaaatccagcaagctgagtgtcttagtgtcggtcttattacatcatttgagccaatcaatcttccccctcacaagtgtgcctgggggttgcctgtgaggtgattccagagcttgccaacttgacagtggatactaaccgtcactcgagcatgttagtgggcggggcgttttctgaagtgctgggttgtgatacctgatgtttagtttctttttttttttttattgtatgtgcatgtacacgcatgtgcatgaaggtgctctcaaaggccagagccatcagagctttccaagtagaagttcacaatggttgttagctgccaggaacaatcgtgctagaaactgaactctggtcctccgaaagcagtgtatatatactcttacctgctgggctgtctatccggctccaagggttttctatttcctttctggcctgtcagcctctagtatacagaatgttaatcttggctcttcactgtggtcttacccagcacactctttccaaactccagagtcattaaacagaaaggcaaatttaaaaaaacaaaacaaaacaaaaaaaaacccaaactcttcattatctcttaatggtgttactagcagaggtgggggagcatgcatgtgagtcagaggacaacatttggggtaggttctctccctccactatgatgggcctgggggttgttctccagcccttgccaccatctttgcatcgttccttagtagtagtcagtacctgttaggaaatgtcagtcctttaccccgtgacactcactacccagaaatctctcctttgcctgcctccagttcttaagcctgtgtgtgcttggccttctcgtccccatctcacgtgtccagctgtagaaatttaccacctgccttctctggcaacttactccttttgggatgaagcaggaaatagttgagagagtggcctgcggaacggggagagataagtgggcggacttgctgcttatcatatatacgtgctcggaaatgactagactttgcaactttatgtttataaaactttaatgaaaatgaatcagtttataggttattccatttttcattacacttatttacatttgggtgtgtgtctgtgtgtatgtacatatctatgttttcacatgtaccatcccatacatgtggcgatcagaggacaacctgtacctataagagtctccttctgcctaagttttgggggattattaggtgtggtggcaagtgcttatatctactcagccatctctctagctccagcttataactgcatgattccaggtgttcttatgaagaaatcgctaagagccctgagtccccctctcaggaccctctgttgcctggataattcatcatgaccttagctgggcagcctgcacccatgctctctcccttcctccaaagcacaggctgcctcagtttctgtcagacttttcctgtctagattttggtcctgagcaggacattgtagataccctggatggctgtgactggctgcccagaactgtcttgcttacactgagtagggatagacaacctgaatagaaatgagttcattgtctgctttgggttttcctacagcagtctgagctgtccgctgaagaaagtccagagaagttaggaacctcccagctgcatcagcggaaagtcatttccttgaataagcagattctgcagaagagcaaacatctggaagaggtgagtgtctttctacttccactccaggtagtgaccgttcttccaagagaggagaagttggtcaggagataccgaatgagagagagccttgtggtaaactggtcaaaggaggctctggtgcaggcatgctacaggcgtcagtccatctagctgcatgtacttttgtaaagtgtgtgtgtgtgtgtgtgtgtgtgtgtgtgtgtgtgtatgtgtgtggcaggtatgtgggggtacttgtgtatgggtgtgcatatgtgaacctgatggatatgtagacgccagccttccttgatcactgtccactttatttactgagacaaggcctctctgaaccgttttgactagtctagcaagctgttgccagggttattccttgtctctgcctcctaagctctggaattaaaggtaagctaccacactgacacctagcttttcacatgggttctagagagccagtcttcagttttcagccttgcatagtaggcgcttttcccctaagctctctgcatccccatgaataaagtttcactggaacagctaagcactcacctacttgcctgtttttctgtgattgctttcaagctactgtagcagagttgaacagtggtaacagagaccaaatggcccacagacataaactaggtactgcttggcccttgataggaaaggcttattaactcggatcacagaagtacagagcaaggcaggaaagatggattagcctccactggctctttttgcacttgcagaggacatgtattctaactcccatcacccacacttgctgctcacagctggctgtaacttcaggggcctgacaccctttattgcctctgcgggaacctgcatgtgtgcacaagcatgctagtgtgcccgtgcatacacacagacacacatgtgaaaatatacaggaccaaaatggtatttctttgctcatgtgtagtattgtgtatgttaaatgctaagcaaaattacagaagtgagtgaacagtgggccagggccttgcctgccaggaccctaaggtgtaatggagacttgcggtgaatgaaacagccatcacactgccactcagttacagttgcggtgacatggtaactgctaaggggaagtctgggatgctgggactaatagagctaatggagcccaaggtcatggctgactgcatctggagagataaatgggcactggctgaatggaaggcctgtgtggagctgttgaggagcctggtggggatgtataaagcaacgctggcaaaggcgaagggagggagagttggccggttcttttctgatggttgagaagttgagtgactgtgcaagcatcaggccctagtaagttcagttccccaggtccagatggaaagcctcggcattgctgtatgcacccataatcctcctcgtgccaaggccatgctccacgctggtttccgggtgtggcttattttctcttctctgcagcctaagacatagctcactggtagactgttggtcatgcatggaaccctagcttaactccctagcactggaataagtaaaagtggataaaaatgaaagtccttctgtgtaagtctgttttaagccgatctgggtttccactttctcattgtaaaagaggggtcccatcgaagtctgtactgagtaaaggactccattcaagcagatgtcctttttctctcactcacagctgcaagcgaatcataccagcctcaaagccaagtacagcgacaggaagaagacactgacagaggtaagcagacctcccccaccacacccccaacacacctgcactgtgacctcagggccctcagtcaccactcacatacatgctgatagcacatgacactcatgaagacagccccaaagccactccaggaaagctggacactagctggctgtcacattagcagcatgggctaccagctctagcgtatataggtgtatcacccacaagcctaccagtcacaactcagactccctagatggaagggtaattccctttgaacgagcactgtctttccagatctctgtgggcggccaaacattgtatctaaagtgtatattgctctgtagtatttctctagtcagaattcatttataaattggttcactgttttttacctgtgctccattgtttgtgtactctgggttttgtgttcatctggtttaatgtttcctctcgctatctctctatactactgtctattcttcccagtttcttggtctgttactgacaaaacccctgacaggaagcagcttgaggaggggaggcgttagtttggctggcagttcgaggatgtaatcagttgtggtagagaagttgagacagcaggaactgtctgagttgagcagctggtcacacctcacccagccaggcgacaggcagatgactgccagtgctcagctcaggttctcctctttctgtagtccaggtcaccagccttgggggtggtgcctcccacgtacagggtaggccttcccagctcagtgaacctcctgagaaactcacaggcttgcccagaggctaacctggcctggctaatccattacacgtgtgcccagagcttgtctcatgagtgattctagatcctggcaagttgacagtcagtattagccatcacgacagcttgcctccattgttctgcagaagggtgctgccttctgtgtggtagatcagctgacggtaagagctactcagagctgggaaacttcccattctctctgctgttgccagcaatctggggctctcagatgctctcctctgggtaacggtctgtcttcggtgctctgtcaacccagcctcgctcccctaatacaggccgtagccctacaagccattcttcccacctgtgctggctagcactccatacctgactcccgtctgttccctgtgagttaagccacctccgggttccagcatcatagcctggattatttggagacttggagtgagagggtttgatgagacacctgaccgcactactgccattttcagctagggatttttttaaacctgtgttttgtttgaatgagtcacatattcacacagttcacaaaaacctcacaaaacacaaaaagtgaatgcctgtaacccaccatctgtctactcactccagggtaataaaagcacagccagtattttctggatctttcaagaactgttttggttttatagcaattataccctacatacttgtgcacggtccctctttataattttgtttgtttgtttgtttgtttgtttagcgtgtgttgggggtgctgttaagtgtgccacagcacttatgtggaggtcagaggacaacttgtgggagttgattctcttccaccatgtggattccaggacctggagtcagattatcgggctgttactgagtcatctcatcagcccacatctgcgtactttatctgctttaggagtttgccatggtcatggttttatactttgctctctagatcattgtaaaaggtgtactttacaatagaaggggcggagagatggctcaggggtcaagtgcctgctgcataaagacctatctatgttcagaacctaattgtccaggtaagagcctggcacattgtggcacctgggaccccagcactggggctcactaggcagcgaggatagcgaaaccatgacttctatttcagtgagatatcaggtctcaaaaattaaggtagagaagcaaaactagacgaagacttctctgcatcagcctctgcctccacgtgcacaccaagcacaggcagtgtatccgtacacactcatataccatacacaaaagtatattgctgtacgttaacatctgcattttcttaaagatttgtttcattagtggattcagaaaaccatttgtcttgttagggtttctgttgctatgacaacactgtgatcaaaaagcaagttggggaggaaagggtttattgattttaatttgccattcatcagtgaaggaaattgggacaggaactcaaacagggcagggacctggaggcaggagctggtgcagaggctgtagaggagggctgcttactggcttgctcatcacagtttgcccagcccactttcttatagaaccatcaggccagagatggagccacccacaatgggcagggccctccctcattggtcactaattaagaaaattccctacaggcctgcttacagcctgatcttacagagacattttctcaactgaggctccttcctctgatgactccagcttgtgtcaagttgacacaaattcagccagtacaccactcaagaggctgggaagtttcagccctgccatactctcccactctctctcattcttcctttccccctctctcttccccctctgtgtgtgtgtgtgtgtgtgtgtttatacccacccgctttcctgctccaaggctgtttgttttccctcctctgtctgctgcactgtgaggtcatcaccagtgtctccaaagccggagcagcatttagtgggttttgactctgacctccctggcaccttccctctaacccatctgtctggcccatctattttctcagtgtgcaaccagatccagtgggctcagtcatctatccaaaatgagcgaggaagccgggtggttcgtggagcacaccctcctgtttgcttttaagtcttcatagctaatggtgaacctgctctctcttgcagttgaaggatcatggtgagaaactagacaaagagcaggcagccctggagaaattagaagccaaagccgacccaaggtaaggctttctgcatgtgccaccatctttttgaggaaactggctgcagtgtctgatgcttgttttgtctgatcaagggacagaatagccagaggtcatgggctggtgctccatttccattcagttaatgtcacgtgaccaacagggaccagcagtcaccttgatggtcactgagctatttgggctgcactgagccacccgcctctcttccagccctccctgtggtcagagctcttctggtgttctgactttaaaaacaatgagacaaggctgggggcttagtaggcaaggtgcttgctttttaagcatgagagtcttaagtttgatgtcccagatccagcctgcaaatgctgggcctggtggtatacccttttgatcctagagccagagaggcaaaggcaaggctcctgacactcgctggccaggcaggcaggctacttggcatgtttcaagccaccgagagcacaggaggaaccagcttctgcatggagaagagtgcttactgtgtatgaagcctgatgggccaggttcactcccacaagttgtcctcagactgccacacatgctgcatgagcacactcactcacacaagataaataattagatgtaaaaacaggtcttagttaaaagaaaatcagaggcttgcacctgaagaacaacagttgagattatcttctagcctacatacatgcatatgcacagacacatgcaattgcatgagcgtgcatgcacgcacacacacacgtgtacacatacatatacacacacaaacacacatttttttggtaccatgtttactctgagtactattaaataagtgatatatgaatacaatcaaagttccttgataattccagaattgacattctcactctagaatcctgtgaggtgtatccgtgtgtatgtgtttgtgtgtgtgtgtgtgtgtgtgtgtgtgtgtgtgtgtgtggcttgtctcctcatgggctctagggcccaagtgcatagtcagaaatggaaagtgtgaccatttgtcacagaaattaagaaggagctctgtgtattctcactgtggcttcagcagtgattcatgaagccacatcctaaaggtctgccctgtgccattgtctggtctctcctcagcatgctgcagaacctgagagcacttgtagccatgaatgaaagtctgaaaagccaggagcaggagtttaaggcacactgccgggtaagtgctgggtggtattggtaacaggcaggagggttcttggtttcccttccctgtgacgctgggacacactagccagtgcagtgtcaaaggctgacgtgggctttggaggtgactctgtagataaagtgatttccactcttgcaagcctgggagagttcttttccagaaaggtatgaacttgcaagtgagagcttttgtcttagcacaaactaatgagagaaatgtctgcaccaaatagttaaattgcacagacaaaatggctcaacaggtaatagtgcttgccaccaaggctaggagcctgacttcagtctctgggatgcacacagtagaaagaaaagaactgaatccataggttttcctctgacccctacacataggctaaggtgtgcaatgtgagcattagcacacacacacacacacgcacagacataaatgtaaaaacaagccgctgtggcttaaacagttaccctccagttggtggcttccctgagctttgtaaaggtttaccttgcttttgcaggaggagatggctcggctacaacaggaaattgagaccctgaaagctgagagagcaccaggtgagaaggtaagccttaaattagccctcagtgccatcagccactttctggctggtgtgtggaaggaacctccattcactccagatagagagggcactgctgggtcaaaggaagggttctaagtctggcgaaccaacacaatacgcttattggggtcagttacaggggcgagggtggctcacaggcaactccaaagggagtcctggtgacttaagggcagctgtgccatggagagccccactttagtcagtggttgacctcttatataacctggggagtgggagggtctcatgctcctcatcccagccactctatttaaagatggcaacagctaaggcaagcctggagtaaacagctctcagcaccaaccattaatccttttccaaaaagcactgccactttcctggagctgggcctataaatgtgtattccccagggttggagagatggctcactgggtgggagcatttgctgcacaagcatgagcacctgagttccaatcccctgcacctgtgtaaaaatccgagcttgaggcgctggagagatggcttcatgattaacagcacctactgcgtctctctgttcccattactgagaaaaggtgctgacctcatttccttactttcagatcatctctggtggagagccgcagggtgccctgacctccaccatgactcacaatgtaagtatctccttatccttgaggctggcattgtcccaagagaatgtgtcagcctcctttctgttcttgctttcccagtatcatctgctctgctgcctcctctgtatagtctgctctgctgcctcctctgtatagtctgctctgctgcctcctctgtatagtctgtgttgctgcctcctctgtatagtctgcgctgctgcctcctctgtatagtctgtgctgctgcctcctctgtatagtctgtgttgctgcctcctctatatagtctgcgctgctgcctcctctgtatagtctatgttgctgcctcctctgtatagtctgtgttgctgcctcctctgtatagtctgtgttgctgcctcctctgtatagtctgctctgctgcctcctctgtatagtctgtgttgctgcctcctctgtatagtctgctctgctccctcctctgtatagtctgcgttgctgcctcctctgtatagtctgcgctgctgcctcctctgtatagtctgtgttgctgcctcctctgtatagtctgtgttgctgcctcctctgtatagtctgtgttgctgcctcctctgtatagtctgcgctgctgcctcctctgtatagtctgcgctgctgcctcctctgtatagtctgcgttgctgcctcctctgtatagtctgtgttgctgcctcctctgtatagtctgtgttgctgcctcctctgtatagtctgcgctgctgcctcctctgtatagtctgtgttgctgcctcctctgtatagtctgtgttgctgcctcctctgtatagtctgcgctgctgcctcctctgtatagtctgtgctgctgcctcctctgtatagtctgtgttgctgcctcctctgtatagtctgtgttgctgcctcctctgtatagtctgctctgctgcttcctctgtatagtctgtgctgctgcctcctctgtatagtctgtgctgctgcctcctctgtatagtctgtgttgctgcctcctctgtatagtctgtgttgctgcctcctctgtatagtctgtgttgctgcctcctctgtatagtctgcgctgctgcctcctctgtatagtctgtgttgctgcctcctctgtatagtctgtgttgctgcctcctctgtatagtctgtgctgctgcctcctctgtatagtctgtgttgctgcctcctctgtatagtctgtgttgctgcctcctctgtatagtctgtgttgctgcctcctctgtatagtctgctctgctgcctcctctgtatagtctgtgttgctgcctcctctgtatactctgtgcagccactgcctcttctgctcggttccattttagacacttcactccttaactagaagacacctatgttgaccacatgagcctcaaagggcgaaagagtgatatagagggaaaactgccttctttgctattttatggcaggccactgctctagttggccatactgactgtatcaggtgtatccaacctacagctcaacagttatcaacttacataaaatattatgagggaattttttttgggggggacttgattgcatgttctcaagcacaaaagttgtaagggattatattgtgtcacatgtattataaataaatagacatatatatatatatatatatatatatatatatatatatattagcacaaccctatttatagaaataggcaaagagtcagacatagctcaaaggttatagactttccatggcatactctaagtttgccgaaccctgttatgggttaaaacagtacttatcacatgtaaagagaaaggaagaggataagcgggggaagcagggggcaccaagcagggccttctttaagggtggtcttcaaaacctgtaggagactggacaagggatataggtgatatctgttatatgtcatctatagctgagtcctgtgtaggaacctggatgcatgtgctctgtgtgttctcgtgcatgcgtgtcccttctgtaattttctctgagacaacagaccatccggccatttttctcgtgccttggtctggtgtagaggcacacctgtacattagctctgtccccaagggactttctgtagtgatgaaaatgcttgcataaggatcttcccacacatactgcatggctattggaattgagagactggtttctcttccttattatacttgatgcaagtttaaatgacacaaagggttaccagttataattttggatacctcaggtccagtcagaaacataaacaaaaaccagtgttagctgaaaacactaagatggagaacagactcttatgggagagttgtctcccttttgtagtagggtgttcgagatatgggggctgcaggagcccagaggaggctctcacttaacattgcatttaggggctggtgaggtggctcagcaggttgagtacttgtcctgcaagcctggtaacatgagttcaatcccctgaacccacataagatggaaggcgagaaccaactttacaaggtggtcatcttccctctacaattccttctgtggcacaaatatgctcccccacagtaacaatagatgattggtttcttctggaaagaagattggattcagccaggatcccaataaagggggaggtattaggatatgatgtggaggtatctctcaggtgtgaagtcctcaagttggtcgtttgagagaaggaactcaggctgagagaatatggttagatgttctcaactttcaaagacttcgtcagagaatggaagttccattctagataactctggctggcctgttgtcacttttaggaggacctggacagacggtacaacatggaaaaagagaagctgtacaagatccggttactacaggtgagtatccacaaggaccagggccgaatagatatgcctggctggtatgcatgtcctgtgactgatggagttataggtgtataagagctagcgtggccaggacctgctcactgctcccattgcaaccagacatgctatgatgtaaggagttgctggcagcaacacaagtgtctgttactttcagcattgctagttggagttgaactttaccctgcattcagagtaagtatgattggcatcacaattacaggagttctgcatgttccaagttctgttcccagaactcatgtcagttgcctcacggcccctgtacctctcatctgcagggcatgtgacaccatcttctgaactccacgggtacccacgcccaggcacacatgccctcacacaaacacatacaaatacagatcattaaaaaggtaaatacattttggtggaagcttaagagatggctcagcagttaggagcactggctgctcctccacgtgacccaggttcgattctcagcacccacgtggcagctcacaactatcagtcccagttctggggggtccagcaccctcttccgccttccaggggcactaggcacccacaggcatacatatacatgcaagcaaaacccccatacagcataaagtgataaaaaacaactttcagtaggttgtttctccaaaggcaagcctcaggtaggtcccagaagcaggattgaagttcaggtctacttactaactagagagttgagagcatagcttcacaaacggggtggggagatggtgaagccagctccaaacctaagcacagtcagtacttcgtttctgagtccgttttgtattgccagtgcctggctcatggagattcaaacccacaaatgacccttggccttgtattacatgtcggtttgggtcactttcttttcttttgtctgtgttcctgggaagctaagctttggtaggaatggccaaagggctccatgggcctatgagaggttattatcatctttctggctcttaattattttgtgagatatccatatcatattcaaatgagtcagatatgtccttgatataagagcactattcttacttttagtgtttcaagtgttatagctcaagctggcctcaaactgtatgtgtagcttgggctggccttgaacttctgataaacctgcctccctctcccaagtgctgggattatagatatgcaccaccatgcatgactacctttcaaatatttaaagatggcttctcagccttcagcaaaaccaagtgcaaatatttaaaggtacatagaattaatacaatctgggccctactgctgtttggagaccctgactgataatgtatcaggtcccagtaacaggaactggaagacttgccctctgggacctggttatttgaggaccaagatctgcacatatatgccaaactacaaggctgtttgtgtggggaatgcactactagggagaggctgagaccaaactagaagatacaaggaaaccaatggcttgctgagggcctggcctgggagaggcagcaggatctgtgagtggagggggcaggggaaagtgagggctgcatctcatggaatttggtgatgctggatgagaggaagagggagatcaaggttatgtggaggtcactgggaaacgggcggggacatgaatggcagtctgaagaaagtgtaagtaaaagctctgctggtctggactgggttctctggaagacagctcagcagtttaaaaagcatttgccttgcaagtgtgcggaccagagatcgcatcccttgaagccccataaattccaagtgcacctagtggcccacctggaattctaccctcagggagacaagaaggtctccagagcaagctggctagcaagagctccaggtgtgactgagagacagacccggcctcagtggatacggtggaagaatgacatagggtgatgcctgccatcaactttaggctgtcatgtgtacatgtgtatgtgtacacaaggccccccccacacacatacacacacatatgaacaccacgttgcacacatgaaaacttgagggggcagtaaccattaggtagcattgtgggaagaatgattggtgtcagctccaactcaaaagagtttgggctggaaaacagtctgtagtggggatggtaactaaggctgtgggcatgtgggcaagaccccaaactaaaccctagtgagcaatcaagcaagaacgagagagagagggtgatgggagaggcgctcaggctgctcacaggtgagcggacagcttgggttgccgtcaaacatcagtatgatagattttgctttattgtatttattgttgtcaggattggctttatctcttagaagcccgtttttttctaaggagagagagaaagggtgggtccagaggggagggggaataatcagtcgggatggattatttaagaaaataatctgagtccaatgtggcaagtggctgagaactgaaggatctagaaactcagattcctccattcacccatgccccagaaagcttccagagtgagacttttcctgtcaagacatgagaagcatactccagtgactgcagttagggaactcacggcgatcaaagtccttggtgaagcagtgagttcttactgcagttatttctgaccctacctttggtgaggactgacttacacagagcaggggtaactcaccaaaaagccctctgtaacacaagtgacaactcatgaaagtgcaaccctgaagcccctgtaccatttgcaggccgctagacaggtggcagtctccttgaagtggttgctaggcagcatcatggctggtcagtggcctctcccagcagttgtttgctgcttccttggggagggacccagtgagccttgtaaatttcccagatcatggtttgttttcttcctgagtctcctgagccctgggccacagtctaccccaattcttcctggcaggagtcttctaactgggagggaactgggatacagcatttgtcaagcagagagaggctgaggcttgaaggacggaggcactaagcaggcctggctgtcagggcaggaggctggaggctgaatggtggggagacagctcagcaaagacttgagcaaatgtaagtgctgatgaacagcgaatgttcacacgttgtccacaggcaccctcacacatgcaggacattctagaaacaaagacacagtcacaaagtatagcatgagtgctggtgtgagacagcccccagggtaaagatgtgtgctgtgcagggcacaggaccaggttcactttctctgcccattaaagaattagaaagcaggagagcaaggtcactagaaggctcggggagtccagcagagccatcgtgtgatgctagggaaaatggagttttctcgtggggtacttggcttcattaataaaagaaattatgaacagactcaaacagaagctcaaggacaatttattaattagagtttaaaaggcaaaccccaaggcaggcgggctgtgaatcagagttgcccaggaggagagtgaagataaacgtggaggcacacagtagggagggagctcagaaaatgagcgaaaggccaagggcattcgtttgcgattttaaaagtgtagtcaggctcttgccagcattacaaaggaaaggacaaagaaaagaaaaccaaccgagtagttaacactcttctgagccttgactcaggaaggcaggcagtcccctggcctggtccctgtcctgtcttgctggactaacccttaagggagcagacaagggcatgtctccacctagaggtggattccgtcctttacagccaagcttgattcctggacccacatggtgggaggggagaacgcccacaaattgtcctctgagttctaccacccattgtggcatatgccaggaagtaagcaagcaagcaagcacatgcagctttacacactttaaacatcagatggttgtaccttaagattcccatgaagaaactcgaggtcagccccgccactcagaaggagagagatgagagagaggctgctgagagagaagcaagaccccggactggtagggcacagacaggaagaacgaaggctcaagaaaatggcagtgctcagcccaggtcctgagatctgcatatagccgtggtgtggaagctaagtggtgtggtcctcatgaaacatcctgctgcctcctaaatacctgacaggacagtctggtccctttgaaaggctttgagaaactagtaggcttctaagtagaggaattcagaatacattttggataggcagcaggatggcacctgtcatctgggactccttacactgcctgtcctctggtcagtcacgattccatgtgaggacctcaggccagtacaggaatgtgtgtctttgtggctggctcagctgtgaggagcagacaaatatagcctttgaccaagtgttctctcctgtccctttgcatttaggcacgaagaaatcgagaaatagcaattttgcatcgcaagattgacgaagtgcccagtcgagcagagctgatacagtatcagaagcgatttattgaactctaccgtcagagtaggtgcattgatcaaacacacagactcttgggctttgtgagggatgggagggaaggggcttcgtgcagtttagcgcaatgtagcattggtcagagcgcagtccacaagggccacattgaaaaggaccttacgggggctggcaagatggctcagcagttaagagcactgactgctcttccagaggtcctgagttcaaatcccagcaaccacatggtggctcacagccatctgtaacgaaatctaatgccctcttctggagtatctgaggacagctacagtgtacttacataattaaatgaataaatctttaaaaaagaaaaaaagaaaaggaccttacttcatctctgggcttgctgaacagccctgggagatgactcgtggtctctgtttgctctgtagatggactcgggaccttgagagccagcactggccagctctcatggtggttagccgcgtgcagtcacctgagccccctcttctttccagcttcttgtgaagcatccccaccccagcatctcctggtggcccgtggtcgtgctccacagagtctcactagcgttgctttagagcatcgtgttctctccataatccaggacctgcctcacctcagcctactgcacagtcactgcagcatatcaggctcaaagcttaaaaaatattaatattctgtatatattaattaatgctggaaattaatacagtggcagttattctgagaccttttaatatttcttagctaggcagactctcgcttagctcatttaagttaacctgaccacctagccccatccagtcacatgactagctatacctttcagacccgtcggcacatgtgactttcttcttcacagagttcctttccccctcccaagaagtcccaccttcctctctctcttctgcccagtcacaggctttagccttttattggccaattaacttagggagcaaggtttacacaacaaaagctggtatacatgagaatttggtcatcttgggggcagccatatcttggggtacagaccaaccccaacagaaagccactctcagggtcaaggaagatggtccctctaattaaagtgctgcttgacaggattgaggccctgaatttgatctcaagcacaagaaacatattgttgttgtttgtttgtctatttttaaaggctggcaatatggctcagttgtttagtgtatatgtttgcagaggacccaggttaaattcctagcagccacatgacagctcacagatgcccataactccagttccaggagatccaacacccaccatgggtcccaggcacacatgttgtgcatatacattcatgctggcaaagcaaccatacatgttttttaataggccaggtgtaggtacacacactggagacagctagatccctgaggcgcactgaacacccagacgagcttagtaagtgagctctgggttcactgaaagagcttgtctcaaaagataaggtgaagagggattcagaaagatagccactgccgacctctgacctctgaatgcacatgtgcacacgtacaagcacacatgcacagagacacaggcttccgtgacgactaagtgtgcatatagccctgggcacatgccgcatggggttgcgatgctgtggttcactgatgctctgacatgatgctgatctctctgtattggcagtttccgcagtgcacaaggaaaccaagcagttcttcactttgtacaataccctggatgacaaaaaggtttacctggagaaggaggtaagagcctttgtctgcttatttctttcttttcgtattccatttaaaattttactgtggaggggaggcgttgtgcatatgtggaggtcagagcacagctagtgggacttggttctctccttacaccgtgtgagctccaggaacagaactcaggtcttcaggcttagcggcaagcacctttgtacttaagacttcacactggcctgaggaagagcctttatggaaagaagataacttagatgagccactgacagcatggtagctccagaagattcagatggacctagagcctgagacggagtgtctagtagaagtagagagtgactgccttcctgtgccaagcactggggactgtcactgcaaagcagtgggagctctctgcagtgaactaaagctggtgtttacccattctgtagtatcatgtgagaaacaccagcttgaggtgctgggaagatggctcagtacgtaaagtgcttgccttccagacacgagggcctgacttcaatggccagaacccacattaaaaaaacaaaacacaacaccaccaaaacctggcatggtactgtgcttgtaatgccaggactgggtgggcagagacagatagaccactggggaccgctgccctaaccccagcctagcctcctggatgagcttggatcagtgatagaccctgtcttaaagagcaaggtggacagcctcatgaggaatggcagctgaggttgtcttctggcttccacacgcaagtgcacattcaaacgcaaagtccagggatagtaactgcttacagatgagccaacaggtatatggagtacagccaggggacctgcagacagagcccttcccagcatgtctcacaaggtcagatggatgctctagctctgagggcaggggcagtttccatggaaacaggaccatgaagattgtgttttatcagaaactctcaggaccactcagcagctggccaagatggtgactcagtgtgggagtggagcagtggagaataggcactatcttctctgtctccaccctactggcccaccctggactgatagcctcaaaagagagtgatgtttgggaagaccaattgatccctgctggcagtttgtccaaaaagtcctgccactagagtcccctttaaaaagccatctttcctcattctcgttgtcatgcattctagggaaaaatgattttctttaagtagatgggtcgattctctgaggaaaactatgcagggaagaacatgctgttctttcctttgttctgtcgagtgtcactttgacctgctcgacaagatgtgtctccccttcagtggcatcgtcccagcccaaggcaaactctcccgcaaggatcagaatagtgcggggaccttttagctttctacttacatggttccttttcactcccccagattagcctgctgaactctattcacgagaacttctcacagtaagtactggctgccctcctccccggctgccctcctggtctggctgaggagtgactgggaatgtggtgtgcacacaaggtctggcactgggacatgagtcttactttccctatccactaagggtaaacatgccttagtggaaaggtctgcaaattgcagtgctacgggtaaagagcctgacttgctccgtcccagagccctcagaaggaaaatcaagtgtagtgtcatgactgtagtcccagagctgggggactggagacaggcggatccctagggttcagggtccagccaacctattctacttggtagcttccaggccattgagatagcctaggggagacttaaggccccagagagtggggaggtctgagggggagggggctgtcctctgggagatgggagaggaggtatgggatgaggaacagtcagagggcagaccaggagggggataaaagcaggactgtgaaaaaggattaaaggggggggggaaaggtaccttctaccttcctgaggaacaattctttaaggtctattttgtcaattaacattcatcctccacactggggatttagctcagaggtgagtgcttgtgtagactcatgaagccctgggctcagttccccagcactgcataaactgacttcttggtgtatgcatgggattccagcacttgggagggaagataggagaatcaagagttgtttaaggtcactttgactacaaaaattttttcaagtctagcctaggctacatgagattctaccataaaataaattgtataggaagaccatctgtataagtcagatagcaagggaaccaagcaatactagctctggagtgtgttcatggtaagctagccttacccaccttgctggcatcccaaggctcgctcccagaatagcatgcttccttttgctagcacaagcctctgctggcccctgacagctgactagaaacattttaaagccaagttcatgggctctagactttttacatctttttttttttttaaacacagtagggctaagccgttctccattgagcctgaagctgaattcaatctgcaagacccatggctcacacacatgcaaacacacacaggcagacagacagacagacagacacacacacacacacacacacacacacacacacacacacacacacacagtgtttgtaaaacaaaattctaaaggtttgaatttaccaaatgaagactcaggagccagacgccatggtgaaagcctgctagcccagagaggcagagaaagcacccagctgaccttcctcctcaactgatagaccagaaggaaaaaacctgttctccatccaactgcatgtccctcctttctacttcctgtgtgtctctctatccatcctcctgacttcctctcactctctatggtttgttttccctttatttactccctgtcagctgggtgcttgctccacctctccacctatggttgacttttttcagtctcatttacagtaaacagaaagctcttggattaacggtgtgtgataggactgagccacaccataacaagaaatagttctttccagtaaacaatctcggggttctcagtatgatcagatatgctgcaacggacatcacacacacacacacacacacacacacacacacacacacacacacacacactcacacacactctctctcacacacacactcactgggaggttcgggggtggcacctgcctttgtgtcctgttgcccctgtcagactggagggctgaattcctgataaccacagcagagttctgctctgtcagcccactctctgaatagttctccacctgtgagtgccaagctctgagccttctggcttccgtccctctgcgaaactgggtatgggtaggaaggtatagcaggcacaccaggaaatctaccccttctactgcccccagcaaagttccggattctcagctcagatctgggagtactcagaacatgtgctctaatcccaggcaatgtccccctgtcctcggagtcttaaaaaacaaaactaagttaatttcttttttttttttaactaagttaatttcttaagtggtacatgccatagtttgtggaaaatggcattcatattctttttattcacatttgatgttgaggaaatatagtttggttgaaagttacaaggaagaagctgagcgatcctcggaaggcagcactttgaagttgcctgtgtgcgtaccgtagcactgctgaaagagtacacacatgcctgtccagattagaggagcagcgtgttctcacctgcgtagttttcctcagaatccctttccgtctagtcagagatgttccttacgcagcccattgccacaggaacgcagagaacaggattcacattcggttatcaatcagatcagaggtttggaatcctgactgcttggtattcttggtggctccctcaacccactgtgccctgcaaaggtctagttgactgttgtgacacattctaggtacagggctgactccttggtgtcccccacccccttcctaactgaacaacgtgctggacctacctctgctgatttttctttcagagccatggcctcccctgctgcccgggaccagtttttaaggcagatggaacagatcgtcgaaggcattaaacaaagcaggatgaaggtcagcaggcttcctttacagcagtacagagagtgtggtgaggagtcctgggcagaggctcttcatccagagagcatcctgcattgccacaccagccatgagacctggtggggtaggcctccacattgctactggttatagctcccaggcaccgagcactcctctgcgtcagatactgtgctgctcccccatattaagtgagcggtactgcccctgccttacagataaagaactgttcctcccagcagccctcctctcttgtctagccacctctccctgggcatttatctcatgacatgtcacagggtgtggtgcttaggatcttgatgctggggagagaacctggcacttagtggccagccagcctaacctgcttagccagttctagaccagatagagaccgggtctcaaaaagacaaggtgaggaataacagccaagtttatcccctggccttacttacacacacgcacatagacacatgcacatatatacatgcaggctgaacctgctctatacatgagcattttctgccttcatctcctggctggctgaccctacatttagcttcagaaaataactgcacatagcacctggttctgtgagttgcccctcctttcagccctctgcatcacagagtccacatgcctttaccatctccaactccattctgttttcctcaacactgatgctgctgatcactctaatgcgcatttgttcactcttcagacacttggctggttagttggttggttggttgactggtttggtttggtactgatctccagggatgtgtcctgtgagaacaaagactttacttgttcactgctaaccttaggtctctgtaggtgttccattactctttaccaagtgtacagaggatccgagcttagtccctagagccctgagaaaatacttagtgtagtggtgctggtgcatgcttgtagtccctgtgctgaggactggaacatagaaacatccctggagcttgatggccagccagtctgggggtatttggcaagtttcaggccagtgagaacccttgtctctataacaggatgggccaactaggtggcttactgggtagaggcactgtaagacccccgaagctggacctcccgggatgagctggccagcaccccaatgactcgagagaaaaccacacctgatgcaaactgcaagaggttttattatcagctagctgaggacgaactccttccaccgtgcagggcaggggagttcgaccccaagcggtgacagtagggggcttttaacagcttgctgaggaattgggaggagttgggaggagtgttcttctctgcctgggtgtccttggtaaaattacaattatctggatgtaaggctcagaaacaaaaaggctttttgctagctatagagaacaaaaagcttctttctggctgtattcttagagatcagggaaaacaagcttgggggaatgtctaggggctttaccttctagggagaaacactctaagtcggggtctcacagcacatgacagaaggagaaaatcagctcccacaggtcttcctccagcttgtggctaccacagaaaatctcttaaagtcaacattttagtgtctgtgtataagatcagtatcctggaaacactctataacagtttagatagctatagatagcttacactatggcacagttaataaatgaaaggtagtaagctatgctattataaacacaatatatacaacagggctactcacacaattgacatcctgggctagatatccctttgccttatggccgtcctgaaccctttagggtggtgagcagcctctccttgccagtgacaccaacaactctccttctttggagttgtgacactccaaaccccttgcagatactcacaagtaccctctagagacaaagtggtccacagtcaagaatcctccccaaaatgcatgctgttcatctggcgttctgtaaatagcgaactgctgattagattatagagcctgcagatgatttcattcagaaaggaaacaggacaacccgaggaaatatgtttagaagaaaccgatacaaacgttaatcatggctgcctgttgtggccctgtcagaatgcctcttcctccaccaccatttcttcaaatgtttccaacagatggaaaagaagaagcaggagaacaagatgaggagggaccagttgaacgatcagtacttggagctcctggaaaagcagaggctctacttcaagactgtgaaagagttcaaagaggtgagcggatgtggtgtgggccgaaatcaaatgcatgttcagctcacctcaaggtgcccctaagcctggagctggggctgctgagatggctttgccaggaaggtcgtgctgtaaaatcgggagtacttgagtttgatcctcagaactaacaagaggaaaataaaaaataaaaaaacaacgggatggtgcccacttgagtcccagctctggggaggagggggaggctggaggacctctgggcttcttggccaacccacccagcctactacagcatgagcaagatggcttagcgagtaaaggtgctttctaccaagcttgatgactgggtccaatacccagtacccacatggtagaaagggagacccaagccccacaagttcccctctgacctctgtggcaggcatatatgtacacacaaagtagataaatagaaatacaattttaaaaagaagcaaggtagagcatgcctgaagaacagcagctaagcctgacttctgccctccataggcacacatgcatatgtgtgcatgagcatacacacacacacacacacacacacacacacacacacacacacacacgaacgaataaaaagagaatgtcccatgccaatggttttgttctgatttagttttgaagattatgctgtcttccaccttctctggctgctctgccctctgttttgtgatctaacatttggcagccatatgcatgcctacaggcatggcagcaagtctcctcttttcaaatgttctcccagctctgactgcctgtggcgtaaaccaggttggaaaacagacccggtctctgtcctcaaggagcttcactgtggtgaaggagacagatgagaagctaagaacaaatgaacagaagaggaaattaaaaaaaagatttaatagtttcaaacttatgtgtagggagacagagcttgtcagatgttgttgtcagagcaggctccacaggctgagccagtctctgctgtggggagagcaagaacacatcagggagcaaccaaggccccgaggcacggggagagcccagcgactgatgtggagtccatatgtaatacacacgtgtgtgtaagtgcgtgcccatgagtgtctttgcagagaccagaggaggatactggtgtctgctctgtcacccctcagctatattctcttgagacgagatcacactgggtttaggctgacagccagaaagtcccaccaacctttctgcctctgtctcgcagcatcagggttacaggcatatgcagaatcatgccaagctttctatgtgggtgatggggattcaaactcaggtccgcatacttgctcagcaggcacctttacccgctgagccacctcccctgcctcagctgtcttttggctagagacattaagatgctttgggaaaggcctggggctgttggaggtttgctaacagacgccgtgtgagctgtcaggtgaggagctctagagtttgccacgggaatgggattcagaaaggtaactggatctcaggacgctgggcaccattggcagggagtggggccagtgacattcctcaatgataaccctcaacaagcttagtcacggagctcaaatacccactattggagaaaggagtacccttcatagacacttctcattgcgccttcttaagactgagactgcttgtcatcttcgctcctagaacctctcaatgtgtcatctaaaactctgtctcaagtctcaaaaagagcaaaaaaaaaaaaacaaaacaaaccaaccacaacaaaaaagcagttaccaagactggggaaaggctgggccccttccgagacccccacatgagtaccagtgactaaccatctttgcgtctctcttactctgcttttctaggagggccgaaagaatgagctattactatctaagatcaaagccaaggcctcctgaaaactccatctccgtttctggatgtccctgatatttttttaatgacgtgtatagactacaggatcttgacatggttctgccggtgatggcagagagacccaggaaaattcatttcagttctctagacggatgttgtctttctcctacttgtttcatttcgtctctcctggctgcggctgatggactcagagccctacaaagaaccgtgggcagtgtggatgacactcagagccccataggcagtgcccactcactctgaccactcaacttccatttcttcagtgacactgcatttatgaaggtaccggatgtgtgcgggccctgagaataaagagcattatgttcagcaagtattgagcaactgctaagaaataagccctgaggtaaatgtagccgaacacggtccctgcccttatggtatctggcagaggcccagagaacaaccctcttggtcccctcccccaaagcttgtcccctgaaatgtttcaaatggctgctggatgagcagccagcccgttcacctaccattgtgccttttgttctggcttgtcacagtacgtaaggactctaggctgggttggggtgcagagcaattagcccagaggtgtaaagacagaagcaggcgaggttcaggttgactagagtccacccatttgtgttgtgaagactgataccaggtgcccatgatggcctttggaaacaggaacccctggtctggagccgtgcttctcaggcatctgctctggtgtggctgtaggtgtgtcctgtcctctggctacatgtggtcaagcctagctgtgagggtgctggaagcatatcccatgttcttgcactgtcagggtttcagtaaagataggatgtatagactgttgagtactatccggtcagacaaggggaaagacttcgggtgctgtgcatggaggaaaagatggtagtaacaggggcaggaagactccacggagtgaacagcacttgggccagagccaaaaggagtaggatgttagctgagatgggaaggagggcctctaataacccctaaatggttggctttagcctctggacatgagcagaccaaagcaatcacagagcactcccagacccccaggtatcggaaacctagcaactgggtcatgctaggtaaaccccagtgtgagatttgtgctcccttctgtataaacttagcatacacatgaacagcaggttgggaccattaagcagaagcaggtgggggcattgggcagtcacagaagaagtgcttctcaactttagtttcctaatgtatgattgagaggcatgaggcatgcatactgataggaaagaaggggtgctgggctcagtgggtagggtgcttgtctaggttccatccctagcatcacataaatagacatggtagcacacacttgtgatagaggcaggaggatcaggactttgagtgtatcctaggctagaatttcttttggtgtggttgtaggcatgatcaactacaggctgcctgtagccaaggatagctgtgaaggtggcccaacatgaaattgtaaagtaatttagaacacagattattttccatctcttctcttaaaactccattacactatgtactccataaactttgtaggtggcggggtcatgttgtaaaagcataacggtgatcactcctgatagagagagattgggttggtaactcttggtagagagaggttggtggctactttgtcccattccttaatccgcaaggcttaatagagatgatgagaggttcctgttcttctgtaccaggtacaaccgccctcctgaggagcaggcaagagatctaaacagaataaggtggttgacctatgcctctctgagtccagtgctctcgtcttgcctggcagattggtattacaggctgcaagtccatagctgggtaaggctgttgctgacactgttaccccagcgtctgtgcagcaacatctgacacagggaaagctaagccatcagaggagaggcttcgagctcagatctaccttgatttctctctcctacattcaaagtacgtgttacctaaagcagtaatgtcttactatctggttctggtaagcaacaatgagcagcggccgacctgtattgtttagagctttgtgggtagactgtgttattctttcaattaaacctgaggaccctacatttgtatcagacatcctaaatcagatagacaacactttcgtgagtaattccagcatgaagtgggctgctcagtctgacttattgttggctgaggagattccctgagatccctggtcagttcagaatccacctggaggctggtggaaggggagggcctctcagggtagtgtcttctgtacccagacatagctgtacccagacatagtatagcattgtatttggagcctactggcttttaccagaattgtaagatggtggggaaacatctgtaggtgagtctttttttttttggtgtgtttgtttgtttgtttgtttcagtgtgtactttaagagaagccagattcagagcagagagcttgttcacggggctggctcccagtgccatgcattcttaggaccagcctctaggtcaggagctacctcccctcccatatgcttttcatgaagttcctgaggatgctctggttgagaccaagctcagagcagctgtgagcaggctgagactgaggtgatggtggaaggcctgggaggatgtagggacgttctctacttctccgtgttcagtggttagtcggccagcaccacaggggcagtggcgagtaccatagaatatctgtcaacctgcatccagaggtactgtaatgaagcagagtccacgctgggcataagctcctgttagtctgatcttctggatcagggtctggtttgtagcacttgattcaagaacagtggagacgcaggcttgtggtggaaccaagccagcattggtctccaggaaaggctttccttctccagactgtttctgggggacccctgaggaccttgaacaaagcacggggcaggccttccaacagctctcttactacctcccaaggtgccagtcctatccttggcactttggcagactcctgtcttttctatcttgaatattgtagtcactacctgaaggggtatctgagagacacccagcctgacctgcaacccctatagtgcatcccttctccatggttctgtcttgcctgctcccaaggtgatggatggctagtttaaaggagctgggcatcctagcaataacttcctacaggaactttggcttgtgaaggttcaggcagttgaactgaattatgctctgagaattaccataaggaagtgttttatgatgtgttcattgccagggttggccactaagacaaagaccttaatacagagcagtataatgaagagcccagtaacatgggtggtattgtctgttgcagctgagcgtggctagaggaagagtcaatgccttctgagatgcatcttagagttttccatgctcttccttctagcagcaggtggcactgggccaaaatagtatgtaaaacataatggagggccagggagatgtcccagtcggtaaagcacgagaacctgagttaggatccccagcatcaaggccacacatagcagtgtgctcttgtattcccagcccgtgagaggaagaccaaaaggacccctggggctcactgaccagccaggccagctgagttagtaagcttcaattcagtgagaaaacctgtctcataaaattaggtggagagcaatgtaggtggcatctgagttgacctctgaccttcatatgcacaggcacatacatatacatgcacacacatccccatacacataaaggaacattcatatacaaaaaatatgcatgtttttcttctcagaataactatgtataagatcatgagcagggctctagtgcctcattggcagtgtgtttgacaccatggggagtcgcagcttctgtatcatcatcggcctgtatcaatttcccagatggccacgctcacccttcattgatactctcttcatgtgtctgtcctctccacgattttggatgatgtcatcacaatgatctcctggtcatatcacagtccactcgtcacattcctgttgtctgtcttaatgacacatgtcactgcttaagtttcctgatccatcacaaggtctacatctcttttctttggaatgtgtaagggcagcggatgcagggaccctacccacctcactgtggctcatcagacagtcagaacattccagttggttaagttggctccccaaactgttatctttgcatcctatagtagcaaaatatagatctaacctaacctatgctcaggtttaaacaggctgccagttctagtcagcagcactagagaagccctcttaagtccattagtcactaaccttgaaggatggaatggaaaaggagtttcccagaagtttccagactttaactacaaggtcaccttttggagatgtgtagtattgcggcagggaaggcacattaatgtcgaatagggtcattagtgtgttcttccttcagatgtggtggacggatcttagctgcgtgattgaagaaaatgggtgttgctgtagaacagcatgccatgcagtgaatggcagagctctaagcttacagccgccttggaggacaattgaatagcatcacgaatccaatgtaccgccttttcaaccagcagtgccacatataggaacttttcttatgtacagaaacttttattaaagtaacgtttgtaataacaaaaggttagaaactaccattaattcagaacagaggtgaaaaaatatcatggcccatatctacaatggggcattttgcagacacttaaaagaatagacctgctctgtgtattgccaaggaacgttcaagggatcttggagccacatggttaagtgggggaagaaaacatgcatgaacatgcatgaagtgctagtgtttggaatagagataaatacatgtaaatgtgtggatgcatatgtgtgtgcgcgcatatactcacacatatgcttgtgatacgtctgcttgcctgttcccagactgtctctgagaagtgacacagcagcctggcagcctcagttgccgcctagaagaaggtggaaatgacttttcaccgtttgccttttgtactctggaattttgtaccgtgtacatgcattatctactcaaataaatagtttttgaagtttaatttggtttcatttaagaataatcatgggagaaaattttacttccactggtctcttttctttctttttttactttgggggaggggggatggatccatggtagtgaatcagggtctcctgtcccaagctggcttcaaactctgcatagcaaggggtgagtttgaccttccccagtgctgggattatgggtgtgtgtcaccacacccagtttatacagaactagaatttaacccagggcttctgcatgataggcaaacagcctaacaattgaactacatccccagcacacacaccccttccatcaacctggttttcccccttttgggggaggggcttattttctttggagatggtgggtttttctgtgacagggtttatctgtgtagccctggaactcactctatagaccataccagctacaactcaaagatccacctgcctctgtctccggagtgccaggattaaaggcatatgccaccacacccagctaatctgttttcttaacaaactcaaagctctggagttagaagtgaagaataaaaaattactggcctcttgtgagaacataaactttttacctcggagcccaccccctcccatctggaaaacatttttgagataaaggcctcctagaacaacctcaaaatgaaccgggtacattgccaaatgataggacatgactccttagttacgtagattcctttggcagaactccctagtgatgtaaacttgtactttccctgcccagttctccccctttgagttttactatataagcctgtgaaaaattttggctgaccgtcgagactcctctaccctgtgcaaaggtgtatgagtttcgaccccagagctctggtctgtgtgctttcatgttgctgctttattaaatcttaccttctacattttttgtatggtctcagtgtcttcttgggtacgcggctgtcccgggacttgagtgtctgagtgagggtctcccttcgggggtctttcattaggtgtggtgggtattcttttattttgggggggggtctataagtagtttattgtcttcaagactacagtgtggattcctctcccagagaagggtcttacagaggcaggggactgtcacccaggtgcaggccgtctacttgtcattatcgtacatggctggattcttccttttggactgctcaaactccgggttgccccatatgtagatcaggtagaacactacaaacggcggtgccaagcgcagggtgctctctccagtgcagcgcagcacgttggagatgcctttgctgaaatagtttgggaaggcacgctgctcaaagggtgacaagctgtaggagatcacgtgccatatctggaagctggctcagcgctgtggtgagtattcttaaatgttaatttgaccacatctgaccggggcacacttgagagataaatcacttgaggtgggaagacccacttctaatctagatctttgaggtggggaaataagccctatccagatcttttgagatggaaaaacccatcattaatttgggcctcaccttctagagttgacatgtaagaaaaaagatctcttcccctccccctgctttttgttcccttgcctgcttgctctcactagcattaattccttcactggcattagaacctacctctgtgggactccattatatatactaaagatcagatgaaacatagagcctcatgggctgaacaactactggattcttgaactttccattcatagtcagccattgttggtttagctggaccatagcctgcagtttattctaatcccctttacataaacatacatacatacacacacacacacacacatatatgtgtgtgtatatatatatatacacatataaagagagagagagagagagagagagagatttattctgtaagtgttgttactctagaaagccctaactaatacaggcagctgggcctctgaagtcaacctttcatagtagcccagggcccgggacccaagcaaatgaagccagctgcctgtattagccactctgaagggttggcctcattggtggaagaacttcgagggaattggggaagctgattctgttctttcgtctatgtaatagggaaatgagctgaatctgctctagggttgtctgtacctcatgagaatcacattatagcctccctgctacagaagataggaacagtacctctaagcaattagcatcctctagcagctgtgcctatttcacctggaactttctgtgtgttgtctctcccaaccctcttccttgccagctcctcttgttagtttttattgtccaacttgacacttacatagagtcacctggaaaggggaagcttcagatagagaattgtctcagattggcctgaggctattgacctgggagggcctggccaactatgggtagcaccatccctaggccagtgtctctggtctgtatataaagctagctgaacataagccaaagaggaaccagtaagctatgttcctctgtggtttctgccctgacttccctcagaaaagcacgttaccaagtataagctgaattaccaagtgaaagccgaactctgcttcctccaactgcagtgcattcattatttttcttgaggctgtgattaaacatctgacaaaagcaactttgggaaggaagggttgattttgtctcacagctccaaggattacagtctattatggtgggaaggcaccataggaaagcagtaggaactttagaagtgtctgatcatactgaacccactgccaggaagcatagaaagagggaccctagcccatgggatgacgccatccatactcagtatgggtttccccacctcagttaaactaatctagaaactccctcagttaaattcctcttt

SEQ ID NO: 74 - DNA, 1959 bp, Mus musculus
ttctctgacctgctgtggtagtgtcagctcctgtgaaggaagtttccgctttgcaccccacccggatcacagttcggttgtagggcccgctctctccggctccacatcagcgcatctggatcatggggttacccaaggggccagagggccagggactcccggaggtggagacgagagaagacgaagaacagaatgtcaagctgactgaaatcctggagctcttggtcgcagctggctatttcagagcaagaattaaaggcttgtctcctttcgacaaggtagtaggaggaatgacgtggtgtatcaccacatgcagctttgatgtggacgtggatttgctctttcaagaaaactctacaatcggtcagaaaattgctctatcggaaaagattgtctccgtcctcccaaggatgaagtgtccccaccagctggagccccaccagatccagggcatggattttatccacatattccctgtcgtgcagtggctggtgaaacgagctatcgaaacaaaggaagagatgggagactacatccgctcctactccatctctcagttccagaagacctacagcctcccggaggatgatgacttcataaagagaaaagacaaggccgtcaagacggtcgttggcctctcggatgcttacaagccccggcgaaagtaccgacggcagcggggagcagaggagctgctggacgaagagtcccgagtccactccacacttctggaatatggcaggagatacggatttagtcgccagagcaaaacagagaaggctgaggacaagaaaacagcacttgctgcagggctgtcagctgcagagaaagtggatgctcacgaggaagatgagcttcaggcagccgaagagcagcgtattcagtcactgatgaccaagatgaccgccatggcaaacgaggagagccgtctcaccgcaagctccgtgggccagatcgtgggtctctgctctgaggagatcaagcagattgtgtctgagtacgcagggaagcagtctgagctgtccgctgaagaaagtccagagaagttaggaacctcccagctgcatcagcggaaagtcatttccttgaataagcagattctgcagaagagcaaacatctggaagagctgcaagcgaatcataccagcctcaaagccaagtacagcgacaggaagaagacactgacagagttgaaggatcatggtgagaaactagacaaagagcaggcagccctggagaaattagaagccaaagccgacccaagcatgctgcagaacctgagagcacttgtagccatgaatgaaagtctgaaaagccaggagcaggagtttaaggcacactgccgggaggagatggctcggctacaacaggaaattgagaccctgaaagctgagagagcaccaggtgagaagatcatctctggtggagagccgcagggtgccctgacctccaccatgactcacaatgaggacctggacagacggtacaacatggaaaaagagaagctgtacaagatccggttactacaggcacgaagaaatcgagaaatagcaattttgcatcgcaagattgacgaagtgcccagtcgagcagagctgatacagtatcagaagcgatttattgaactctaccgtcagatttccgcagtgcacaaggaaaccaagcagttcttcactttgtacaataccctggatgacaaaaaggtttacctggagaaggagattagcctgctgaactctattcacgagaacttctcacaagccatggcctcccctgctgcccgggaccagtttttaaggcagatggaacagatcgtcgaaggcattaaacaaagcaggatgaagatggaaaagaagaagcaggagaacaagatgaggagggaccagttgaacgatcagtacttggagctcctggaaaagcagaggctctacttcaagactgtgaaagagttcaaagagg

SEQ ID NO: 75 - protein, 620 aa, Mus musculus
  VARIANT (1)...(620): Xaa = Any Amino Acid
GPLSPAPHQRIWIMGLPKGPEGQGLPEVETREDEEQNVKLTEILLVAAGYFRARIKGLSPFDKVVGGMTWCITTCSFDVDVDLLFQENSTIGQKIALSEKIVSVLPRMKCPHQLEPHQIQGMDFIHIFPVVQWLVKRAIETKEEMGDYIRSYSISQFQKTYSLPEDDDFIKRKDKAVKTVVGLSDAYKPRRKYRRQRGAEELLDEESRVHSTLLEYGRRYGFSRQSKTEKAEDKKTAAGLSAAEKVDAHEEDELQAAEEQRIQSLMTKMTAMANEESRLTASSVGQIVGLCSEEIKQIVSEYAGKQSELSAEESPEKLGTSQLHQRKVISLNKQILQKSKHLEELQANHTSLKAKYSDRKKTLTELKDHGEKLDKEQAALEKLEAKADPSMLQNLRALVAMNESLKSQEQEFKAHCREEMARLQQEIETLKAERAPGEKIISGGEPQGALTSTMTHNEDLDRRYNMEKEKLYKIRLLQARRNREIAILHRKIDEVPSRAELIQYQKRFIELYRQISAVHKETKQFFTLYNTLDDKKVYLEKEISLLNSIHENFSQAMDAARDQFLRQMEQIVEGIKQSRMKMEKKKQENKMRRDQLNDQYLELLEKQRLYFKTVKEFKEX

SEQ ID NO: 76 - DNA, 118544 bp, Homo sapiens
cttaattaaaactctggttaaaggaataattattgtttcatagtggcctgtgatcctacttttgatcaagtgttttgaaagtttattttcgacaaacttcctaaaatcaaattataaaattaagtccttttgaccttgaaccagctgttggacagcccagagggcccctggaaatgcaaaagagagatattaaacagattaaacagcttatttgattccttaaattacatgagaaactttgtcaaataagaaatggaatttaaccttcttcgagttatatttgtatgtctttaaggaggttcataataaggatagaaagaaccctggcaagtacaggtttctgataactttaaggtttttttttttttttttaataccattggactgggtaagaatttctagaactctaatgagactgatgggtttgtgaaactgctaaccaagatcaaacagaacaaaaatttattacatgagactgaatgaactgacaagaaagaataatggggcttaatggcgttttaaaaagggagtatttctgattcttttaatgtttcattatcccgatttaagggaactttttttctttcttttttttttttttttttttgtgagacggagtctcgctctgtcgcccaggctggagtgcagtggcgctgtctcggctcactgcaagctccgcctcccgggttcacgccattctcctgcctcagcctcccgagtagctgggactacaggcgcccgccaccatacctggctgattttttgtacttctagtagagatggggtttcaccgtgttagccaggatggtctcgatctcctgacctcgcgatccacccgcctcggcctcccaaagtgctgggattacaggcgtcagccaccgcacccagcaagggaactttttttcttttaagctaactataacttatagcaatttgctaatgcatacttttgtaaacaaaaattgaaacatttgcttttgttccctacctgatccctccaaaactcaggaaataattcatgggtatccttatttttgtttatgatgatatggttatttgcataaattcaacaagaatctgttctctttaacatgatacaactgaaaacattgactatattatcaaagctttgactggaatgtcatatttgaaaacatgcatagagagtctggctttaagggcaaagtctgatgtctgcattggtttgacttcctagcatcgagaggttttaaaaagtccagtttaggccgggcgcggtggctcacgcctgtaatcccagcactttgggaggccgaggcgggcggatcacgaggtcaggagatcgagaccatcctggctaacacggtgaaacctcgtctctacaaaaaatgcaaaaaaaaaaaaaaaaaattagccaggcgtggtgacgggcgcctgtagtcccagctactaaggaggctgaggcaagagaatggcgtgaacccaggaggcggagcttgcagtgagccaagatcacgccactgccctccagcctggggtacagagcgagacttcatctcaaaaaaaaaaaaaaaaaaaaaaagtccagcctaagatttcttgtcaaaattatcatcaagcaaatttaaaaggagcctatatggttattcttgctgtacttatacaaataattaggccaagtttgagactaaacttattttagaaacaaattggtgttactgtgattatttttagtagaagtggggatgacaatagagagaaaaattaggtttcagaagaaaaccatagtacacttgttgttagatcatagccctgttcattgttttcaagtttttgttatttatttaggattggatcttaaattcctctagtttacttcaatatcttgctacaactctccaaacaagaacaaaaactgctaagctggacaatttgacataagtttcagggataaagtctcatgcctgatgtgtagatcacatggagagctcaccagaatgcccaatgccacaacccaaggagggaatcatgggaaccctggtttatagtcagtgggccagaagctgaggtcaaaatctgagtttgtaattggcatgtgaaatggggtcaggctcctgggactgagccctcacctatcctgagctctcaacccaactttacctggctgtctccaagtaagtaggatcagaataacaggacacctagctggtgtttgctgcagagttgcttggttggcatgtggagaaaaccccccacacatctggtgtcagaagtactctgtgattgtgagtagagagtagggaaacatgcttaggtttttcccatatatatatccacacaaatatatgtgtgaatcttagtataattcttttcatcttatttgatttcaggataatgaaagttgtattcttattgctatttattaacaggaagtctctgattaatccagaaaacagtattttttggtctctcttctaaagtaattttcattttctctcatttagttttcacatgaaagcttgatagaactataattccaaggatactgttatgtaaatgcaggctatttagaagtgaaattcctgagtcaattgtttcctttcatttctagacagtgtaaggatagtacttgagttggtgctattaaccccctccccaaaatgtgaatggtagtagggattctttgtgggcagtcctgccactggagacatttgaaactcaaattccatttctatagatcaaaggctaaatcacaccagtggtaaaactaatatgtttacaaaacaaattttgatttaaacaaaccaacaaaattccctttgatggctctcattgcacttaggtaaaatccaatcccctcctggtggtccccaaggtcctgatggggccagaccatccagttggcacctagttagtgctcctgctccaacccctcaggtgcaagctcctccctattcatggccccctctctgttggaaacctttatcccgctccaggtctaaccctctttcatctcaagtcttacatgttgtatccctggagaaactttcattaacttcccactcaaaactgttactcctgttcctctttttcatcccacttttcaactcattattaaaggcacttatttcaacatgcgtcatgtcatctgtgctgtgatgattggttgactgtgcatgctcatcccagagctctgttctctttcttttctgtatccagcatttttcagacagagggttgggcatgcttatggcatctgggggaacaattctttgtacagtttataaggttatgcatgataatgatgcttaacaaataacccccaaacctcattggtcacaaccaacactgatatctcactcgtgggcttggtactcggctgggcttggggctcaggtctgctctggtctctcactggtgtttcttgcttgagggcccaggtggagggaggtatggttgcctgagtatgcggtctcctggtgaatggcttgagcttaggagagtgagggaacacagaatggttcttgacacctcacccagaactggcacaatctcctatctgcttacatttctctggtcaaagaaatttttatgacctaaaatcaatgcaggaagtttgatgtctttaacaactgggtgctaaatgttggtaatgcctctgctgtggtgggaatgtttgggttaccccaaaatctatatgttgaaatcctgactcccacaaggtgatagtattagaagatgggaggtgattagggctctaccataatgaataggattgtgctcttataaaagaggccttacagaggctcctcacccttctaccgtgtaaggtgacaatgagaagctgtacatccataagaaatgggacctcgccagacattatatttggcggtgccttgaccttggacttcccagcctccagaagtgaggaaaataaaatttttgtagtttataagccactctatagtattttgttatagcagcctaaaaagactaagacaatctcccatgctctgtgaaaactccagactgctccttggtcctgaatctctaccctcacccacattgagagcccttctctgtacctggcacagaagaggcacagaatgaatatttggtgaaaaattaactttgccaaactgccgtccaagaactgttgtaaaaccttactgactagggaatgctactggcatttgtttagtgtcttttaagcattaattattttttccatgcaaaaagataccacattttaaccttttagaataaggctgagtttttttttttttttcagacatttagtgacaatttcttttagaaattctctattcaagtcttatgctcatttttctgttaaatgtttcttcctcatttggaagaattcttgtcacaggtaacaaatatttttccagtttgccttttaaatgttgtaataattttttgacaggcagacattgttaacatttatacagcctcatctctcactgtttttgttcatggcctgctgaagcacacattttcactatatcaaatggacagactataatgtacctaaccagtcccttattatgggctatttagatggtttataggttttttttctcatcagtaacattgtgatgaagatctgatataagccctgaaagtggaagtatcatatcaaagaaaatttttaagttcttaatatattttgtcaaattactattgaaatcttacttcctagtccctataactcagttcccccaaaccccaggactcacatcccagacaccccttcatcccaagacccacatcccagatcctcataccccaggccctgctgctgaagtccttactggtcagccttgtgctgaaacaaacaaggagaggactgagagcaggactggaagggtaatgggaaactgtccagaacacctcagatgctccttctgccagcaatgctttcccctgaggcccttctatggtgtccttttgggatttaggtctctctcaaatggcactgcaaagcctaatcctggccccttcatctaaaagtgactctgactctagctattctttattgcattacactggttttttttaattgttgttgttgtagttgtcattgcttgttttttggtttttgttttttttgttgttgttgttgttaattgtagagacaggtttttgccatgtttcccaggctggtcttgaactcctgggctcaagcaatctgcctgcctcagcctcccaaagtgctgggattacaggtgtgagccaccacacccaaactacactgtttttcccccctttaatagcacctatttctacctgatattatcttattaattacatgtttaatttctgtcagtaattatcttgtttggtgtgttgactgcagtatctgcagcatcaggaacagtttctggcacagagaaactcttctcaaattgactgcttattggaatcacctgtgaagctttgacaatcccattacctacccccgaccaaaagaaagaattgtttagttattaaatcactttaccaaaaaatgtaaatattattttctccaggagatagagaatgtagcagatattctcaaacatgtttatttactactgtgtagttggccccttgttgaatcctttttaatgtagctaatagagtgtggttgtacaaactatgaaagttattgaaattctttgataaaactatcatttttgggggaaaacgtattggaagaactcatccaagtgtgtgtgtgtacacgctgtgtttttctaaccttcagtccagaagtagaaggggtttaaatctgcttgcactgcctgtgcctccattatgttactgtagaaatgtgacatgctaaatataggatggtgcattataaaattgtaccgcttgagaatagaccagcatgccattaagaatttttaggaagaactcatttaacctaagagctctttgtttatggattttgaattttatatgccactgtgatctataaagaaacaaatccataatgaagtcactattcactactgtgttgtatataaaacaatatgttccaaggcaaaaaattcaatattcatgcctctccctagcccaattaaatcaggattgctaagggtggaatccaggtgattccaatgtgcagccaagtttgagagctactgacatagaagaaactcagcaatatttgttggatggatggatggatggatggatggttggatgggtgagcaaaagaacatggggaatgagaaatttggggctctggttctagcactccctctaatgtgctgtgtgacctcgctgtgtcactctactttactgaacacccattgttgcactacatgtagaaggaatgagagaagcctgaagacagaataattaaagctttatagaaaacttccggctgggagcggtggctcacgcctggaatcctagcactttggaaggccgaggtgggcggatcacgaggtcaggagatcgagaccatcctggctaacacggtgaaaccccgcctctagtagaaatacaaaaaattagccgggcgtggtggtgggcgcctgtagtcccagctactcgggaggctgaggcaggagaatggtgtgaacccgggaggcggagcttgcagtgagccgagatcgcaccactgcactccagcctgggtgacagagcgagactccgtctcaaaaaaaaaaaaaaagaaaaaaaagaaagaaaacttcctccagaacaaagctaagcctaacaggaagctctttactatgtgtattaggccattctcccattgctataaagaaatacctgagactgggtaatttataaagaagaggtttaattaactcacagttctacaggctttacagaaagcatggcgccggcatctgcttggcttctggggaggctttaggaagattacaatcatggtggaaggtgaaaggagagcaggcatgtcacatggtgaaagcaagagctagagaggataagtgccacacttttaaacagccagatctcgtgatgagtgactcagtgtcaggaagacagcaccaagaggatgttgctaaaccattcacgagaaatccaccccaacgagccaatcacctcccaccaggccccacctccaacactggctattacattttgacatgagatctgggtgggacaaatatccaaactatatcactatggtacctctttacccacgaactggaaagtatttgtgaggctccaaagaggaacatcacacaactctgtactcagtgtacagaagagagacagaatgactgatttctagtcctcagatatcacacttgggagacacaatttgtgagggtgtctggagtgaagggaaagggagagagatggattgatctgagagattcctcacaagcctccttgtctgcattggctgttaaaggtcttcttcaagactgtgaagggtttctgctctcaaatatgggctgcttaaactttctttttcttttttaagagacagtgtcttgctatattgcccaggcttaagtgcagtggctattcatggtcatgatcccactagtgatcagcacagaagttttaacctgctctgtttctgacctgggccagttcaccactccttaggcaaccttgctccctggaggtcactgtattgatgccaaacttagtgcagatctctgattggcatagcttactaaagcccagaactcctgggctcaagcgattttcctgcctcagcctcccgagttgctgggacataagcaggtgccacctagccctgttcaaactttcttgacgatattatggctgttttgctgagatttttttttttaagcatgccccatgcccctcaactctgttactgtcactctacacctgttgtaacataggacagtttctttttttttttttagacagagtttcactcttgttgcccaggctggagtgcagtggcacaatctcagctcaccgcaacctccgccttcccagttcaagtgattctcctgcctcagcctaccaagtagctgggattacaggcatgcgctgccacgcccggctaattttgtatttttagtagagacggcatttctccatgttggtcaggctggtctcgaactcccaatctcaggtgatccacccgcctcggcctctcaaagtgctgggattacagacatgagccactgcgctcgggaaggacagtttcttactgaggaagttagctactcatgcttatttaaaacattgcaaaagcattataacagggaactcagggtgtggcctgagtcctgttattctccaggctgctattatatacagctgtttaggcttgcctgctatgtgagatcttactacctgttcctaggcatcagtacctgtctggtcactcaacagtggccacaaattattatcactctccattccccatcaacctataccatttcagtgaatgacagttttaaaactacaaaaacaacacatttgggaagttatgagagtagaaattgaagtttattggcttcacaaaggataagagcaagatataccacacaggagggttcccatctcaataccttaacttgcatattcagattattcaaattattggggaccagggtttggggatcgtgcacagctttgagtaatatttgctagttatatttaagaacaaaatggcatccttagggcagttccaactatttgtgagctctggctccagacaaacctctgtctgtcaggatgaactccaggaggagtacaaaaggtgcaaaaataaaataaaataaaatagaaaactatacatatcatatatacacgtatatatatatacacacatatatatatacacgtatatatatatagtttttagacagggtcttgctctgtcacccaagcaggagtgcagtggtgttatcatagctcactgcaacctcaaccttcctggctcaagcaattctcccacctcagcctaccggctagctgggaccactggcaccgggctaattttcttattttttgtagagatggaggtctcactatgttgcccaggttggtctccaactcctaggttcaagtgatactcccgcctcgacccccaaagtgctgggattacaggcatgtgccaccgcgcctgcctactcttttaaagacgctagggatgcaaagaagagacgaaagcaaacacgaaacctttttgatctcaaggagctaaaggtctgagtctgacacttcccatcccacacacatatacagagggaaggatctcttctccagcaaaagttttcacgaaagtcatctctttcctcattgcttaaaagaaacaaaaagccaagaagccgttatggagcgggtgtgggggcctgtgaccttttgtctagttgccatcctccgggaccaacaaggggtacatcaaataagggacgcggcggctcaaatgacatgaacataggagtccgcattctctgagatgtcattcctccaggaagacccaggaaccgtgaatagggcggggtggtgggcaatatctgaagcgaggtttcctgggaacgcgatgccactggccaggacgctggagagggcagcgggcgtgaagaatcccttctcaaggggtccgttcctgggtcgtatatggagaagtctgtccaagcgtgtgtctgtaaggtctagagccgggcgtgcattcagaatcctcaagctcatctgtacttggactctgaccctgaagcgaggcggtttccgaagtctgattcaccgaggggacaggacctatttggggcatccgatggcagcgagaagagaagggagccgaaatgcaaaatattctcaagatgcaggaggaacccctctcaaggagcgccacggagaaaacttcagagtacgggcgcgatgatccagcacaacgccaggacctgcagcccagcccacctctccccgggctgctgtggcgcaggcgcagtggcgccgcgctccggccccagcgcgcatgctctgcccggctgcggcgcttcgggcaggcggcggcggcggcggcggcggcggcagagggagtttccgctttgcactccaccccggtagcagctccgcggcagggacagcttcctccggacgcttggcgggcttcgctctcgccttacgacagcccggtcggatcatggggttgcccagggggccggagggccagggtctcccggaggtaagaacgcctcctccttccctgacacgtcggggttcctgaagagagggccgagccgcggggcggcgggctgagcgggccctgggtgcgttaggggcgccccgcccccttcctcaggcgtatccacctcagggaagcgccgaccctcttcttggaggcggggagcaggtacccctgcatgggcagggggcggcgggcgggtgaggacaaacttaagccgctcccgggtctcttggggcgcaggtggccttcctagcccgacacctgctctgacgcagccccacgcgccgcggggtcctgggctcccacctttctccctgtccgggacgggctcccccaccccgcgccgcagggctagccccgagggccgaggctgctgggcgctggagtcacgagaccgctctccgaggcggttcgggctcgggtggtgaccttgggacgtctaccgccaccccgcagagtcccggcggcccgccccacccgccttgctgtcgggagggaatgccaccctccttgcgtggacccgggccggggcggcgggaggaagtttgggagacttgcgcgcaccagggaggtgtcccgctgggtcagcgcgccggggcgttcggggtgggacgcactccaggggtgctgtgtggcgggggacccggctctgggcggaaaggctgcggcttctccagaagagggcggggttcttttccaaaggtgtttgttaagtactcacttagtgctagggagagggtcatgagtggtttgcggatttccacgtttgctgggaatacagggaaagtgtattcattttcttttggctgcaaataccacttagcatctcataggtagtttgcatctgtcgtccctttcagttgattttactcaaaggctagtctagtttactggattctggagagaaatggaagccacgccgcacctctgcctttttcctaaggttctggagcaggcattgggcagggtgactgcttgcttgacgtggtgagtcgtcccttcacacttacctgccagtgaccaatgttactcctctgcactcctcccaaatcctcagttctttcatatcacaagtatccactaattgagggatcactgtgttctgtgtccagaagctgggaatatatatagtctgaaaggacagatttgtttgtcagtgtgtgctccccgaatgcaagtccattttgttgtcttaagaaaacctgacaagcataatgttgtcagaacccctgtattaggtaaaatcttacatgcacgttgcctgggatgggacccaggatagtgaacaataggatttgtactgtgacatttgaagttttcttttttgccacttctgtattctaggctctcatcaagtttttgcctggccttttgctgtagacttctgtctggtctcccacgttctactttaaatccgtccaacccaatattccacagtactatcagtggaggtctttctggggggaaaataaataaattaattaatgaagagcaacctgctgctgtatgtccttcgtttaaactttcactgactgctaagaggccacactcaccaggtcaagcaataacttatcatcatttagttcagaagctagtaaatataaatatggatagtctgtgttattaggatgtcactagaccagttaattcattaaattcattctttttttttttttgagacagagtctcactctgtcaccgaggctggagtgcaatggcgtgagctcggttcattgcaacctctgcctcccaggttcaagcaattcttatgcctcaggcttcccagtagctgggattgcagatgtgagccactgccctgcccgaattcattctttttaaccctttacaaagatagctagacttggcctgccttccagcttacaacaactatagtggacggaaattgaaagtttattgggctttgtgtaagagctcattgttgtttgtctttgtcagaaatttagcttcaacaactggatgtattaaccagcctggtggatttttattgcttcaagagagggtctttcattcccagcagatcagacagtggcccttttccatttgatttcagtgttaatctgctaagtgaatttggagtcatacattcccatttagtgtcttgtgccaaaattacttcacaagttatattgcaaaagtaaacttctccatgctaggggtgagtggatggaagcctgggccctgcatctgtggtggggtggccagtgggtgtccattagataggtgttgaggcagtgatgatcctatttttttttgtttttttttgtcttcttctcatgttttcataataaatgattgaacaaatgaagtgttcctgttttacaccccagaagttttaagaaagtacttatattatctcattttctttttctgctgacttgaactacaactactctttagcttctcttttcttagagtgttttcacttgtagatgtttctcaaccatcccagattttttgcagaagggagagaaggtgtgaattatttatattacttaagaaaatttttatgtccactaggaactagtgaatgctgatcttcaggatccttaatggactggaccagggtcatttcagagacggatgtagctcagtgctgtcacctcccccacgccactcctactctattgcaggggattatcagtcactttaataattctgtattaactatattttaatatgtatactccctttcctggcagtttatacatcaaaataaacttctttccattgtcagggatgtgatcactgaaacattttattaatacatgactggtttaggttcacttactttatgtaagcattagtagatcattctttatttaataagtgtgtccttggagcttaatgttgtttggattcagaggagtaaacccaagtatataatatatagtcctctccttaatcaatcagtagtccagttgcaaagacaagcatgtatataacactagatatctcactttgaagaggttgatacttagttatatgtacagtatatagttgatacttagttatatgtacagaaatgctgaggagagtggccatttcaggatagacttgtgagggatggtgttgcatgggagctggaatttgaaagtgatttctcagtggttagagaatatagccatggccttgtcttgattgtttttggggtagttaaaggatgaacctgaaaagatagtttggtggccaaagatctgaatgtgaaaccagacatctggagtttatcttacaggcagtgtgtgtggtgcattgttgataagggctgggagggtgagctaaagagggataacatgaaagctgtgatttaggaagggatgagcaaaacaaattaaaggaagaaagatgaagaagcatttgcaagagtcctggaatgaagtatgaatgaaagggaagggaagataaatgtgagatgcatagtaaaggaagacttaacaggcattgttgggtaagggaggactcagagatgattatgagcatgtgaaccaggatatcttattggtgttttatatagagagatggttttttatttttggtagcaaaggaagagaggaaaggtagttcatgatagtaaatagatgaaagagtattagaatatttagatggatttaagtattagataaagattggggtaaaaggaggatataaattaaaaattttaaatcaaaatgctgagatacggccaggcgcgatggctcatgcctgtaatcccagcactttgggaggctgaggcgggtggatcatgaggtcaggagatcgaaactatcctggctaacacggtgaaaccccatctctactaaaaatacaaaaacaaacaaacaaacaaaaaaacgggcgtggtggcatgtgcctgtagtcccagcaactcgggaagctgaggcaggagaatcgcttgaacctaggaggtggaggttctctctgggatccgagtacagtgagccgagattgcgccaccgtgctccagccagggtgacagagcgagactctgtctcaaaaacaaaaacaaaagcaacaaaaaaacaaaaaaaaagcaaaatactgatatacatatattagatgaatttattatttttaaggcaatcctattatgtggcaataatcaccctttaatgtatctgggttggaagcctttcatatatttgttttcgagatcgaaaagggaagtacagtgagggatgcacttttgaattcccttcttcatttctatgcctgttgtcagtaacttctggatgagtataactttttttgtttgtttgttttttagagatagagtcttgctctgttaccaaggctggagtgcaatggcacagtctcacctcactgcaacccccgcctcctgggttcaagtgattctcgtgcctcagcctcccacgtagctggagttacaggtgtgcaccaccatgctcagctaattttttgtatttttagtagaggtggggttttgccatgttggccaggctggtctcaaactcctgacctcaagtgatcggcacccccacttggcctcctaaatcggtgggattagaagcctgagccactgtgcctggccaagtataaagtttttgagacagagtcttgctctgtcgtccaggctggagtacggtggtacgatcttggctcactgcaacttctgtctcctgggttcaagcgattcttgtgcctcagtctcctgagtatctgggattgcaagcatgggccaccaaacctggctaagttttgtatttttagttgagatagcgtttcaccatgttggccaggctggtcttgaactcctgacctcaagtgatccgcccgcctcagcctcccaaagtgctgggattacaggtgtgagcccccacgccggccctaagtcctaagtgtaaagttttttttagaaaacaccataaaaccttgttcctgtttgtaaggagtcataatccatttgagaagactgtcaaagtaaaccatgggttagagaaaaaggaagtattgtgctctaaccttccttttccctggattccttcagcatgtgatgagtagtatatactacttgggcatgtgtctccctcagctatgaagattaacagcccgttgaggaccgcggacccatttgtgactccaacaacactgtccacatacttctgtgtgacacttgctgaattttcagagaatctattgtggtgatgtagccaatgtcatctactccttggcaatgagcttgtggcatcaggggatatacctggtgttcctttattcagcatatcttttaccagccaaagttttaccttttattttaggtggaaacaagagaagatgaagaacaaaatgtcaagttgactgaaattctggagctcttggttgcagctgggtatttcagggcaagaattaaaggcttatcaccctttgacaaggtaaggggaaatctttctaaccattacactatcttttgtcagaatgacatggttaatcatggcaaagaaaggaggaaaagatgatgttttaacttcctccatgtctgtgtttccatttcttcctaattcagattcattatggaagtgttcaaacttcttttcaaagacagaaatgatgtatcagtgaatacgtcagttccttttctgtgcacaaagctttaggaaatgcaaagaagcaaaataaatagttccttctttcaaggaatttacagtttgggtggggattataaaacttatggaaaataaaataatcagagttaataatgagctatcccaagtcagcgtgctcacagacggttgccagatattctgcggatagtaaatgctctgatttaggatgagagagagatcgctatgcaatgaaatcttttaattcagcagaaccttgaatgatgatgcacaaatcatagtaataggtgttgaggacacagagaaaaaacagaggcacagttctcaaagagcccaatttctgtagagtggggatgagagacaagtgaatcaacatgcacagaataaatggcatgatgcagaaagtgccaccgtggactgtgcacagaaaggacgcattcaaatcagacagggcaggctgtggaagacagtgctgagtgctccacggggtcacagtcctggctgtgcctaacagaattactctgggttattttataatacagaacccaggattcactcattgaaattttggttagctaggtctgggcttgggccctggaatctgcatttttattgggcaactcgtaagagtctaaagcagccaggggtaagatttactgtttttgttgttgttgtttgtttgtttgtttgagatggagtctctctgctgcccaggctggagtgcaatggctcaatcttggctcactgcaacctctgcctccgggatgcaagtgattctcctgcctcagcctcccgagtagctgggattacaggtgcctgccaccatgcccgactaatttttgcatttttagtagagaggggtttcactgcgttggccaggctggtctcaaactcctgacctcgtgatccacccgcctcggcctcccaaagtgctgggattacaggcgtgagccaccgcgcccagccttactgttatttttttctaatatcaagctgtgtctgaaaaggattttgtttcaaaatgggtttttagtcttactctcatttgcatctcagagaattcctgagggaaaagtagagccagggattctcaggtagataagaaaaataagatgtatggaaacaaaatgtcagccttgctgcccatgtgtctggtctataaaacacagaattaatgtctgtccttttgactataaagaggatctatgtacagtatgttcatttaataataaaagtcagctcctcagtcatgccagccacatttcaactgctcagcagccacatgtggctagtagctactgtacttgtccttgcagataacggaatatttctgtcactgcagaaagttttctgtaacggtgccattttagattaattgtacttgatggggtaaggaggacacactctctctctctcaagatatataattttgtatgtttactgagtctattagagctatttataatccatctaccttccacttcttccattctccccaaactaaaaagagaaaacaaatattttctttatgtcttgcaggtagtaggaggaatgacttggtgtatcaccacttgcaactttgatgtagatgttgatttgctctttcaagaaaactctacgataggtcaaaaaatgtaagtttttctatggaaaacctaaaggtggggagaagggaactaacttttgagtgtctactgtgtgccagaagttggttggacactttacatagtttattttaacttttattacaagaggtattatccctgccttacaaatgaaactgagactgaaagaagccaaggtcacacagctagatcaaagtttgtagtgactacttagtttatctttcaaagacagctcatatcagtggaagttgattagaaagaggaaaggagatgctttccttccccattgcctctgtgtaaggcagagtctcactttgcctgtcttcgagagaaagcagcatggtctccttgctagagatctcacctgagcataccctgcccagtcttttgtagcacagcagctcaccaggggcttggccatttcattagaccatttgggatacctggttcttctcccagccttccagtgggtctctgtgtggccttggaacagccactccttctgtgggcctcagttcttttatccgtcagaagagagattcctgacctcagatatgtgtgattctgtgacagtctgtttattcatttttctgaagtattaccttctcccaagagaaaacacttccaaaaggaacaaaggggtcttataaataacaggaagcaataatggtgggaaaatggagcaaagggggaaaaaaaagtggggacaaaaggcagagttggggtaagactgccacagtgatgggtcacaaaatgctttgttttcctactgttggccaaagatttgcccctgtgtttctggcagccaagtggaggtggtatctgtgagtaactgagcatcaggaatgttgcaatttactttatatttatacagcattttccctgtaagtttctaattgcctttgtttttttcttgttgacaaaagaagcatatgcctttagctgtagctcagatcagccagcttttttttttttttttgagacagagtctcactcttatcacccatgctggagtgcagtggtgccaacaccactcactgcagcctcgacttccttaagtgatcctcttacctcagcctcctgtgtagctagagccacaggcatacaccaccacgcccagctaatttttaaattttttgtagggatggtgtctcaccatcttgtccaggctggtcttaaaactcctgggctcaggcaatcctctcgccttggcctcctgggattagaggtgtgagccaccgcacctggcctatgcttcttaatcaggctgttcattagcatgaattctttgtcttcttgaggatgcttttcttggaagcttctgtctttgagctgattgcttcctatacctgtggcacccttgatgtgctggtatttcttttcattgcattttttctgtgctagttttaccatttcttggatcccacgtgtgcttttttcctaaattccccttgagttttccagtggtcgttaggccctgttttcatttcgatatccttagggaatatggtagactcccatcagtggcagcattccattatacttttaatagatatgggaacacagtatttttctatgtcttctcaattccttgtctatatttctgaaatctaaaagacactgaaaactgttttttcttcttttaggtttagatacaaagcttatttgggagcaaaacataacctgaattgactgaatttatagctttattgatcccacttatgtgactatttataagttttgctaaataaatttttttttattatagagtgtgactctagattttcctgggttcttacataatatataatatgtatcccttaggtattctaaggaactaaatctaaaaaattcagaattctgaaacacatctgacccaaagggtttggataagggattgaggatgtgttatattccctggtaagtgcttgatgtgtgtctcttaagtgcagagccatgaactgtaactgtgggcaaagctggagacgggtttacgtgactaaggacccaccagagtcagcagtgcatcaggtagctcattctttattatctgtagaagacatgttacagccacagggtactgagtcatctaaaaatcttttctgtttggttttggaatgtgttctgtttggtgttcccccccaccatagagtttctggttaggtgcagtttagactaaaactgccttatgtttgccgtcttccagtatatctagtcaatttaatgggtgggctggacgtatgtccaaggagcacacttgcctattgacggcatggttgtctctcaagctgtcttctttatgtgcccaattgaggccttgttctctgtcatctttctttgctgagagttccataagcttctatcctctacttctatcttcttctgaagccccattaacagagggtcctatggccagaggcccataaatgggattttacatttataactgagttcatttcaacaacaaacattttattgggcatctgtgttccaagcacttgcatgtgtattttattattttaccttcactaccgctttgagtagggattatccctagttttatgataggagtattggacctggaccaagttacttgccaaaagtttcagagttgtggtggaacttgaatttagacccaggtttaattcactgtctttcaagctgtttgcagtggagaagaaagcagtgcactgaacactcttaaaaactaaaggagtcaaactagtcacagctgggcatgttaaaatcttagtctaggaaaccggcctggtgacctctgcaattgttaatttctgtgatttttaggaaatctgaaggatccacctagagccgcaggtagaagctgaaaggggattgttagatttctggaagaagtctttctcactttctttccctacccccagcctgcctgcattttcctccatgtcctcaccttggctgccaagactgtccagacttggcagtaatttctgagaggtgggtttaagagggttgtaaatcctaggatgacccgtgatagccttctctctggacctttatgaactgggtgagtaggctggctccgaagagtggccaggaaatgccatgtctgaaggcagggggttaggctggatggtggtgtgggtcccagcctcttgtttttaagctattatgtatggttctaggcaattggtaactctatgcaaaccaatatatctgtagccacaagagggagctctcctcctgctgaaccaaaatgtaactaaggaaaggctgtattgatcacgtgcccctgcatagttagttgggacctgcattgagcaaaaccagaactgatattcattttcatttgctaagcttggagtttaggcagcagtaccagttgaacactcatctcttcttacaagtttcaaggaaattaaataagctatgagagtctgatggagatcaaaattttaaaaaaagcttaacagagaaccttagatatgttgccaaatgggtttgttagtgcttcactaccaagctatcccatgtgagtcccaagcagacctggacaaccactggcttcccctgtggggcaggcaacatatcttatggcagaaaagatgcatgtgtcccaaagacaggctgcccagaaaggaagggcaccaggagtggctgagagctgcatgaaaattttcttcttcctctcaggacttttgttttgttttgttttaagagacagagttccactcttgcctggtctagggtgctgtggcgtgatcttagctctctgcagcctcaaacgcctaggcttaagtgatcttcctgccttagtcttttgagtagctgggactgtaggaatgcaccattatgcctggctaatttttaaatttttttatgcagacaaggtcttactatgttgcccaggctggtctcaaactcctggcctcaagtgacctccctccttggccttccaaagcactaggattacatgcatgagctaccatgcctggcccctctcaggacttgtggataaatcactcttcaccccttcctctgttagggaggaagggtgagggggaagaggcagcaaatattctcctatatgcttccctcctaggaggaagatactccctctcttctatgaatgtgtgcagtgagggattaatctccccccttccatatttttttctattaacacattggatctgacatttgatcttatgatcagtggggtattactgttgtcctcagcagttttaaccttggtcccaacttgtgaagctattttccagataccagacactgtttcttaatgtgttctctagtgcccattccctggggggctgttttaactttagttcctaggtcacctagttactgttaatactaagactgaggggtgaaacctactaagtgaatcatagataagacagtaataactctcacccagccctgagtcagatgttcatcttgagggtatctgtctccttggaaggattattgaactgcagaaagataaaggtggacaagacttctctgaacaagaaacacttttgggagacccaaaacttgttgaatttgaagcacctagtaagttctaagtgacccttgtttacctggacctttgtctattagaacatagtactgtatttgtttataaggccacagtagctgctgtgactggctaagattttttttaaagggtcttgtgtggcaatgtaacctattcatgtaggctgagccagaagctcctatttctccagatgtccacaaggccatgcctggtgactgcttctcaatgttcccaggctacataccatggctttggggtcaggcacaccactgaatagtatcttttctctccccttgagtctgatccaattaagatagtataagaaacaggaatcacatagctagagatgaaatgccaactgattcgagaaggaggtttcaggctgcaataaaacagacttgcatacaaatccctccaccagtgctgccataaactgtcctaccccagctcaggctgagctgagaaacctccctagcaggagaggatgctttcctcctgacctacagagaagaaaactctgaggcctcaggaagcctggttcctcccttctcagtcccaccttgtggtcttctataggaggaagactgaggcgaggtgttagagaaaggtcggtgtcccttataagaagcagaaaatatctcttctgtatggaaatgagagtgaggatatacagttccttcaactctagaatttattttagagtatcaaaaaattaaaggctactatttattttaaaaatatccttgtaccagagagtagagaactccaaatctcttttggaaatggggctccatgtttcatgttaatattctgggtacctggtgtaaggtctggtaattatttgttgcctgatatttagaatacttttttcaaactgttagaaagagtagatcagtaaaacgaaatgtaaaaagaatacggggcactaataactttttatcttactacataaggaagttaaaaaatagtaacgactacctctaatgttaccatcatttcacaaaatattttacatcaaaaaaagtaggaagaaaaacattatagaataaaggatgaaggcagttttgtgaccacacacctacacaccaccaaattgtgcttatttttctcattttgcagtcatctaggagaaacttgtcatggtctggactagcctggcatggagaagtcccagatccgtctgtgatgctgcccagactttagagatgccataaaggctacttagtatgcctcactctttgcttgttactttttctgaacagagctctgtcagaaaaaattgtctcggtcctgccaaggatgaaatgcccacaccagctggagccccaccagatccaggggatggattttattcacatatttcctgttgttcaggtgagagcctctgtgtggtttcttgtcctcttaacatcagaattcctgtgatgggcctggcttgtcctgtaatgggtccgtctgtcctggatcctgaatgtaatgggtgtggcttagatttggtacagcagaacatggtggtgttcgttgtcgtcatcttcagaagattgccagtcctgcatataccctagtttcatgctgtcacctgataagatctttgaatgttctcatctgacttttcattgcctttttggtaaaaacagaactctgtagcctggtatgctctgttcccttttgacctatccagcttgatttcattccttgcttttctttgttctttttgttctagcactctctggcattcattcagatttccccaggtttattcttccacctgtcacagtgcttttgcgttgctagttccttgggctggaatgctcttccattctctccttacctgtttaattcatatggcttacttcaacccttcagatctcagttccaccaaacctcttcaagaaagccttccctcatccgctaatccacagcatgttcctttatggtatgcactcctacggccacattcctttccttcaccagaatcttacagcagttcataatcatgtgtatccatgtgtgtgtgattgtttatctgcttctctcattagactcttaagctgcatgagagcaagtctgcatggctgtcttgcttattgctttgtttccagtacctaccagaacatcttacaatttgtagatattcagtccgtatggctaaatgcctaagggagagacttctctttgcctccagctgtttcccaaacccctatgattaagtggctcgtgctgtacagctcccaaacagccggccctccatattcgcagctccacatccataaattcaacaaacaatgcatcaaaaatgtttgggggtgggtggggggaaacacaataaaaaataacaatacaacaataaaaagtaatataaatttagcaagctggaaaaagaaagtaataaaaatttaaaaatacagtataacataactatttacatagcatttacgttgtattaggtattataaccttagagatgatttaaaatataggggaggatgtgtttaggttgtatgcaaatactgtgccattttatatcagggacttgagcatctgtggattaatatctagcgggtcctggaacccatccaccacagattccttgggacaactgcattctgtgcagttcttctcttcccctctaggcatcttagaaagaggaggagcaaagggactcaggtgtgttgcccgctgtgtgaacactacttcccatctgactctattagagttctttgaagcgtttattataatcccttacatttgaggaaagtgagaaatgtaatttccttacatttgggaaaaatgagactgagagaaggtaattgatttgcttaagggcggagagtggacaaacaaaggttccagtctaaactctgtctccaagcctgtgctttttccactccaccattcatgcagctgctgagaaggaagctacacagcccttgaagctagaagttctctagttctgtgttaagattttgaaatatagggtcaagagtatggaccctggagacctcctgggttcaagttggtcgctttctagctgtgtgaccttgggtaaataactttccgtctgttaaatagaaataaataatagcacctacctgataggatgagaattaagttagttgtatgtctaaagcacttagttgaaagactgaccattttagtaagtgctctctaagtgttacatagtttgttactgttatgtgttgagtcttcccctctgctagacttcaaagccgaattccatgaaatttgtaaattcgaggccaagactttaccttaaaatttatttgtatgtttgttagcctttctgtctttcttatgcaaggggacactacctgatcatttttatgaaaataggaagttggggccctgtgttgattattattgaaacctccaatatcatcaaactgtgaagttgttacctttcccccaaaacatggatctctagagattagaccgtttttaactaggactttggaggcaaaaaaatctagtcaggttgtgagaagaattggaagtgatcttctgcagtcagttgggtgttttgaaggtctgaatgttctccattgtgagtggaatgctagagggtctgtctggatgggagggcccaggctagtggttacaatttcttaatttcatggacctgtaaaattttaaagcaaaaatggagattggcctagggttgccacctgtagttttccaggtaaggacactttaaaaaataactacaatcttgctttatcatttcataaaataatggccatttaattctcaaactcaaaaaaaagcagtccttgaaattaaatacatttaactatgatgaaactcaccatgtgcctgtagcttttgcctgtttttgtttgttttgttttccccccgggcactcgtgaaagaataatcactggccagcagttgtaagccattgacctacttctcttatgtgattctagaagcccatcatccgtgttcacaccattttagcaaagctgtagtaactttctctggatgcagccaagaaaaaagcagatctaatttctggcccctggtagttctagatcatatctttttctcctgggttggacatgtgactcctgtgaaggtcaatatttttcttgagtgctagggaacctgtggcagagctaggctgtccaagagtttccctctatagcctttcatgctggaaactccaaaacatctgttaggactcaacaagctttcccttcataatgggatcatgctctccaggatccagccaggcggtaacacagggtagatctgggattaatgggagcagctctgaaagggaagcagatgtgaaaagccagaaactgggtctcccaattcaaaagaaagcagggctgaattgagttgagcaatgagccaactgccttagttggcccttagttgtcctggaccacttagttttactgggatggagtacaggtgagggactacaatcgttctcaatactctctgatcttctgtctctgcttctgcattttagtctttgcctgaggtcactgtttgggggtgaagtggtagaaatatatagaagatactgacagcaaggaatattcctcagagttatttgctctattctgagcagctatttcctaaacatgtgctttacttgagctggctgcgctttgtgaacaaacatctgcgggaacaccgtgcagcacagtgttatgtgccatgtgcctgctttcctaggtagctaaccctcaccaagtgttatatgctgttggcgaaacacagctactatcccaaaactgcttttgagatgcagtagctttctctggagagggagtggcaccccttctgtgatgttcttcagtaataaagggagtgaatgaagagccggggaggagaagcaaaggttctttttacactttacacccttaccctcagagcgggtggatcttctgcaggtttttaccctcagggcgggtggatcttctgcaggtggatcttctgcagggtggtgttttaatgataataactggagttttcagttgggagaagtgaagagcagctgtttctgggtatcagcctaacaaagctgggaaacatttcatgaaaccatttgtccagtcttcggtgtagaatagtctcttgagttgtgactcccagctttgcagctggctagctatggatccatgagtaagttatatagtctcccggcacttcaggttcagtaaaactcagccagtaccatccgacattgtgaggattaagagagaatgttatgaatgtcaggataaaccagtgccttcaactgcgtactcagtatgcaccattgtcaaatctgagtattttggacattttttcacttgtcaaatggggagttacactagcattctctgtggttctctcccttttccctggtctgtcgtgtaaggagcacaagaaaaagagatttacatgaagatctgccagtaggaccaggaagttgggagatagctctgtttgttttgtgcttcaggtgtttacaaatcactctactacttgtgatttcatttactcccatgttagctctgtgaggtgaagggaactgatatacttttacagaaaggaaaactgaggctcaaggatgtgaagtaaggctttaaagctcctgcacggctactcagcactaggtcccattggatcttaacatcttggatacccagctggttgcttttcctatagaacagcatgtgttgatagcttcttatcacctagtcagttcaactatgctgatttgagttcatgagttgggccatgtctgaactggccttcacttcagtgggatgttgtccttagcaactcttgtcttttcactttcttccccagtggctggtgaaacgagctatagaaacaaaagaagagatgggtgactatatccgctcctactctgtatcccagttccagaagacttacagtctccctgaggtcagtattgtgattttattttcttgtcccactgagaaacagagtgcacacttaagagactctctagcaaggagcagagtaagctcaggctcccctacattctcagccccacttggcatcattagtgcttctttacatagccactgagtgcaaagctctataattttgtcatcttctctgaattttagtgtttgatctagagcttttattaacttacaagaataatagttgatttttgtattaagttttttgagaggccacttgcccagaacatcctatagtaacaatttaataataataataataatataattaaaaacaataatagctaatagccatcatgtatttactacatgctagtctcagcacatcttatggcttttattctttaatccttactgcaacctgagatgggcgtttttatctctgtttcatagacagagaaactgaggcttagaggttaagtaacttacctgaggtttcagtgcttaagaggatttgaaatgagaactctcgtcttaagcactattccttatgaccccctttttcttactggctgtgtagggatctatgttggagccatctgcagggtttgtagccttttcccatggagaatatattacaatttgttcgaaaattgagacttcgtcaggcaaagtagtgatgagatgagaagtcaatttataagacagatatctgagtggtccacttgagttttaattttcccttgggatttgtttaatcgctctgttttgtcttgtaggatgatgacttcataaagagaaaagaaaaggccatcaagacagttgtggacctctcagtaagtcccctggccgtattcttctgtcagagtcctgcgtagcctcagatagccctttgttaaatcacaaaagcgctgctcctgaggcttccatctacggggatcgcttaggagctagactcagatggctgtgtgagggaagccccgcctgctttactgctcagggccaggacaccagtatgcacagggagaacctgccacactactgttctgtcccctcacttccacttttaagggaggaatagccaaacacagagcccttcctagtttatcccaatggcaggtataaactttgaatagctctgaagagcagatgatgaatggggatgataacttgaggtttctgtcccccacccccttgatggctttgcatagacagagtagcctctgagctgtgtgcgggaagctctgggatggcgtttgtccccattcacagtacgtcttaatcacaatgagtctgcacatgtgtcccaacttcgccagcacaagggttagtggaacctttgaccctttataaaacactctgggccagagctgtggaaccttgttagctgtaccctccacccccagccttcctacctgagctgaagggaatgaagcctaggtgcctgtgtgcacagtctctctctcctgaaaataatgtgttgtgttgttttgcatgctttttacttcatctaaattatgtcatacatctagttggttttcatagttgcatagtttcttgtattaatatgccacccaaatgaaatatcagatgtacttcttatacagatggcatgggttacataccttgtgtcattgtaaagattggcattgcctggtgtttgtggctttgtgaactgcctacagagtctttccagaaaaagaattccaaactggcttatcttaaaaataaatgtgtggtctaccaaggtgattactctgaaaagaacaatcatttggtaatgaaagacatggaaatctcctatgaaacaaaaaatcttgatcactttatggttgtaatttgttttttttctcaattccattttggaaatgttagaggtggaaaacctttgggaaggtgacactcaaaagccagatactgttttcagatttggtggcagtattaaacaataacaagaaaaaatgatatgacctcagagtaattttctttcctggttgtgaaataggtgttcagtttagagcatcctcaagtttttaaaaagattgatagatgtaggggaattaaagttgatttttcaccttaatttcacaacacggaagcaaccgcttttaatttttggacatatttcttccatgtttttattgtgcatttttaaactgaattggaatcatactttaaagataattttgtggttttttcacttaccaatgtaggggcttttgtatgctgttaaaagattcctgctggcttggcacagtggctcacgcctgtaatcccagcacactggaaggctgagacgggtggatcacgaggtcaggagttcaagaccagcctggccaacatggtgaaaccccatctctacaaaaaatacaaaatttagctggatgtggtggtacacccctgtaatcctagctacttgggaggctgaggcaggagaattgcttgaacccagaaggcagaggtagcagtgagccaagatcgtgccattgcactccagactgggcgacagagcaagactccatctcaaaacaaaaacaaaaacaaaaacacaacaaagattcctgctaactacatttctcatgacaaatagtaaccagttagttggatatgataattgctttcccctgttttaaatgttacttcatctctggaatgatatgaaaacaaggtgataatcatgttacctctgaggcaggaaattgctaggccagcagcaggagagaaggggaaattgtctttttcctataatctctgtactatttgaattttattctaagtctgtgcattacctattcaaaacagtaagtacacattaaggtgttttttgtttttttttttggtaacaaaagccacattcaaacattaatttttttttttttttttgagacggagtctcgctgtctcccaggctgaagtgcagtggcgctgtctcggctcactgcaacctctgcctcccgggttcacgccattctcctgcctcagcctcccgagtagctgggactacaggcgcccgccaccagacctggctcactttttgtttttttagtagagatggggtttcaccgtgttagccaggatggtctcgatctcctgacctcgaggtccgcccacctcggcctcccaaagtgctgggattacaggcgtgagccacagtgcccggcccaaacattaaaaatttttaatgcttaatcgaatatctttatgtgtaaatctcactctgagccctgggtagagaatgagaaaatggtacagttttcggccatagagcaaaagccagcatagctgtcaatcatcctggtaatgaaactgagcctggcatctctatgcctatggattagttaaagcccctagaggcacattattttttcttctcatttttaatggaggtttttttttttaatccacttctgcttggtaatgtggttgcagagaattaaggaatatgagataatgacagatatttacatagtgcccaaacattgttctgggtgttcatctctaactcatctagtcctcacaacaatcccatgaagtagtagtttgttgttgttgttgctttttaataaatcaggaaactgaaacacaggtaggttatatatcagttgcccagtgtcacaatggtgatggtagaggcaggattcaaacccagtcttgtaactgtgctgctgtgagcctctagataaaatggtgttcgcagctgatgagaaaatagtatcagaataaaggaaaacgtgtccggcctggtggttcatgcccgtaatcctagcactttgggaggccgaggtgggcagatcgcttgagcccaggagttcgagaccagcctggccaatatggtgaaaccccatctctacaaaaaatactataattagctaggcatggtggcatgtacctgtagtctcagctcctcaggaggctaaggtgggaggatcacctgagcctggggaggttgaggctgcagtgagctgtgattatgccactatactccaccctgggtggcagagtgagaccctgtctcaaaacaataaataaaaaggggaatggaaaaaaattgtgagtccctggttataatttgtattgtttagtttatttccttttttatgagtgaacttaatcctcagttgattggcaatacattttcagcaggaatgataaagaatcttcatggatggctaaaggttgcctttgggtttttcttttcctcatctgcttaaacacccctcacttccaggagctgtctgcgtaggtttcttagcgagctctgtcaccattaactttcctccctcccttctaccacttctgcaagcccttctttagctgacttgaaatgagagtcccaaaaggtctcagaaactctagggctgtggtgcatatccctgacctattcttgtgagtcagtacaaaaaattaaacagctcaaaactttaattattgtcatgctcctcaaggaaaatccctcctttaataaaggaaaggaaatccttaattttaagttgtgaatggaaaattaaggaataaaataaggtcagacatgtagatgcctagtttttagacccagcgttttataaaataggtgtggagctgctgtgtatttattaagtgcttaccaggtgcttggcatctcaataggcatttaacaagcattagctcctttatccctcgttaacactccaggagttatatgttattatttccattttacaagtcaggaaattgaagcttagaaaggttgataaattccctgtgtagctgcagagctaggaagagggagtcagattttgacattacacctgactctaacacagcaggtgtcggcactcctcctctcttctggcttttcacctgctctctgctttcccacatattcctagcaccagttttgcagtactattactgacttacttcagggccctgggatattgcttctctgggtcccagagactcaaatgcctacagagtggttgggtcctctcctaccacctcttcagttccttacgagaacattggctgatttctcatctgaagacctgttgcccagccaaagaatggatgccaggtgggagctgtcctgttgttatctttttgatcagcatgatgcctttgtgtctcaaccaacaggcttttacttattcttgtttagacataacataaaagtatttaaatattgaatctttagcttattgtctttagccatccttagaagactgtttgaattttttgcattcatctttggttatgtggcccattcatttttttggtgcatgattttttgttttcaaagttttttttttcttttgtactaatgctgttgtaataagaatgaaaaattaggaaatggagaaaaacaaaaactaaatcacccatgataccacgagccagggataaccactgatactgcaagcaggaaataaagagttgtgaatatcagtatggagaatcagagattgcaaaaaaaaaatggcattgtactatatattctgttttgttgcttgctcatttgttgcttgctcattttgctcagtagtatattgaggatatctttccatgccaataaagatacctccatagcatttttagtggctgtagattattaattatgtggaactagttcaactatagtttgtatctctgttttttttttttcttcacttggccattatgtaggacatcctcatagctaaatttattcttttatttctaattatttacttaggatttattccatgaagtggaattggtcaagattatacctaaggcttttaatacttcttgccagattgccaggcagaaaggccgctgtgaactttatcatccgagcttatgatgggcgtgttctgtttttgtcttggctttatttttcttccttcaggagattattcccagtacctgctttcttctttgaagtgcattactttcttctccctatctcctttgcacagaatagctggctgctttgtagaaggcctgcccaacaggaggtggtattttcaaaggacataaggagtggaaactaccaccttccactttcacatcataatcataatcagctcctctgtctcatgtactgtgctgtgacacagcttcctcctctgagatgtcagccctccatagccatgaagtgtctgtcctgtgaagtgaggtcttttactccctcttaaccttgaataacaggtgcccacacagttttatccagacccaaaagatacattcatttactatttgtcagcatttttttggtagtttagacttttgtatgagaatagaggggacagagaaaagacttcttagagcttccagactagttggaaagaagtgcactgtggaacttaccggatcatctaagagactgccatttaaagttaccagtccagtgtgttcttccatagggaatgctgtgaggaagtccttttcattcagcttgtaaaatataaatgtagtgaactaagtaaagcaatgttaataatagtacacatccatatgcatgtaaatatgtatatatcttagcccttactatatgtcaggtactattaaatataccgattagtttattttcgtaacagctctgcttatacctaatatgcagatggaaaaccacagaggttaaagtaacttgcctcaagtcagagaggtatagtaagcaatggagcaagcattaaaactctagcttgtttgactccatgtattcattcagtaatattaattgaacacttactatatgccagaccatgttcaaggagctgaggcaacagtagtgacattccagctagtgaggagtttgaggactgatcaagaagaacgacctgactgcaaggtggcagtagcatatataagctttctttgggtgatgctttgacaggtttgcttgcagggtagaggagtcccttataccatgagaccatccagaagcttgcatgcaagggccacatccagagtaggaggagaggaaaggaactctccaagatcatagaggaggctcatgtgtcttggtgatgttgctcagcatcacacaggggggagtctgtggtcagagacctatgaagagccccagtggcttgaggtctacctagccatagggtttatcctatccgtggttggaaaatgccaacagttttgaagggtttgcaaagtaggcaggctctaaatgacaaaaagtctgattatttaggctatgtataaaacattttgatatgtaaaaatttgagtttgtgctggtcaacttttgagccaataggtgtcagtcttctgtgaagaagtaaacaacccaggagccatctttagctcatttatataaccctcagtgatcttattcttacccaccaagtcatactgtttagtgcagactcaaggagacctgaggtggggcttgtgccatacttcaaagagcagaagatgtatacttacatagcagagctcatgtaaaacaaaatggaagaacaggggtgaggggtgtcactggaggaaattctacagaaatgattgccatccatccatctttcatcatttctttcagtcaatacccaggcacttcatttttgttattttattaatgtgagaatttttaagaagcacttatttgtcccatttatagtaactttttcttatgagatctttcaggacattgcacttggtggtgaaaacatctatggggtccctttaggtgaaaggcagaattactgacgggacacataggctaagtaagatggatctgttggagttgggtttgggctgcaaagatgaactgttaaggtcaatggaaagtatcgcttcctgttgagttgggcatgggctggcccacaggagcttttgagtgtagaatgccagattggcggtggctgtttcactgcctgctccattatttcaataaaaaagttgtctatggtaattgtgagggaagcgatcagggatttgctgcagacactgccatggtactgtgctgttctacctcccttccctgcattgaggaatgtgaacttagagtaattactctgacaggtgaacctgacttgtaacccagacatgcaaagtagagctctgactctcacagtgtaagagttctctgctttacaaaagggtcaccttaatatttaaccctgtgtgtgtgccttttagcatctgcaaaaaaataaaataaaataaatacatatatcatatatatatatatctgatatatatatatgtatcagaacctagataaagggtgatgaaagtacaggtatgagacattttgcagagtgcttaagtgtctcagttctggagtcatcctgtttttatcgcttactgcctttttcaccatcagcaagttttttaacctctttgtgcctaagttcgtctatagaaagataacaaggataactacactcagatgtggggatcaaatggacagcacagatacagcagaatgtgcctggcacatacctactattcaataagtgataactattacaattgctaccactattaatgacagaaggataaattgattttatattcctttttaagagcacatcatggaaagcatggtagattttttattaatctcagactacattttttaaggaattatgttaccaagccagtatctttacaggattaaaataatacaaaggaagagaccctgggagcatccttcaagatctgttagtacaacttcattttatagatacagaaactgaggcccattgaggggaactgcctttctcaaggtcatgcagctgattagtggcagagatagggctagacatcagcattcttgaccctgttgctttaaagggtgacttagcaatagctctttatagttggcctgtaaacccctgatatttaggttgcattacttagcttcagattgtagaatgagtcttgtgagagggctagctgaaatggctggtgggtggctagagtggcagcctggggcaaggtagtgtcagggacaagccttgaaatgagaaaccaggttacctagggctaggccgcgtagtgtcccagggatcttggacaaattattcagtgtctgcttcctcaatagtaaagtaaggttgatggtatgtgccctgtctctacttcacagtgtggtttataaagtgtaaaagaaaggtgagatatatatgaagatttatactttaacatgtaaggaataattcacaaaagccaacattgtcattgtttggcggaataaaaggtccttttagctgttggtgtcagtatgctcttgttttggagtcaatcctttttttttttttttttttaatagaagaatccaatttcttgccttgggttactgactctttcaattgtaactaagtacaatagcagttaagctcaagctgtaatagtagagctcagtggaagctaaaccaggcacagtaactgacaccatgtaggttgattatattttgcatctccctgcaagtctgttttatgttatttatagcttcctattcgtgtagacaccagcagtaaactggggaatatttgtggcaggaatttctaagaacaacctttagcatcatctcaggccctgatccatttccttttccacaaaattgtttgagattatatcgtatgtgttacagaaagaatgtttttctgtatgctcgaaactgtatactaaagtaaaataataaagttaaccagaattatccatggggaacaattccaattaaaataaaatgccagtatctggtaaaacctggtagtaatgctttttgtggtgatatccaggtaatgattagatgcagtaaacccgggtagtagggaagaagagagatgtggggacaagcagcccgaataccttgctggcatagcagctgcctacctgcacccggagacctgagcagatattactagggtattatttgacagccagcttagcagtcaagaaggacattgatttggggtagcatggcagaccacttcattggggctgaagacctgcatttattgatcacttactacatgccacgtatttcgtttaggatatatatgtgtgcatgtgtataattttaaaatataccccacggtagaggcagagctgttggcagtgagccgagatcgcgccactgcattccagcctgagcgacagagcgagactctgtctcaaaaaaaaaaaaaaaaaaaaaagagaatataccccatggctggaggcatccagcagccaattcaggaggagagccttctcacactcagtaacttggctgtctcatccacttaggaagtgtacaagccccgtcggaaatacaaacgccaccagggagcagaggagctacttgatgaagaatctcgaatccatgctacacttttggaatatggcaggtaatgagtgggacccagtctaggtgtctcttttaaaagaaaagctaatttaagttgcttcatttggattaacttgactagcttctacccgattgagtttctgccttcagccatgagatttccaacatcagggacttttctctggtaatgaattacctgtttctgtgggcatcctttgcaattcctctctggaaatgtgcacctggctctgccttcctttgggagttggggtgttccaggcatttacagaggctgaggtactctgtcctgcatgcccctgtttgttaaaatcttcaggtaaatgaaaacagtttcagtgatttcactttaagtgttagaataataatttcaatttcctgtgaatattgtcctaactaggaaaatgaagaacttagaagtagttttgtcacttcttaaaaacatctcgtttaaaaaaaaaaaatcttattttatatccttagtttttactttaaaaaaaagtgcaaggacatgcttctccccattgaattttttgcttgtcactgggtattaaccttttatgtcacgcattctcttctcagggtaactgattccttgatgtgagtaagtctccttgtgcttcctttgtgttgggagaggctcctgtgtgctgctctgcctcacagcccaacccttgtagggtggctggaactaactgcattgccactggcgtttccctaagtgagcatctgatggctttgcctgccctctagggtaccagagagaaccagcaggaaattaggtttaattattctagtttccaaatggaattgcatgcaattgcttatgtttttttttttttgttttgttttgttttttcttcctaagaataaaaactagtctgtttctaaggaaattgaagtagttctggccctaggctgcgtgtgatggctgcccccacagttcactagttgctgctgtgaattgaatgcctcctccaagtcaggcatcaccaggactagctatgtagtgaaaatgccaagtaacttgttagcagttattaatgatgattaattattaagaatttaaagacaacaacaacagccaagtgagaactcttctaagcatggggccctgtgctagtggacgggttgtgtgctcaggaagccagccctgggaatcatgacagagtctgtctagccatgcccagctgtaagtgagcaggtgaggctgcacagctctgggagagccagagctggagagacaatctctgtgggtgtcacgtgtcccagaatgaagaagttcttggcagaatgtagtggattttgtgagtttgtattatttatgcatccatttttccatcatcatggaaaataggattttcctgagggtgaaaaggagttagaaattcagtaaattgcccacctcgctgagaccatgttgacagaattctagatcagtattcttgttctgaaattctcaggttcaaatgggatcttttgtatatatgttgtagatagtagctagtatcaccatctgaaggctgggaaagttcagaacctccctgtctgtcatcaggagtgattgatgcagtttgaggtgagaatctggcttggcctctttaggaaaggaagcaagacagattttgcttgactcttctcaaactctgagagtgagaaagagcagtgtcttgataccaatcctggttcctgttggtatggtcatgctgacttctgctaatttctacggctagggtgggcatttcctgaaggttttaggtttgggggttttttttgggtgggagagagatgttattttgtttttttagcttttttggcaaggagagggtaagtttgtggcaggtggagtagtgggtacttaggacattctgatagtatatttagctcattctcctctttgagactaataatgacaacattcagaaaggttaaaaaatgactttcttaaggtcataaactataaagaggctcagattggcacttcaactaagataccttgaacttcaaaagcatgtcattatcattgtctgcaaatactgtttgagccttcagtgagagtatatttttaggttctgagttttaggaagactgggcatgtctattctttggtctgaaactaaataagaagagaatggttattaaaactgacagagcaaatcagataaaatgtacagccccaacaagtgtgtgttctattccacctccctgggaaggcttctcccttcctttctggcagtctgtttcctctaggttctgttcagcattctccactgcatggagatctttcccattaaatgaggattatatgactatatatataattttgagcagtttgttcaatgtagaaaacagtaaatgttaaccattggctgctgtcatcattctccttattataatcatcattattagcagcaacagttcagttttcaaatgccctcagatatgaccttttccccttacagttctccttgtccttgtgtgtttatgtatgagtgaagaggggaagcttccccttggccctctgaaggttcactgaaaatgaactgacaaaaggcagattaacaggagaaaatggcatacataatttattgtgtggggggaaaaccacagaagtgtgactacccagtaacccagtgatgtccagatgcctatatgtccttcttcacaggggaaggcagatagggaaatacgccaattggaggggtagtaaatgatgtttaggggaaatgaatcagaccatggttaataaatgactttctggaaattgaataggatgggaaacagaccatggtttgggttctaggcgtggtatttaattttcagtctcttgctctgtggtagataatgagatttcagggagtggatggaagacacttgtgttttctttaacgggtccagtctttatatagataagagaaaaaaccctgttctaacatgtgaccttcaagtgcctttaattcaagttattcagcatattagggtgccatatttgggggcaacagcccgtggactccttcacttattacccttcacactagccctccctctagcatgtgtatgggaagtctggccttttctcccctgcccctgtcaaacaaggctggccccctgctggccctgggactcactttgctccatcttccctttccctttaacattgcggcattcctgacttcctcacgcacccccccccccactacactatggcatcacagctttaggagtccagatctctcttccagtgtttctattttctaccttatcttacctcttgtcagggggaaagtattttgacttctagagcaagaaggtctgaaatcagtatttcttccttggggttgaaggtcactcatcagcgttacacccacagtgccctttggcttttaggtccgcattccatctccttcccccattttgactctcagttgcttaaataaaggtgaattatgaaccttgtcaactatgctgaaggccttaaggactgtttatctgttaaaaacatagtttgggtatatttttctaagtgttaatggtgttaggaaaacaagacttatagttttgattttggatgtaaacaaaattgcacacctataatatttcagttttgttatgggttcagtcaattttgagaggctaacttaagcacctaaccgtgctatgaaactgctactctggggaaatgcattttatgtgccatatatttgacttgcaagaggaggtttggagcacagccaccagaatgctggagttagcctattcctcagtattcaaagcctaattttgagttcttgaagtcattctaggcaactcaaagttaggccttgaatactaaggaacaggctaactccagcattctgtagttagtaaataaaacacggcatacctctcccaacctgtttgtgtctcctatgatgataaggcctatgacatgctcataaaagatatttagtaagttcttgtcaaatgaataaagaacaaagttcacagtccttggtatttagggctttttatgtccctattttgttttatattccaaatagataaccatcttagtttggcctgaggtaattgttcttgaaagttagtttgttttctagaattgtggtgtccagtatggtagccactatccatatgtggctattgagcaattgaaatgcgactagtgtggctcaggaacagaattttgattttaattaagttaaatttaaattttaagatttgtgcttgatttagttaatggaaaatgtttatctttggaataacttggtcatatgaacctactaacctagtaattaaaaaattgtatgtgtgtccttctttatatttcttttgtactgtgctgttctaaatgtacatccttgatttaaagactgggtcctatgactaaggtaagaagaagtgaactggatgatgggaggagctctttggtgctaacagtgtaggtagcaagaatcagagctaaagaagaggaatgcaggagcaaatggaagcatgcggcactgcggatcagagctgtcacttgggggaaacgggcagggctgacaggaaaagaggaaagcgaggcagtagttaataggcagttgaggacagagctttgtcatggaaatctcactactttgtgacatggatgaggcctttagaaaaatcatgtggactcttcattcatgcagcaaccattaattgagcacctactatgtgccaggcactgaactgccaggcaatggggatattgaagtgaatgaagctgtacatgaatatttatagtagcactgtaaatatgttgcataatatattgcacaattatgaatttagcaattcataattgctaaaaagtagaaacaacccagatgtctgtcagctgatgaaacaaaatgtggcttactcatataatgggatattattcagccataaaatggaattaagtagtgattcatgcttcaacctggatgaactttgaaaatattctcatgagtcaaagaagccagacacaaaggccacattttgagtgatttcatttctatgaaatctccagaattagcaaatccatagagacagaaggtagatcagtggtagccaagggctgggaagagggaagaattgtgattaactgctaatagtaacagagtttctttttgaggtgatggagcttttcttgatttcgataatagcgatggttgcacaacatagtgaatacactaaaatccagtgagcaatacactttgaaatggtgaattttatattatatgaattatgtcagtttttaaaatatttttttaaagtgaatgaagcaaatttcttcctctccagaggctcaacagaaaggcttagcggattactcatgagggataattatgttcaccatacaatgagtgcgttggctgtcacagaagctcacatctggagggcttactaaaagagtcttcccagagcctctgtctttaaggaggagtagattcgtcctaggaatcaagtcactcagatttggttgttcacttccttatttggaaaatccgtgaagtccctgggccttagataaagggctttatgtcttctgccctaaaagtctccacagactaaaggcataaaaaaggaaagatgaatactcaagatgcaaggacactataggagtgggaaacttgggcaagaccttgtattgttcagggttccctggttgaaaaaacagtaccctcccactagtttcagcagaagggattggttacagggctggatgagaactaggctgagccagggtcagctctcaagcttcacattagaactggagctccaggatactgtttctgcctccaaaatcaggaagctagctagcagcctgtaggattgggaagctggtgctatagcggcttgacaaggaaggaaaccacgctgcttctgtcaaattaggaagctctgaaaaaccaagaagccactgtgatagctgctagccccagaacctggctgtttctactgtgatccacaccaacacaatggatcctttatgcttccctctttcctcctttaactgttccatattgaaaactctagcaaatgcatctgattggtggaacgttaacagtattcagaaccctaggtgcaagggagtatggaaaatagtctcttttccagcctcagcagtactagaagatgcaatagatattaagccagtccacagaatctgccataaggtcctttacagaattcgtgtggatagccaaaatttaaccttggtctgctacactttggacctataggtttatttctaaagggtggacatactgcccagcagtgactttttggtttccccagttatatgacaatctgttgcaaggtcagatgatacttttggcttcttgatttttgcattttttcacttatgtttagtttgtttgttcagtgaatattggaaaaaccagatataaaggtagaatctttgccctcaggagaatgatacagataagtaacagttgcatgtattcaccatctgggaagtgagaggagcatgaacagatgcagggatggataggccaggctgagcacatgtgcatgggggatgcttcacaggggaggagctttagagctgaggagtggagggtgagtagggaagcaggggcgagaggggaacagcttagtttgtgcagagctctctgttcaggtagtaagtgtaataggaacacagaaggtgctgctggtggtgaggtgaaacacttgttaggctgagccatggaagagaggctttataaggctcctgaggaggttctgttttcttctgagggaagaggcctgccattgataaatgtgcatcaggccaatgcagaagttggacaaggaatgggcaggaagagtgtggggagtgaagctggaggaccaagaccaggtgagcacacaacccagaagtgaggcacagagtagccttaaacttgttctttattttcatttatttatttttgagacagagtcttgctctgtcacccaggctggagtccagtgctatgatctcggctcactgcaacctctgcctcctgggttcaagtgattctggtgcttcagcctcccaagtagctgggactacaggcgtgtgccactatgcccagctgctttttgtgtttttagtagagacagggtttcaccatgttggccaggctagtctcaaattcctgacgtcaggtgataggcccgcctcagcctcccaaagtgctgggattacagcactttgcaggcgtgagccagcgcgcctggctcaatttgttcttaaatgtttgcattaactttattttcttacaaatcacttaaaggtgtatgaggctgggtggtttgcattttgctttttgttgagggttgaatggattttgcattgttatacttgctttttaaaaaaacatagattaattagagccagaaaataaactacttgaaactgaattgtgtttttgtgttttttttaatttaaggttgtgtgaagtgagtacacattattggcatcatgcttggattatgtttgggaataaaaagtgtgctagactctaagttatggaagtagccattaaagcgcatatttggcttaaggaaacacatttacatttgtttatatagatatttttaaggcttttagcttaaaccgtggctctgaaatgcagtggctgattcaaaaagtcataattgcacttaaggaaaatgttgcattccatactgtctgagagttccaatttacattatagtatttgcatagcaagtagggtggctggccctttattaaaaagacagtggaatatgtttgtaatttaggcacttgtaacgttttctcaagtcaccaaatggcataaattctcttgatgtttttcatgtaaaaagtcaaccaaaatgcatttcactgaatgtattgtaattttttaagtagtaattaaactccttttttgtggcctgcaggagatatggatttagccgccagagcaaaatggagaaggtaagaaaaacattgatagtaagagagaatacttgagagatggaagtgactcccttcacctctgactaacactcacaagccgggcagcagcttcttgggaaacccagggatgtgtgagctgcctttggcccctgcatctccgtcctggcttttctagctagccacctctacagattggggagcaaagcagcagtctcctcctggggctggaaatgaggggtgattgaaagttgtggcctagggtcagtcacttggggtctagtggctctgcagtatgaaggtgaagtccactgccagggctcccagagcactcctcatctgaggtgagactctaaatagatgtgaacaggatgttaggtagagcacagctgtgaattacaggcctgccctctgctgaaacagccagtcatggaagagccaggtaaatcaggatggcttttctaacttcacaaaggatgcccaaagatttctgttaatttatgtgtttattaatgatgcttcattgtcagcagcaggacaggtacataaatgttatggtgctaaactctttctgtgttccaggctgtatgttaagggctctgtatgttttcacttactgccttgaacaactctatgaggaggatgtttatttctgctttttaggtcagaaagctaacgctcagagaggctcagtgatttttccaaggtcaaatagctctaaagtgaacttaataagaatctgaacctagaggtctgacatcaaacctgtgctcatagccactgccttctaaataataaagtgtcagctatagtggtcagtggcctcttaaaaagttcagttattgtcaggagatcgagaccgtcctggctaacacggtgaaaccccgtctctactaaaaatacaaaaaaacattctccgggagtggtggtgggcgcctgtagtcccagctactcgggaggctgaggcaggagaatggcgtgaacccgggaggcggagcttgcagtgagccaagatcgcgccactgcactccagcctgggtgacagtatgagactccgtctcaaaaaaaaaaaaaaaaaagattggttattaacctcttttcattctccacctgatccccagatttcttgaacaggacacactccccctgctgttcccctgccacccactccattgtacccactccccaggctccccctctgcttcctgtgttgactgttgtctcagtcgctgcaggcaccagcagtgactaggagcactgttctaaagccagactagctggtttaggattccagctcctctattcgctgagtgactctggataatttactgattctttgtacattagttgacagcatctgtaaaatgggggcagtcattgtacctatctcacagcattattgtgaagattgaaatgtaaaggacttagaatgatccaacacatagtaaacatttaataaacattattattaatatcagtattagttattggtacttagtcatgtactgattatgatgtcttcttttttagttttctcattattttttccccatttgtgtttttttagtcaactgaataatgatttcctacagagcagggtgttttctggatttgagtatatcatgttttatctggtatataataagggtttgatgtgtatatttaatttgatatgtaatttaagtctgaaaagattgtctttatatatgactgggcaatttggttatgattggaaaaatcatgagatgtccctgaaatagtattcaaattgtgcttgtcctgtcatttttatgtcagacggcacatttgaattagcagtctcatcccctgtagatgtgtccaagcagttaggagctcggagtgttcccatgggcagtgatagactcgttatagaaaagcatcctagagttgggatggtccaagaagggcatttgagaccaaacctctcttttgaccctggaagtccttaacatgcagggatcagaggtaagcctgaggtcacccagctggtggatggcagggatagaattaaaacctatagcccatgattgaggaggcagcagttaatccagggtgccttgagtttgacctggttcatttagagcctggggctgagtccagagcatgctgcttgatcattagataaggcagttttcatccttcacaccagtggtattcaaactgttttgattactctgagcagtaaacgtataatttttcatcatgattcagtacacacacactaatacccctaaaacaaaagtttcagtaagcagtacctaacccctcactacaaagcactctggcatgttctgttgtgttaatttatacagatgctagttgtacctgccaaattacttttatgtcccactaattggtcttaacaggcagtttgaagaaacactcctttagtagtgatctgctcttgaaagtgttaaagtagggggaagccccagtcaaagtgcaagggtaagtcaggcaaatgtgtgtggcctgaatttaatcagtgagcagctgggacatggaaacaggcatttgccagttcctgaagcttaacctgcccaccctatactctagtggaggttcagccgtttggagtatccactctctcagggtgctgctgctctgcaggtctgtgtttttttcacagactcatgcctcttgtcagtattgtcctttctctactgagtctccatctcccgtgctcagctgttttcacatcttcccttgcaggctgaggacaagaaaacggcacttccagcagggctgtcagctacagaaaaagctgatgcccacgaggaagatgagcttcgagcagctgaagaggtgtgtggtccatgtaggccctctgaggtttctgtgtaagtcattttgggagaaatcgtactcttatccctagcgttcccaaatggccaccacctcccacagccagctgctgtgagcaggtctttcacaccttccagtttcattttatcacctgcctttgaggctcacataagacgagatcaaggaagacacccttggatatcaccgcaaagatccatgtaggcatattgcttctgtcttacatgttcagaaccactcactgctgctcccttccattcctctttcagcagcgtattcagtcgctgatgaccaagatgaccgctatggcaaatgaggaggtgagtgggagtcggggaggtgtggggatggggacttggcaccaccctgctctgctggggtcttctcccagagagcccaccttctccggagctgcctctcaccagcacacagtacctcctcttccccagggagttccttttgttaatctgtttttaatgcctagtgctgccacccatgggaacctctaggagggaggcttgaaggacccttgtgaaagcagaatattcctgctgggaggttcacagggcctctgcggaagagctagagctgacccgtgagttatgcctcatgctgaggcagctcttgtcttctgctttcttcctacactatctaggtaggaagcgggattttgagattatagttggtctttccagagctcaaagcctgtccagaaggtatagccaatgtgaaaggatcattctttttgaggcctgggaagacctgtggtagtaaagagatattttagagttctgagattctttgtcctttcccatgctcttctctattccctgtgtcctaggcctgccaaatcccctgcaggctctgtttggtgactctcaggaggtgagaccttggggtggtacatagaagggaaggaccattttccaggggtgcccagggtccgaggaggatttagcaccatccgctcagtgactcaggaggtagctgcgtgtttgtcctgaggcttcttttctccctttctgttggtaatatgtggcaaagccaaattatttcccctgggaatattatgttttaccataatagagtgttcagacataatagagtgttcagattttccagtgctatggaagacaaggcttggccttgagaacattccctccatatacttgcagagccgtctcaccgcaagctccgtgggccagattgtgggactctgctctgctgagatcaagcagattgtgtccgagtatgcagagaaggtaggtgggggcccagctggagtctgtgccccagataatgctccatggctttgttctcccacttccttaccccactaccccagcagtgccccgtgttctcttgtaactcaccagccacgttagtcagaaacacactgggctttaccatgcacaaccggctatcagcacttgcccgttagttaaattaattttgtcctgcagtgcccacttttctgtaaatataaagagaaaacctgtctcacagagcagttatcacatttgataaattcatgcctgagggtatgggatgagcattttttcttttctatcaggcctcttataacttgggctcagtttgatgattgggctagggaatgaagctttgccacttaggagataaaccccataactcagccaaacccgaggcagaattttttgttctactttattaaaagagtatagaatgaaggaaagcctgaaatcatatttcagagtttgctttttttttttttttccatcctaagaaaaggcaggaagaccttgaatatttcagggagacggtgattaatcattttgcacataactgattctggtgtggctgagatgtggtatcagtaaaatcagatttacaggacattgttgcacatccctcctgccccagccctgtccccctaaaatgttgatgtctgttgaagcatccagctttgctttccttttctcagaatcttttactacaaattagctctgccctgactctctgtgacatattcttctgaagtgattgcacaggtgatacagttagggaaaaattgtccccagtaatctggaggcgttatcagctataacacccccaagacttttggaaaacagttttaaatgcctagtgctgccatccgtgggaacctctgggagggagacttgaaggacccttgtgcaagcgaatatgagtgagtaaaacagcttggaatgtctcagggtgagattcctttgttttccccactcccccaagtaagtgtttcttaacatgggctttctagtccaatctcatagaatccagagtgtcctgtctttccattaccacctaggaaagatgacactgctcaaagtgtcatctgaaatttgaccagaaaaggatgtttgttatcctaaaagtacaaatgaagatgtaattatggaaacagtattaactcactgtctgagaagaaagtgtcttcgtttcctgtcagcacacacatctgaatggcaagagtgtgagtttatacccgcccttatgttgccacatagcattgctgaacccagtttttcagaaaaaaaaaaaaaatgacaactggatagagcacccactgctgtttctacagggagcacgtaggagctctgatgattgtaagaggaaaaagcaggcaggcagagccccctgtggttggcagtgcatctctctttccacacttttccctgcctaggactcctgaagctcacctgacttccccagttattctgcattttgcacgtctccttctggatctctctgtgtctttatctcctaataagctttttcttcctcactcttgaccagtgatctctatccaactctgatggatacattctggtttatctgtcttggaccattctctacctccattccattcttctagaaaagagtgaaattaggagtaatttggacaggaagccgtgccaagattttttctaaggacatatatgctgttgattcttgatcaacacaggtttggactgtgtgggtccacttacatgtggattttttcccaaccagatgtgtatggaaactacagtattcatgggatgcaaaaccagtgtatatggagggccaacttttcatatatgtgggttccgtacagccgactgcagagtatgcacagattttggcataagcaggtggtttttgaaccaatcccccacatatactaagagatgactgtagttaaacttccaatggagaagcggaggtgtcaaacattcattacttaattgtgttgttttcattgggtaggtagtatagcattaaagctgatggtttttcaaaattaaattgcctttaatcctattcccatattgcagttatttcacatttgcatattattttacagtgcttgttcccagatcttcatagttgtgtatagttgtaatcatcatatatgtctaaaagaggtaggacagtgagtgagtgcagtgattaaaaacacaccatttgaagccatatcttggttcatttctgccttttccatttcccagctgtgtgacctcggccatatatttaatctctctttgccctagtatctgctttataaaatgagaataatattacttttctgacaggtgttgggaagattaaatgaaatgtgaccaaaatgcctcaaacggtgcctggcactcttcagctgttgatagctttattttcattactgtagtcttcattctttttggttttgtcagatcacatcctaaatattttctagccttcccgtttatttatttttatttttctaagtgtgtgtttgtgtgtatgggtggctgtgtgtgtttcctgagataggatctcactctgttgcccaggcaaagagtgcagtagtacaatctcagctcactttagccttggtctcccaggctcaggtgatcctgccatctcagcctcccaagtagctgggactgcaggcgcataccaccatgcctggctaagttttgtattttttgtagagatggggttttgtcatgttgcctaggctggtgttgaactcctgggctcaagccatcctcccacctcagcctcccaaagtgctgggattgcaggtctcagccactgtggctggccgttcccatttattttaataactacataatttatgtgttaatacagcgcagttcattaaacttttttttgttagacacaattttaagttgtttctgtttgccattgtggataatattgtgaaatgtgatcagatagtttctgctgagaggttttctaggtgttggatgattggttatcactccctctgtgtgttacaactacgtaaaatactaacagttgtgaagggacttcccagcatatgcccccaatatttccagctttgatttttttgtttgtctaatttgttactgtagcaactataaaatggcagctctgtagaccactgagaggatcgaagatggttctgtgtaagtacaggttacagagaactcatccagtaccatgtaactaataagttccaggtttgaatacaggactgtttactgtgttttcttctctgaattgtctgttatagactatactcgagtaacgttttccttgtgaatttgaataaagtctatacttcagatttaaatatattgtcactgtgatgcaagtatttctcaggcactttattttacttttgtattgtttttcattatatacaaggaatttgtacccaagttggtcagtcttttttttttattcttgtttccaaatgagaggttcattgtttttccatggatctggtaaaatagttaatgcatgtcagctggtcttttattaattatgtttaattctttaacctatgtagaatttattcttctttagcctaaagtggggacctgtcctagttttcctattcatatccacttatcctactactgtttgtcagataatttctttctactcatttggagatacttgattctatttttatgtcttatagctaaactgagtatggcctctttcttgtattattggtttatacttctattttatgcagttctgtggtaaagtcatgcatggtgtttttgttatttgcttgatttgtttttgttttgtcagtgctctccagtcaaagacctagtttgttcaattaggaacatatctgtggttgaacaagttgggtatattgctgcttgtagtgagggagaacacataccaatgggaatcatggggcctttcagtaagaatgtgtcagaaaggacttagtataggatttggacttatgtaaggtgacttgaaggagggttcaaggaagtggggctttgctttgggttcgatgctgtaaggaagggtgagtctgtcaatgagtatcttaataaatcttatctctaagacatggggaaaatgaatcaaggttaaagctatgtatgtgtaatagctagtataggggatatttggtcatttttgtgattcggacaatgtttatgttttcgtccatgttcggacatactcatagtcatagggtggccttgtctggtattggtgttctttgaaattgtttatgttttgcaacaaggcctggttatgagtgcaagtcagcctcccaccaacatcaatgccttgctaatagtaccaggctagctttcagacgtcaggggctgcttttctcattctcacgttgtttgtgtggttatctgctattgtgtggcagtactgccacaaatgtagtcacttaaaataacacacatttattgtctcactgtttctgtggggcagcagttgggcacagcttagcagcaccctctgtgactcttacaaggctgcagtctcatctgaggctctactggggaaggattcgcttccaagcttacatggttgttggcagcattcagttccttgcaacctgctcactgaggtcaccagtttttgctggccgttagctggaggctacccgcagttccttgtcacatgagcctctcctacattgccacttatttcatcaaagctagcaagggagggcatctccctgcagggcaggcattatagacttacataacgtaattacatatatgtaatcaaaagactgccttttctctgtggtgtattctgttggttagaagcaaggcacagcttccgtccacacccaaaagaaaggggttacacaaaggcaggtgtgaacatcagcaggtgggaatcatggggccattgtagagttgtctaccatggtttgcttattggtcttttaatcatactgccacagattgggctgaaactggacactggcaatgctgccaccttcagggtctcagtaatataccttggaaatagagatgggattgaggaatgcccaggagggaagctgttggtagtatctgagaaaaactcacttaggctgagatcaggattttttttttctttatgaagagagggaaaaggataatttgcggggaggatcaagtgtaaaaatgattttgtgaccagggaataaattgaatagcctgccagatgtgagtgtttggaaacttcacaggcactgggatataaaaacaaggtaaaaaacatgtgcagtattctcttttactggtaaagttcacaagtttcttataagagtgtaacataacatgtatctcaaagttcctgagacatgtaactcaatatggttcttgtagagcagcagaaagaggaatgtgaagaagcttccagatacataattcatgagtgtccgtagactctaggctgagtagctccatctgccattgtttccaaagggtaacacccttccctgaatgtgctacaagaagtaccagtgtgcttttggtgttcatgtctaatattctcactgcatcatagcatttatttttacagggaagaagaatctattactctgatttacagaaaactgaaatgcctgactgtccaaaatatatttccgccctgcaaccccctaagcttgataggagccagaagaaagaaaaggaagctgggccagggaagttgcaaggtccctgggagggcaggaagggactttccctaatgctgcatactaactaaccatacaccgttttgaccgctttaatacttagtctgccaactaaatcattcattggttgacttctccctaagacaggatattggaacattttgtagctctaaaggatctgaatattttatagctctagaggcacagatttgtcttggtgaatctgaatctaccctgagtgcctctccatgcagattctttgtgtaccattatctcatttagttcttattttttaattctaaaaaattatctcatttaattcgtataggctgccttcctgcttataatcctctgccttcctccatcattatacttatatgcagttgaaactatctgtttatgtggctgtggaccacctttactcttgtctgtaatctgagagtctcgctaagggcccaccagtgttggtgctctataaatgagtacgtgatattatatccattttgcaggcaaagaaacgagattatgtgacttgtccagtgccatacagctaataagttccaggtttgagtgcaggactgttttgactttgcaatctttctccttggctaggtggagcttccttagggagaagcagggacagcctcctttaccatccttagtgtctgccttccaggcttggctgtggctgtgcctccttagactgtcccactattcaactgcctaccttgggctattggtagctagggcataccgggaactaaccacggaaacaagagaaagtgaaaatggtgcagctcagcccaggcactcacacaccataaacctaagctgctgaaagccgtggaagtttgtatttggagtatctaagtgactcttcatgtttctggagaataccacattaatgtggtctcatgcagttctttaaagggtaatatctggctaggcatggtggctcacgcctgtaatcccagcactttggaaggctgaggcaggcagatcacttgaggtcaggagtttgagaccagcctggccaacatggtgaaaccctgtctctactaaaatacaaaaattagctgggtgtggtggcacatgcttgtaatcccagctacttgggaggctgaggtgggattggtagcttgaacctgggaggcggaggttgcagtgagctgagatcgcgccactgcactccagcctgggcgacagagagagactttgtttcagaaaaaaaaggcagtgggaggtaatatcctagcccgaagaatgtcaacatcttgatctcatttccatagcaaggtgtattttagatcatcaagggacttatttgtggaaggaatttttccttaatgggttttggaaattttcctgtccagcaattaagaaattctggcaccattgcctctgaccttttgattctgagaatcattctctggcagttagaagcctttgctctatcttgaagtcatatctttccagagcacctggggaatctcgccagataattagagcttgggtatggtcaaggatgtacttatgaaaaaacacaaaggaaagtgtctcttctagaaaaagcagacagccacatttgattagagcagatcttgtccccatctatcatgatgatttttattccactttatgatgcaatcagcagagaagactgcctcttcagttctgtcactcactaagttggaccctttgccttttaagccttttgggtgcaagtaataggaattctacccagcatgttgctataagcaaaagggagcctttatcagctctcagaactggaagtatttagtgggggactcaaatggccctgccatatccctttacccttgcttcactttgtctctgtcttggcttcatcaccttggaggcctgactgtagacagtttctgtcttactgcccccttcctccatcagtgtataaaatcctaaggaaggactgtcctctgtctgtcatggcttaggtcacagatttctccccaggcccattgttgccaggagttgggtgtgactggcagcccctctgaactagaaagagtaggagacagggattacttttctaccaacagatatggggcacacatggtggctagcacccccataaggccttcgtttccactaggccctcaggaaatttattcaacaaagttggagggaattgacccaaaagaatcaattgttaatatatcgtttgtcctcttagtagttgccttcacgttgttatttctccaccctgggtttgtaactcttacactttttccaaacgtatgaagtcttctgaaaatatatttttaaattaatacaatctttttatattttaagtctttgtttttttttttctgccagagaactgatggaattgacctcataatcactgtcatgtgaaagagtgattagatatatttcttctttcagcaaacacctgttgagtagatctgcatccaggcagtgtcaggtgtagggggcagggattgcgttacgcgtgagtcagggttgcggccctgaggggcttccagtaaggagtcagtcaacctgtgaaaacataaattacagaataatacaatttgtatgcctataaagtggctgccgggtgctactaggtttgtgttatcatttgaagtgacagtatctgcccaaagaaaagttgttgatatttttgttgatattaaaatatttttgcctgataataaccaggcagaatggatgacttttaaaattataccatggggttagaaatggaaaagggaagggcttaggactgagtgaagataccacaccccagggacattgcctgggccagaaagtaacaggaagcttagcagcccggggaccctgactgctttgttagaaaatcagcctgatctgccacctgtgtgatttctaataagcttagatgtgagtgtttccaatcctatcatcctgcccaactcaaaaaatgttaccacttgctagcagcatcggtttgtggagttggggagaagtgtagtatgagtcaggaaaggggtgggggtgttcctctcttggaaacctcctattgtggccacagatagaaaaacccaggagggtttgggggtctaaaatcaggaggggtgggggtctaggtagatttttaaaccccttcattctagatactatttcctcacataacataataggtgttgcataaatcatattcctaacctctgaagttttagagggccaatatttcattttttatctttgtattcctgttgcttcattcataataaatactcagtagaagataatggatcacttgaagactttgtggagactcacctgatagccattagcaatgattctgggccaggcacagaggctcacgcctgtaatccaagcattttgggagcctgaggcgagaggatcgcttgaggccaggagtttgagatcagcctgggcaacatggtgagacccctatctctacaaaatatttttttaaaattacttgggtatagtgacatgtacctccagtcccagctccttgggaggcagaggcaggaggattgcttgagctcaggagtttgaggttgcagtgagctatgatcatgccactgcattccagcctgggcaacagagtgagaccctcttaaaaaaaaaaaaattctacttcttaaaagaggctcttcagtgatgttgtagagatcagctctttatctcctttgtagcacttccctcaagcactgtttcgtttgtttctttgcttgtctcccaggactagaatgtttgctttccaggagggctaggattatagtatactctcagtgcccaacacaattgggttttcacagatatttgctgaaggaaagaagaaaggaagagagggagaggaaggaacaacagcagctttcaaaacccttttcctctgtgacacaatttaggcattgaggagaatgcagaggatgcaacacctttacttacgaattagctggttttgtctggctagattatgaagggccagaggtacagtctttgtcttttcccacttccccagtgcataccaccgtgcccccacacaataagatctgagtaaagattagctgaaataagccaaggaaggtggggagagagatttaaaattttaatcagagttaagagagtaaggaaccctgtaaatctggagagaacaatgctaaatatgtttctgtttaaaaacggctctaagatttcctgaattcggatcgactcttacgtaattagtatacaatacctaactgcaaggataatggtatcaactaatgaattgtcagcctggtaaaatgatctcaagccacacagcacaacttatacatttcagagtccgtatcaatttgcataaagacttggactttagccttgccagatttgagcatcacttaaagcatcacttgcaaagataattggaacatcacttaagaaaaatgaaaaaactgttgaatttcagaaaagtgagttgtaccaattcatgatttggtgaggatgccatctgacctgacagtagtgtatggggattaaagaggaggttttggattttgttcacacctcctaaatgttaagtgcattctgagcaggcacaccgcattactcacagtgggacccaaagcaaagccttagactcaacaaggttacataactatgggtttttgaaattcatggaatttcattagtgggttttaaaaatattgaaaagagcattcatgtattgagtttcatttttggaagcagaatatagatcagggaaagtggatgattccctcctatctgcagtggtcacacatcatcaggagtgctttagaagttcacttacaaactaggataacatccaaggtggtgaaaggtgtcagcatcttgttatagaaaggacaggtggaagagctgtagacacttagttgaactgttatctgaaagagtgattagatttaatctgttgctttagggaggaatgggcatgcttgtatgtatatggtgtgtgcattgggagggggtgtatttgaataagtctttacagatgcagttctgctgtctgttttcactggcttttgtttatggtagtttgacttcttgtctgcttttgatttttgactgtgagccccatattccttagaagtttatctgtaggaactatttgaggcctaggattgaagctctgttctttcagggaagatctgcttttgcttctgccaagcacctggggatacttcagcccaagtgcattttatacctagtccttacttatgggttttttgccccaaagtagtgtgtgaattaggattgcagaactgcatgaggtccaatctgttgttacaaaatctcattgtggattttttccctcttacagctgtatcaagatttatgtggtaaaaagttgttactgaattgtaaaaatcaaagcttgtgatcatcaggttttggcaaatactctcaggaaaaaaagccaacttcagtgggtacatatacattcctggattcccactttcagttactttttggccttccgaaatttaacattcttgctagttcttagatttaaaaacatttttaaataaatatttcacatagtctgtttacttgtctttatttatttatttgaggcagagtcccactctgccgcccaggctggagtgtagtggtgtgacctcggctcactgcaacctccacctcctgggtttaagcaattctcatgcctcagcctcccaagtagctgggattacaggcgtatgccactatgcctggctaatttttgtatttttagtagagatagggtttcaccatgttggctaggctggtcttgaactcctgacctcaagtgatccactcaccttggcctctggaggtgctgggattacaggcgcgagccactgcgcccagcctacttgtccttaattggtcagtcagggtaccaaaaattgaagtccatctatttagtgtagagaactcctggtaccttgtaagataggaattctttattattgtcagcttagtgaccatattttggtggggtagggagatgatataggagagaaccctgtattagaaggttgatgtgtaaataaccttttgggtttctttcaattataaaagtatatagttttagctaaagtaatcattttttgcttctcttgggaatttaccattttgaactagactaatattattcggtgacatttaaatctgtttcctctaaaaatagaagttgtgaatatctgtcagttattagaaaacactaaatttacactagaagtcatcttaatccacaatgtggttttgaaagcacgttcttaatctgaaaatgttgaacaaattagattggcactttagccctcactgcaatgtaaacacaaatggaatatttgtagatggttgatgttctttgacagatgttgcattttggcagcagaaatctgttaagatgctctacggtttaaattttttctgtcaaggatttagtataaagccccttttcctcttctccttctgtctgactttgtctcatcattcaaaatccaccttggtcatctagttttctttctcatcgtatctctcagtgaatgaaccattagatgagacctgctggtttacggacctgttcctgtcttcatcagtctgagttctcttggctttgagaaacaaaaaatttagattgcttaataaaaagtgtgtttgaaaaacagagcggtcagctttctgtttactaggttaggaactctcatttcagctcagtaataaactgttttatctgactaaaaataacttcccattaaacaaagcagcttcccatagcactgtctctaaactcagaggcaaacagaggaacttacaagtttataagtactgtgcgccagtaaatgtacatttacaggactccacacaggactaagaattattacctaccaataaaagagagcagtttgaaagctcatgtttccttggaacatatactactataacagatatggtagaggtacctatagagatttcaagatatttttctgtgcattgcgagcattttctctctgtatggttgtctgaatcacgggtctagtaaaagagcagaatgagaaagaacttttccctctcggtgttacataaacgatggctggccagttggtgagcccaccccattgactgtcccagcccatgggtgggttaccaagtgaaccaggctccttagattaaagtagcagttctcaacattttataatactttcaggacccagttaaagactcttaaaaataactgaggactcaatagcttgtgtattttaattcatttacagtagcttacgtattcattgacagtaacatgtattaattcatacccaatagcttatgtatttacttacaaattataatgagcacattaatattaacatcagatcagtgatatcacatgtcatgtaacatctggaagatgtcactgtataatcacgagaatgagagtgaaaaggcaaataacatattattatgaaaaggtatttggcctctgagaccttctgacagggttttgagggagcatgtggctcaaaattgagacttagatagctatcaacaggaataatctttccacatatcaagatggctgctggttttcctgcaagaagaattcttgtaagtgaagtctgaaggtcataattttaaaacaaagctgtatgtgtgccacatacactaatacgagagcatggaagctgggtgggggaatgcagtttttattttcttaggactttggccataaaagcagtttatgagcaagaaagcttgctaacagtcagagacatcacccaatccatgccaaagctgcagaacagaattgaatgagtttactcagcccccacacactggaggaagtctggaaggtgagtgatacgtggatccactggagcctgcctgcccacgtctcagtctcgaagcctgacaggcatctggaggaggtcaggatactgaagcataatcctcacaccaaacatagagacatactgtatgggaaattagttctgtttcaggtatcagaaaagcatgaatagaaggcttatgtaattcggctagtaaagcacaatgctctgagaatatgcttatgacactttggaagtcaaagtcaaggaatctaagctggatattaaaactcaaagctaaaattaactataaaaaagctattaaatacataacatacaaaagtggccaaattaatagcatagttcaggtcaatccaatcaaagtagaggagatgtagttaattgtaattctgtttttgtaagtgatttagagtggggctggtctttcctcttccaccacccttttttaatactctcaaataattttcagaaatagtttgtccttctccatactacaagttgtgaatatcttggtgcgtccaaaattaattttaaaaagttaattccaattcccagaaatcctaaaagctaaaataatgttgacattttacacagtcccaggtttcaaggctaaatgtgttgtaataataaatgcttagtttttctgtttcctttatggcctaccagcccatgagacagaaagtgatgtttcttaccattttatgcagctgtatcctgctggttgttttgtaactccaaaattgttaagtagcagaagaactcatcatccattaataatacctgctgaattattcagagaaatccttaaccagaataaatggttatggccatccaatttctcctcattctcactttcccatttctttttcctgtgggtaaatatcttagactttcaagcctaggacactgttaaaacattcagggaaagttgaatatccaaatggtttttgttgcatgtgagtttagaatcaatgattagcttggaattggggtacttactataagaaaggagatgttttattgttggtgtttgactgtttaataaaactataatcatccaagaagtattataattgcacttattgcaaaaaggtctaccttttaatttctttttcctggggcttctcacaggagtcttgaggcggtgtttgtattcagtatctacactaagctgcttacttctttgtgtggtttttcaggaatggccatttgccctcctggaaaatgttatcacattcacctcatcatcttgttcagagatctctctcacactcactcctggtcctgaggatccttctccaccccctcctcccttatagagttgcagaacttttcctacctgacctctctcagcacctttaatccctttccaatcaatcccctgttaactccagaacatcagaaataggaaatgattaaattggagtgggccaagtgatggaaaatgtgttgggagactcttcattataagtgctgctgaatggctagacttttttaaccatttgcttataatacttcgatcacagtgaatcaattcattattcttgataactccagaatggtcttatgaagatattactatggccatgttattcccctatttaagactttttgatgatacctgttgcctatatgatattgacataaccacagttatgtccctgtacttttttacacatgctgttccctcagcccagaatgcaggttctgttgatagggattttggtcattgtgtcagaatctcttctgtacgccaggttttgaacaggcctctgtaaatgccctggcttgatgtgactggctgcccagtactgctttgcccacattgaacagggcttgattacatgaaccaaggtcaactaactaaatcctttggatttgccatcccttttttccacagcagtctgagctatcagctgaagaaagtccagaaaaattaggaacctcccagctacatcgccggaaagtcatttccttgaacaaacagattgcgcaaaagaccaaacatcttgaagaggtcagtgttttcttttcgtaagtttattcaagatcttcatggtagattggttaaaggagattccagaacgggggttggcatactgtggtgcttgggccagtccagttgccacttgtttttgtaaattaagttttattacaacataacacatccatttgtttacacattttctgtggctgctttcaggctacagtggcagagttgagtagttgcagaagaccataagacctacaaagcctaaaatatttactatccagccctttgcagaaaaaatttgctaacttctgtcataggaaaagatcacagggcaagaataaatagcattagttaacaaatatctaccgagcactactgtgtgctaggcactgaactagctattgggatgaatgaagaacaagttatgatccttgctgtcaaggatcttaacttctaatgagaagttaccacactcatcgtcatttaattacaggtgtgttaaatgcttgaaggagaagtctaggaagctgggagagtgactaatagggagacctgacctagcctcaggtcacagagttctgagactggaaagatgagtgggtatttccaggcaggaagtctgtatgggctatatggacttacagaacaacatgaacaaagaccagaggaggaagggtcttagccagtctgttttgtggccagggagtcatgaatgaagacagttggttggcagtgtctgatcaacaggaccatccaagccatgttaaggacaacagaagccattgacgtgtttaaataggggagtggcatgatcagaattgcatattgtaaagaccattctgtttgctgcaggagcatgaattaactggacttgggtgagaaggaattcagggacaacaggtaggaggctgatgcaatagtctagacgtggactgctactattgatggcagggaaatggaggaaacttgatcatttttaaaagagctgtaggagatggtgttctgtaatacctggtgatatgagactgttttagaaagaccttcatatatttgccctgaaaagtagacctaagaggaagctgggaagtttgactcagcaacagtcattggacaataaaaaagttatatgcttcagttgcattagcaatagattagattagaagaatacacgtagaagaagattaagagaatgaatatgggccaggtgtggtggctcacgcctgtaatcccagcactttgggaggctgaggaggggcagatcacttgaggtcgggagttcaagagcagcctaaccaacttggagactccctgtctctactaaaaatacaaaattagctgggcatggtggcgcctgcttgtaatcccagctactcaggaggctgaggcaggagaatcgcttgaaaccaggaggcggaggttgcggtgagccgagatcatgctgttgcactctagcctgggcaacaagagcgaaactccatctcaaaaaaaaaaaaaatgggtaccagttggcattttgagcttgttagtttttagttagtcccacatatttaaaaggtattaacctatcaaatggtcctgcccaatcatttctttatttgaatttgttctattagaatttgttctaccatagctgaacaaataataggttggtttgctaaatgctctggatcaaagaaggatgaaaagatagcctatgatttggtttctgttcagttatttgtttagacattttaatgagttgtcaactcagacagtatcatccctactcctgacccctgctggtgataagaatggttcaaaaagaactcatcacagaatcaggagcaggagacaaggatgagtcttccttattatgttgtctttatctctgagggaagatagttttgagattattgtggactccaggagccagagtatcccagcaggaacggacatttgcttctaccttctgtctaaacctggggagaagcaatactaagcctcaacacaaatggcagtcttgactcattcttggtccagctgacagggcaatcctccctgactcttgagtctgttttgcagttggttcagaacacttttacccagagtctgttatttttcaagcatactgcttaacatagcaggctgtcatttttcaagcatactgcttaacatagcaggctgtcattaaaagacaacaatcattattgcaatgtttaatgtaattagagatgatgaccagcacatggagtaatccctgaccatgtagctaggccaactggatgaggaaaatgaggtagggaagggagagacttgctcagagtctgtgttccatgtttctgtgtgtgtgcagatatactaaacacattttccttttgtttctgtcagttttcaaatgtttcaagtgctttttttaaattgtagggataagctgaatataaattaaatagtatagaagtatataaagataagaataaatagagcaagctactatttgtgtctgctgtgtttcctggcaaacctgtttttaggcctttgcaaaaatgtatgccccttcacctggggagagtgacttgtatggttacaaaattgagtttttatttcacttattgtatcacagacgtctctctgtcagtaatagtaattgctaataagtgctttgttactgcttagtaattactatgtgctttataaaattaactcattcagttcacacagcatccttatgaatgggaggtactgttattttcctcactttacaaataaggatactgagacacagaaattaagcaggctgtctatagtcacatagcttgttagtggttgaaccaaaatttaagcaaataaatctacctcattctttttagtgactggatagtgtgacatagtatatatgtaacacaatttatttaacttgttccctaacttctcaaaaaatgcgtttttgattttgctagaaactattgagttgttcatcaattattttatcaatttatacttctacctgtagtatgtgagggattccaaactctttacatcccacagcctcttttacaaggtcatacaggcagaaggcatctgagatgcatccttttttaggcttttacagacacgtatgccctcacctggggagagtgagttgtatggttacaaaattgagtttttatttcacgtattctatcacagacatctatctgtcagtaatagtaatggctaataagtgctttgttattgcttactaattactaagcactttgcaaaattgactcagttcgcacaacatccttatgaaggggaggtactattattatcctcattatacaaataaggaaatattagtccattctcaccctgctgataaagacatacctgagactgggtaatttataaaggaaagaggtttaattgactcacagttttgcatgggtagggaggcctcagggtaaatttagaatcatggcggaaggggaagcaaacatgtccttcttcacatgatgactggaaggagaagtacaagcaggggaaatgccagatgcctataaaaccatcagttctcctgagaactcactatcacgagaacaccatggggtaaaccacccccatcatccaattacctccacctgatccctcccacgacacgtggggattatgggaaccacaattcaagatgagatttgggtggggactcagccaaatcatatcatggtccaatgagggaatatgcaaaggaatagaatggagtacaggtggtaggtagctaagaggaaacctgagagtgatgaaagaaagagaaatccagagaggtggtgttaaccagcagctgaatttttagagtaagtgtaggggttaatgatgaagaagaaaatagaggtaagagaatcctggaggactccagcaagataaaaactaagctaagctactgggacacttcctatttaagaaaagatgatcagatgaagaatttaattgttagttaaattaattaaagaaaagaaaagagatgagccttttcttcttagaaagctcttacttccctgccaagatccatctggggtaagtctttgttggtgaaggtttcctgaaccccctggtgagggagctaactctctttccttgggcctggctctgccccatctcttctcatattttaatcccacagttacaatgtcatgttcttttctttctcccatacacctcatttgagcagagcattgggtaaatgtcagatgagtaggtgggtgcaggggtgagaggctacacaagaaggtgggtgaagcaggtgggaagatcccggggacctttcctagagccttgtcttagtccatttaggctgctctatcaaaataccttagacgtggtaatttgttgcttacagttctgaaggttgggaagtccaagatcgaggcaccaacagatctggtgtctgatgtccatagatgatgccttgttgctgcttcctcacatggtggaaggaggcaagggagcccactcaagcctcttttattttcatttttttgagacagggtctcactccatcatctacgctagagtccagtggcatgatcataactcactgcagcctcagcctcctgggatgaagcaatccttccacctcagccttccacatagtcgggaccacaggaacaccaccatgccgggctaattttttttttttttttttggagacagcagagtctcactttgttgcccagactgagcctcttttataagggcactcatctcattcacaaggctggagccctcatgacttaatcacttcccaaagaccccacctcttgaaactgtcatattgggtattaggttctaagatacaaatttggggcagacactaacattcagaccatagcaaacatcaacagttaaaacactgggatttaaagagaaaactaaactttttcccagagtacccttatctcccagttacacaaacagactaataaaagttgtcattgcacagatggctctctttgaaaaggggggcaccagaacccacctgcttctctctcctttatcacattgctctcagcttgagttggcttcttgataggccttgttggaattataactatttatcagtcatgaagactagtagctagattggagtaatgatttctgaaggtgacataactcttaataagctgcttacaggcccaaggatggggcatgttactttgaaataaccattgagatataggttaaaatttctcattgttaacttgaacccagttaataacaagtttgaaggtggttttctgccttgtatccttcttaaaagtgaaaatacacaatccttttgagcatttaaaggaatgttttcaaatttctaaaagttgatagacacaaggatatactgttttagcaagagaaagggaattgactttttcaagatgtgagtttacagttatgtaagttggaacagtaaaagtaatttattttcattctcttggtgttgaagtcctgaatcctatcttctatgtgtcatcatttgccaaccagtcttatgctgggatctcaagtgctgaaatgctgtttgtattctgcaaacaggcaagtgggttaactgcattgattgtagccccactgaaaagtcagagggacttgaatttggatctgggcctcatcagttatcagctatgggactttagtcaaataaacttgactgctctgagtctttatttcctcatctgtaaaataagaaaagtgtcttttttcactgaatataaagattcagtgatataatttatgcaaaattcctagtacatcagctgacatgtacttggtgctaattaaatatgaggtttttttcttcatttgttgttggcaacccttttaaaattttcacatttgctcagtttaaatctttctgagctttcattttctcatctgtgaaattcacatctgtgttgtcataaggatcaaatgagagcatatgtcttttatctttcatttacagctgcgagcaagtcacaccagcctacaagccagatataatgaagccaagaaaacgctgacagaggtgagcagatagattctccttcttctgtgggcccttgtcaagaattgtttttgacctgaaccactaatggaatgatgtgtttcatcggtctgtgtgtgggagacacgatcctgttctcagaggctgcagtcattttgaggacataggacagttacatggtagtgcgtgacccatgtcatcagtttgcccacactgcacattctagtcccttagtggtcttggtgggaggggtctctgtgggctgcgagggtcaggaaaggcttcctgggaaggtgagcctgataggctgggtggggcacagagaagaactcacagtgtcactcagtaaatagctcctgcccctcaaacagcagcttgtatagtaactctaagatcctgaattccttgagagtgagatgtcttttgaaagatgagagaacctcagagtgatataattgttcagaatttccagttatctcctaggcagagtgggggaagggctgcaggaggagaaggagggctgggagtgcatttgaaccctgcgattcaatctgtagtccaggttgcaagtgtgctacttcacatcagcattgtcgctgctcacttcccacttgtgattgctgaacagacacctctgctgccacctctgtcatgagcagtgtgtagatatttctgttccttggtttccacagagaactatcctcatccagacttgaaaagctgtcttccttgtgattttggtgcttggactatagccgtactatggaaggacctcgctgcaaggtccctacctcgtacttcctggacgatttggaagctaggatcttcaaagacgtctccgaaaccaccccagtatccctacttttctagaattcacatgacatttaccaatttaaaattcttactctgtagcgatatgtagcacttaatttgccaccttgatgtaaacctgacaaagcttttcaattctggtctggactaacctcttcagttattgtcagaatatttcaaaagggcaggcacatgaatgtcaattagaataatttttttctcattgttcataaagacgcctgccttgcctttggacagattagcttcctttacattgctctgtgactgcgttccttacggattagatggcaagctctgcgggttgggagccctctgtgatattttaatgccgcagagcccctggcatgaagtttgccaattcgtggatctgtctttgtataataatctgaaagagattaaaggcaaaatatcttgatatcagctttctaagacatttatatgccttaggatataaactatcagtgacttataaaggagctttttatactaaatactaaatcaagtatttgttgagcccttttcatgttatagaaaggtggagggtgtgatttaagtcagtaataagactatcctcaaatgaaaacagcagccaacattgctctgggcatatcattcctgcagtcgtcgttcctttttgcagatgggaaagctaaggcagagaggccatgcagccgggtgtcaggattcaaatacaggcagcctggcatcagagccctctctgggagcttactatctaataggaaaatcagactaattcccatctagaaaaatgggaagctgtataaaacctagtactgaacaacttctgaagaagcttgatttggtcagcctgtgcataattaatgtttttcacctctgggcctggttctccttacctatcaaggttaggagtaagcagaatgagcgctctgaaccctttcattccaggcttcccagatttgacctcttcagcaaaacctgcccttccaggataacctagtggcactgaaaagcagagaggacttgtgtctttccagtaaatctgggaaaagtagagctgggcatggagggttgcagacagcagtggtgcctgacacctgtgggggaggctgcatgactgcttcagaaaggccaggagattggctgctttgtaacttcagcagtcacaactctaatttcgtgtgtgtgaggctgattgtttttatgcagtattcttttatgtctaagtacattaattgtatctagttttgcttgctctgtaactattaagatcagaattgacttgttgaattgatacatcttttttaaggttatgtctgtcttcagctctttgatgatccttggttatatgttcatctttaattttaaaatttcgggttaccacctctgtggatccatgcattttatgcagcccacttcctgtgtttattctggaagggatctacctactgtttgctgagatcagccggtagtaactgatgttctgggtcggggaactccccatttctgctgggtatcaccaactatgtgggaccccgccctgcctctgagacttaagcaccagctcttgtgtttaagagagtcaggtttcattgcctagcctatgtggctattcctaatgcagatccccaacactgcacaccagtccttcctacgtctgctaactccacacagcttcttcctgaggccattcctgtctgttaaccatcctttttggcctgtgaggttaaactcttgtgttctaatgtaatagtctggatgtttgggggtcttagggcaagaaggggtggctgcaagttgtgcttagtctactattttcaactagaactcttggaacttttttaaaactttttttttttaatttttgaataagtaacacattcacatcgtacaaaattcaaaaagtacaaagggtgtaggtttggagaaacggtgttttcttcactgaacagtagatactagagatcattgtaaaagagctactttattcttttttaaaatattggcttagtattctgttgtatgatgtaattacctactttacacattaaaatccaagtttaagtttcttctttaaaaagtgtcattatctgcctcacaaaaagaaggtgaagttgttcacctctgctaccaaggctccagcaaccatgtcttcattctctcttgcagctgaagacttacagtgagaaactggacaaagagcaagcagccctcgagaagatagaatccaaagctgatccaaggtaagaggtttcagcatgcgcttatttttgctttgatgaaagtgactttgctgatacttgttggcttaatttgtttaaacacagaacaaagcagccaaaggctattggtctggcccctgcaggtcagatcattttactgttcatccagaaagtggtgactctgccatgctgagatgtgcctgggctgccctgggttagtcacctttttcccaataccccttgtgtacagaagcagcatagttttttgtttttctatttttcaaaatggtcataccttcatagtacagaaaagggcatatggtgaaaaatcttcctcccactcctgtccccagccacccaattctcttccctagagttcactattgttacaagtttttaaacagctcgtgcctccttggtagaaaaggtgcagtcttttctgtcaagacacagctgctgctgtagttgtttgttctttcatgtagaattaattgtcattagagcattagaggagagaaagcacttaacatttgacctttttagcttcagactatttgggtggtaaagtctcctgggagctgcttatttgaatgagactatgaaatcaaaaagttgcaggcacagaatgagcagtacttgtttgatgaacatttttagcaaaaagtacccacaggtaacttgactctataattagaaacctttgtttcatgaaatggagcaaagcactgtcagatagttgatatttttattgtcaaattagtgcttttaatgaccttaagcaacttgtttccttttcagaatggattttaaaaatagttttcaatactgtatatgccccgaatacagttgaataattggtatcattaaatatacctggtactattgaaactcattgatgtttctatagttgacattttaattgtggaatctgtaatgttttcttggatccggcattgatggtcttgggtttataaatgaataataatgtcagttaaatggaagtcattatcatttgtgcagaatctgtgagacactcttagagctgagaaaggaaattaaaaggagagtccttttttagctgcggacctgcttttagctgcgattcataaaatcataatggcctgccatatgtcatttttttgtcttttctcttcagtatcctacagaacctgagagcacttgtagccatgaatgaaaatctgaaaagtcaagaacaggaatttaaagcacattgtcgagtaagtgttgtttggtgtcagcaaataaaccaggacgcttattgaatctcttggtttacctccgttgtcctgttgtggcatcctatccagtgcagtttaaaaagcagattcggccaggcgcagtggctcatgcctgtaatcccagcactttgggaagccaaggcaggcggatcacgaggtcaggagatcgagaccatcctggctaacactgtgaaaccccgtctctactaaaaatacaaaaaaattagctgggcgtggtggctggcgcctgtagtcccagctactcgggaggctgaggcaggagaatggcgtgaacctgggaggcagagcttgcagtgagccaagatcacgccactgcactccagcctgggtgacagagcgagactccatctcaaaaaaaaaaaaaaaaaagcagattcatccagcagttatttgtcagttgtataagctgaatagagcaccatggttagtaactttgtgccaaaccccaaaacaaacaatgtcacctaactttggtatttgaaagaaaagtcttatgaagtttttgcaaaaatatattttgttgacagacggcctttgtgaaaagagtaacatcatacaaaaccagggctgtcctgaaaacctgggatgtctatgtcctatgtgtaagtcctggctgtcatcttctggaaacttgtagtctagtcgtgggggtgatgcgtgttctggcaactctagtgtgagataggaaatgaggcctggcaagttctgtgtgagctccaggggaggaaaaggcacttcagcacaggagccaccaaaaagctagatcttacttaagggccaaggaggacagcaagtggaggaggtacttgatgaggcagagctccaggctggaagatggacagctgaataaggttgaggcctgctggagagaggaaacagacaagactaactggaactaggctctagatcacttgttcatttcaatgcccagtgattactgtatacctcaccagcccttcagaaagaaggacctcttttgatggaggaatagctgcctgtagcctcctgaaaagaactttcccaggctgataattggagatcagggcagctacctcattagcttttcgtcccagaataaactcatgaaatgtgaaaataagacttgtggaccaaatagttgaataattgcgtctaattactccttgtctgaattttgtaaacgttcatgtcacttttaaaggaggagatgacacgactacagcaagaaattgaaaacctgaaagctgagagagcaccacgtggagatgaaaaggtaaaggctctgaattagtccttgagactctcaggtgctattacgggaaaaagatagttctagaggaccaaagagcagaccgctgttgctaacttatcctgtaaatagacattcctcaactgttttccttctgtgaccttcttagatttgtatccatctcttctctctttcctctgggagtagaaggcagcagagggtgtggaaggcagcaacccagacacgaattaccagattacacaattctggcctccctctgtttagggagatgtttctgggaaaagtctgagctctatttcctgctcacccgttccttaaattttctgccagtttactcatttcacctttctcctttcctgctcagggataatgccccactcccaaaaggcagcaacaaacatgaagaaggagagagcagtgttggatttaacagaagaaccctaggcttgcaggagcagtctgggtttagggaacacacctggacagctggttctctgaacagaggacttgatcttccaaggagctagcatgaattttcactgaaccttaaattgtaagaaacagggaacttgaggcttagggaggacaagagtgtccagccaccccacgccagaccgcatgccctgctgcctggcccagaactctgcactggacagtgcccatggctgtacaggacactgccatgcccagcggggagacgaagatcttgcagggccgttatcactctcctgagtggttgcattatttcacccgagccatacaactcttcacatctgtgaggggactggcatgggtgaataggagagcctaggaggcagtggtatcccaggctcatcgtcgcacagtccacctctcctgttgtttctaaaactttaaacctttaaagctcaaatcatcagtttgagttttgagcctctgcacaaattagactcttaagatctcatttctcttttcagcacatcttgttagcgagattcttacattcaaaaagagctatacggtttactgtgttagtgtgtaactgacagacacctaagaacaatttaaaatctgctgctcatctaagggcagttccctttctgctctcttcagacatgctcgggggacatcaacacatttctcagctgcacccttatgcccctgcctggccccttcctacatctagatccttggcttctgtcttattcccgaatgctcaggagaggtgtttattatgttttcattgtttcagaccctctccagtggagagccgcctggtaccttgacctctgcaatgactcatgacgtaagtacctgcctgctcaggactggcattgtctcctgagggcaggcggccagctttccactctcctgtgatggcttctcatgcctactttaatgtgctctatggccaactccacatctaggcgttccagggcattgtcctgtttgatacagctaggcctcagatggaggcagggtctcaccaggaatggccctgaaggtcacctttctgatgggttttcttccagttctgtgtacaagcatgttgttttcatgctggcttctcagctgggaaggggagaggcctgcgttggccgcatatgctggtcaccactcgggctctgagggatggggtggtacagaggggaaaaccttctctctctgttgtactatataccagactcagcagactgtttctataaaggtgcacatagtaactctttttggctttgtgagccagctctgctgtagtgaccatagttgatctgtaaatgaatggacatggctgtgttccaataaaactttatttacaaaaatgggccacaaggcatatttggcccaaaggttgtaggatttagctcacaggctgtagtttgccacccacttctgagttaaaccagtgctctccgcattccaaaaccctccagaagaaagagataggaaaggaagtggaggaaaggaaaagcaggaaaactgtaagcatctgccttctttaagggttcctcttccctttgtaccctcgtaatctcccaggagaatgagcttcagcactcttccagtgaagtctgttggattttgcctgcagctgagccccttgggtgcgttgggtaggggggtgtgtttatattccctatgctgaggaaggaggcactcctttgaccccttttgtaactttctctgaggcgacaaaccatccagccatgtctcttaccatgtctcatccagccatgtctcattgctgggttcaatgagggactagtttctattttctatatcaatgctgtccaaaagaactttttgcagtgatagaaatgttctgttccgcactgtctgctgtggctagtggctatcacattggataacacagctctaagtagaaacatagaaaactagcatcatctccaaacacaggcatagtacaacacattctttaactaatgatttgtctctacatcatcataggtttttgcaggggaagggcatatacatttggaggttacttcacttaagaatactggatttgccctgggtcccagaaggaagagttgttataacatgatatgagagggtatcaagggtctcatatgagacaggacccagacagtaaacttgggcatttaagaagagaaatttaaggccttaggatgggggagatatgataaaaacatattcaactttcaaagactccattaaagagtgaaagttttctattcccagataattacagccttttccaatttttaggaagacctagacagacggtataatatggagaaagagaaactttacaagatacgtttactacaggtgagtaaaagaaggacaaaaatatgcataaatgcttctaactaggtataaatgtcctatgacataactagaaagtctcaatatctaagaactagagaaaataagtaatgaggctgctgttccccagtcttctttctatctggagtgtaactcagtgatttaagatgttggtattaacatctcacattgttggtatattactttcacaaccactcctttgagttaatcctaaccccaggtggagagtggatattacatcccattttctttatgaagaaattggcttgtttgtttggataaccggcagtttgtgagagtgacatcaaatatgggggagataggtttcaaaattagctctaaaatttaattcatgcagagtcaaaattacatttaaaatcccctacattgctgggatctggctcatggaagctcaaaagccaaaaattccttgtgtcacactttggttcaagccaaccttctgttccctgggagggaaaggccgggctcgggtaggagtggccaaaaggctgcagaggccagtgagagcccctttcccctctctctggcacctacttactttgctgagctgagagggttaaattagagtgagtcaaatttgtccttgttacagactactaatctttaaagaggcacagaactaaataaaatcgggacagtacagctgcatatttggaaactttttgactgagtgctttatatgtattcagcattggatcaggtcccagaactaataaataggatgacccatctcctggacatgctggctatttgagaaccaagacatgtctatatatacatcaaagttcaagggagattatgtgcaaattgctttctaagggcagcttcagactggctaggggaaagcttcagtaaagccagtggcttgctgagggcaagggcctgagttaggcagtggctgtagaatgcatggaaatgaactgatgggacagattgcagggctgtagctgatggaacttagtatcatctgagataaaaagaggagtcaaggatgatgctggaatttctgacacaagggtgaataatatttgtgttattcatagaggagaagcataaaagagaattaatggactagggttaagggcgagaggagtataataaataggagtgttaatgagatctgtttggggcttttcaaagttgggatactcaaccacattgaaatgtccaaggagtgctttgttgtcagctctgactcccagaatagtatggcctggagatttgggtgtctgcagtgttgatgaggactggggctgtggaatgtggaagaggccctgagactacaccctggtgagcacatgtgaggataggcagagcaaaacaagggatctcccagtgaagatgcgcctgagcagccagaagggaaaacaagtgcatgaggcttgtgggagccgagcagagagctcagctgagaggaggggaagtgccactagaaatcaagaaggctaggagctgagaattgtccattagatgtgtccctgagaaggtgtgcagtgactttggcaaaagcagttcagtggggcactggggagagcctagttgcagtgggttgaagagggactggcatggacagaggctcccatgtgcgtggctctcagtacatttctcttccctgtaaaagggaagagagaggctggtagctgaaaggtgatggcgattaaagaagggctttttaaggagtgaggacatgaatgtatttaaatgctgatgagaagggtcagtagccagtgaaaagttacagatgcagtaaaagactgaagagttgtatcttaagactcctgaaagaaaaccaggagtcagagcctgagcacccatggggagcgtagccttggcctaagggagaaatacatccttccctctccctggagctgcagagacccagttttggattaggtcaccagagctgaatgtgggtttcccaccaggaggctcctatttccccagtgaattagagattcacatctgctgctgcaggcgaagcaggcaggagagtgggaggatatggtggacaaagggatgcaggcacagaagaaaggcagcactcagagcccgcttggtctggagtctacacgtgttcagtgggagccatgcacaagtgagcggcttgctctccctgcagctgcccctgcaccatgccacaccacacagcagtgccatgcctcccagacccggtcagtagggcagtttcctgagtctgtggaagggagaaaatgctagaaagtatttgaggagtaggttgcaggagctttttaaccaggatgaggaatttgggatgtatgtggaggcggcaaggtggcatagcttcccatcatctgaagcattccttttgttgcctgtccctgcctggcagggtggagctggctattctagactccttgggggcctggtgggtagctgcaggctctgtccatagaagcccttcccattcagtatcttccctcctggtccactcatttggtgccttctgtgattcagttcacagtcacaccacctcccactcctaggaaagcgggaaagtcaatccaaatctgagatggggacctttaagcccatggcaggagtttgtgcctgcattgtagggcgcatggttgggctcaggtcggggtgcaggcaatattttggctccctagagaacatgtaaggccttttaccaaatagtactgtctctgtctcccttttgcatttaggctcgaagaaatcgagaaatagcaattttgcaccgcaagattgatgaagtccctagccgtgccgagctaatacagtatcagaagagatttattgaactctaccgccagagtaggtgcattgaccacagacaagctcttgaggctgggaagggacaggcgaggggtctgttccactttagcatgggggagcatgcaccagagcacagtccacaaaggccaccaccggaaagctccgtttcatcagcaggcccacttggcagtcccgggagcagcactgtggtgctctcactgccctctccgtggacagatagttgaaccagttgagctcttagactaaagcttcaaagcagccctcatcctggtcagccacacagccttcccctgagctcccacaccactttccaacttcacacggaacatcgtgaccctggtgtctagagatcagtcctcattcattgttcttctctacagactttgttgctgatgtggtccttaacccttaacagcatcatattcacccagtaacccaggaccatgaccccctcagcctgaataagagatcatgtctcatgaggctcagaatggccctcaaggctgccattgcctttttcttcctaacattcctgccacatctgctcttgcatcatatctcagctaaatgaccattagctgcagtgcctccaagtcccctagccacacatctgattctgtcacttctctctctgctaacaaatcttcaggaactcctcaggccttactgaatagagcctctttctttaccatgcctgggttcctccccagtctgagtggcctgcctggaggcccctttcctgatctgaaccctcactctggccttgccagtccacacactgcctctgaacaaaccatgagctttgacgtcttagccttgactcctcctgttcctggtgcctggatcctttttcttctgtcaggctaaattcttcaatacccaattcagatcctgtaaacctattctaggcaccccaccccaggcaagaagtgaccacctcttctccaggctcctactcttgtatgtccccatgatacctgaaactcaacaggtacaaaattgaattcggccctcctactccgtattcctcttaggcaaactggacccctctttcttctctgactcaagctgctcgccaattctgtgtcttagtaattttcaagtctatttcttctggactgcgctgtagccaccttcctttgctgcccagagtctaattagatctctttcaacatatatttgatcattttactctaaaagctgtaatacttaggctccctgcaacttcttgggtaatctttagaatcctaaatacacaatactaagtcctgcatcgtcttggcccacttcacccagcttcacccctcttgcacatctgcatcttggcctgtgagctggtacctgagtccatagtgccattatcctacaattcccacttggtatttcaaaatccacctaagattttgccttgaggacttggcctctccagcatccttcctggtagagcactggctctattggaggagatcagatcacacttccttcatgtgcccggccccactaggctgggatttcatccagtcctcacactggactcaaatgatcagaggcagggatcagcagtgacagttttcagcagaaagtagtttctgctttaagttaaatctttccctttacttttctattcctgcttgtttcaaagcttttagcaataataatacctgcatctatttatttcacagaacaaatttcacacaggttaaaatcatctgataaagacatgtttacactaaggacattttcaagcagttacatcaaaatacctgtatcaatgtgttattatcaaatatctacaacccccacccagttctttggctggatgaggtaagggtggctggttcatttatgggagtaattctcaactttgggtactcactgtcaccacctgggtcccaccttcaacattctcctttcattggtcctgagacttgttaaaagcttcccaggcaattcagtttgcacgctgtggggtttctgcagagtgagctcccaggcctgacaaagttgtcctggcagtgcattcatggaggagaggggcaggtagggtgttctgatacctgttcttattcgtgtgctgatttctttacttttacagtttcagcagtgcacaaagaaaccaagcagttcttcactttatataataccctggatgataaaaaggtttatttggaaaaagaggtaagaacatttataaaaagaaaatggctaagcagctaacagtgcagttgactccaggaagtcaaatgaacttgatgtttgggacaggtatgttcagcattagcagaaagagtgcctattttatatgctaagtgctggcatacccagtcagaaagtgcaagattccttgggaacccagactgtctgctgtgaagtgagactggtagacagccattctagagtgctgtgggggaaatgccattgttaaaaggaacacaatggaagctctggagttggtgagactagtttgagatttaaaggaagggaggaaccagctgaatgaaatgggggtggtgggcttgttatagtttacagggagaaaatacctgtttaatcatcagtggccgacaaaggcgtgaactaaaaggtttgtaaaattcaaagcaggggtgaaagggtcactgtcactcccttcgtcttttttttttttttttcttgtcttttttttcttttattattatactttaagttttagggtacatgtgcacatttgcaggttagttacatatgtatacatgtgccatgctggtgcgctgcacccactaactcgtcatctagcattaggtatatctctttttaacatttaaaaactcaggttaaattaatggctcagggctttcccaagttgatgacaaacggttggagcacagtatgcagatatgtcttaatttaaaaaagagaacagtcctggtcttcaccatggcagcatagtgtcctgaagagaacacgggctttggcgtcagtcagatttgggtttatttgggttttaatgtggcctcttttttctcacctgtaaaatggggatgacacctaattgcattgatgatgattataatgcggacagaatgagaaaatgtaaagttccttacacatggtggattctcagtacatacttgttcctaccctccccctcaccttgaggttgatagaatgtgttttcattttgtcaccttgtagtctacactaattaccactttaataaggataatattacaaatgtatcttttacctgaacccaaattgaggcatctgtaattactgtcacctttactgcctgctgtcagacaaaccaggtagatctctgtcatcctagagggtgctccttgggaagctgttttatttttttctgtatccggggcttacacagtggtaggcgtataacagacatttgataaatgtttgaatagatgaatgcatttcatgggatttgcatcagacctggggaatagctctgtcccacatcctggccttggggccctcctacctggcaaaggaaagatttgccaaccctgacttagggataggccagccccttcccaaagaccttaaaccccattgaccttccttcatcagcagtgtttaaagttgttccactgtttaaaaactaggaatattgcgaggcagactggggagctgggctttctaattccaagccatgttaccagttagaatgttacatttgaataaatttggtattttattttaaatggatttatgcctgtgatagtttaaaaccttcctgtggagtactaaggacaagaaatattctacattgctgactgtgaacctaaagttcacatatggtaattacttagttctgaggccccaaattgagtagttttatggccagaaagatgacccaggtttccttactcctgcctcagagcccttcccaggactgtatcattggggcagataagaggatttgctgcggggctaaggcagtgtccacggggccttgaacagtgcatccccttggaggcactcagccacccagcagcttagcttgctgcattggcgagaagattctgtgggaaggaatagggtgtaaacgactctcactttccacactgtctgactcccgtaagctgttatccttgaaaataaagtgcagtgtttggcaagatagaaagggctgtggtggcagtttgcctagagagccctagtgttagcttagtgtcctctcagctgggatccagttcccttcaaagcaccttctccctacattcctgtgggaatgccctgtaggaagagggaattttctgtgagaagaaggtggattccctgaggaaatctgtgagacagaacatgtggctaatttttttttcatatgttactttaatcttcataaacaaggcatgtgttccttgcagaagcagtatgtggagacagccaagcttgcagcagttgcagtagtgtggaaatctttttgcctgtcttataatttcgtttgtttttttacttccccagattagtctgctgaactcaattcatgagaacttctcacagtaagtactgtcagtcctccttcccactaataccctgccggcctgcgctttgaattcagcccacctcacattgctataatgtgcttgacaaaggtacatgcaagacttaacactgggtatgtgattcttactcttttagcccttctgctaagtatcttgtttacactctccttgagtacctgcaaaactataatgatagtagagtgaaggaagagctgacgaaaaaagttaactttcaaatactttgactgtacccacctactaaaatctctctgtatgttatcaaattaatatttgttaatgaacacatagagatgctttaaaatttacataatggaatttatataattttttagattttttaaatctcatggtagattttttttggttaatgtgtacattgttctctaaaaactagatgtcaaggcccacctgttcccaaatcaagccctcaagcatgtccatttgcccacccaccatccagcagccccaggacttgctccttggagagcatgcttcccttctctctggcacaaatctctgctgtcctctggcaggcccttctctctggcacaaatctctgctgtcctctggcagatgacaggggacacattgtgactgacatcttattgagttacaggttctagattttaagcttcttttcttaaaaaaaaaaacaaaaaaccacagcttcccctggttttaggaaatctcagaatatgtctcccagtttcaagtatctgccaatcctcaaattttgtaaaccaaatgaaattcattacttatgcagtacatgccgtatttcaaataaataatgtttttgttaattttagtcacattttactgcaagaaaatacatattagttatgaaagttacagggaaagtatgacaaaaaagattaacatgcaattataagaccaggctaatttccatgccttctcagaggtttagcatccttaattgcctgggatcccaggggcccccgtggctccactgtgcgttacaaagacctgattgcctctcctaagagtcataatctggatacagagctgactgcttggcatttccccctgcctcagagtcctgtgtgccggtcataactctactggtttttctttcagggccatggcctcccctgctgcccgggaccagtttttacgtcagatggaacagattgtggaaggaattaagcaaagtagaatgaaggtcagatggcttcttttctgtaatgcagcccaggttttatagtggtgacagggaaggtcctgggaagaaaaggcctcttctggtagttggggagtgtgccctcaatcctgaaaagacacatttctacagaggtattcccactatgcgtcttactctgtaatgggcagggcctgtctcatgagctgcctacacccaggggttccaaagttgctgttagcagtagctcccaggtattgaacacctattgtgtaccaagcattgtgctgacattcctaaaagacctctgaagtgaacagtatcacacccattttacagatgaggagaccacctttcaccagcaggcttccgctcttgactagattcacttcctcggtggatctgtggtacctgacattccgccacaagagattcattccttaggaatcttaggatctcgagagcattttggttttcaggaaccctctaaaaaagagaaatcattgctgaactgagttctgccaaattgagaggaaattgagtctcagaagtctgaagagaacagagaggccccactcagtcagggtgcagcatgggattttcctacagagacagctgcagtttcctaccaccattctcagatgaatcctaaacagtacctccaaatatctcttgcttatggtcctgttttaaaaatgtatcacaccagagtggttctccgacatggcagtaaaatcttccggggacgttgggtttctcctcttacgatcttggggcagagggctccagtgagtgatgccagaatgtaaacacatgagaaagaaagaattgtccataggtcctgtcatcataaaaaaccctgttacagaagacaaacattcaagttgcctgtaatctcatctcacaagagatgagctaagggcagaagtgctccatatccctttccctgtagaaaaatatcattaatctctctgtgaatgacttcaataaaacgatgtcaaaggaggagaaaaaaagtatcactagtaacaagcacgatttctcaagactattcagccgtaaaaatgagaacgacataagtcagtgtttgcctatatatgcacactcacccaagccaggataggctgtcttgcagagggagaatgcagtcccctctcagtgacctggggtatgagtaggtggagggcagagaacctggctgaccaaaagcctctgacaacccaggtgtcagtgtgttagacgcttccaccttgccattgctctgcaggaagctgctctggttcatagtcaagaacaacaggaattcatggggttttttcctttgacttctgcttcgtgtttacagagagcagtgtaaacaggaagtggaggccaaaggaaaaaactccatgaattcctgttgttgactatgagccaaagcaggggaagaaatgggcctcaccccttcactctcttcactctccccgaggaggcttcatgctcttggcccctcagtgctgaccagtgtggaaaggcgctgctgtatctgtctctcccctccatggtgggtgccaaatgggtcaatggcacccagggcagagtgggctctctttctctggtctgcatccctggtggctgatgtagcacctaacccatggttaggccctcaaggactatttgctgaatgagtgaattctttcaacagagtcaaagagcagttctcagagagggctccagatacgctttgaatgttgaatgttgatagacactgtgaatggaacagcagtcacttggatggatgtgttttattgtgtttgtttaaaaaaaaaaaaaagctttccctgtaacagtgccttaatgggtcctgctctcatagatgtggcaggggagtctgtcctctcaagcacaggtttctcagaaccagcaggttcagagtgttacatagtagaccagcgctgggtaacaatgaccgaataggtgtttatgccccgtctgagggtttctgagtaaagaagaggtcacatatcagtcagcattttgacctcactcagaggagttaaggtctctggatctctggaatactgtgagcaagtgcttggcacaagcacttcacagacctagggtgtgaagaggtgataaggagggaataacaatggtacgtctgagtaaggggacactgagaagagtgtgaaaatgaagcttaaatcaaagagtcaactcctgcttctcatagtgagttggcattctaggatgtgaaatgttgagaagaaaaatggtctttattgagcagctactatagaccaggtgatggatcattcacttaccatttcatgtcccaagcttcttgtaacaaaactggttatctaggtgatattcttattttagctaaaggacgtagcattcaaaaaagttaaattagctgtccaaggatacacagtgagtggcagaactaggatttgaacccagcctttctggcctcaagctcatactatttctaggttgccacactaactcccacagtggatcctggataaattcataattcaagcgcattgctacctcactaggacataatcagtcacggtgaagtgttttgctaaagtgcagagcagagaggaaaggcctgagatagagctgctggctgtcctaataagagagagggacctagctgtgaggtcctagccagtgcagcagaaaagatgtctgctgctttgagagttggagcccacgaaggaacagtagtgggaactgcggtgggctggtgtgtcactgtgacaggatcatgagtgggtgtcagagacccatgcaggcagcattaggggttccatcgacagggatcaggacttgctgctgagccagggctccaagtgtggtaggacaccccagaggggactggccactctgggagacctaggcacaagggagggcaccaaactggagacctagcatgggtgtgcaccaggcatccgtatgcagacctgtggaaagagcagggcacagggtcttgggactcaggaactgaatgcaaggtcaggatttgactaggcaaatcagtccccatatgtggtgggtctttctctgaacagcattgggataggccttggggacaccaagttgcatttgtcctgtgtagtcaacagaagcctatagtgtggagggaactactgaataaaatgcagtcaattttacctatagcttgtgtttaccaaatccctcccaaagtgtaacacagaaatcatggtcaggcatcagcaaagccacagcaaagcatctctcagaatttgattcaacaagcttttgagcaccggccatgagtcaggcacccggtctgtaccgtaactcttactgccctcatttcctggctgattctctgggtttaccttccagacatacagcacatagcattgccagccctgctctagtgtcctcagagagcctctctgagcttccaggctgaggaggccatgcacccaccctcctctccgtcacctccccccgtgtcattttcctcacaggaccgatcagtgttgcgaatattttgtgtgtctgtttgtcagggtgcttgcttaatgtgaatctctagaatgtatgctctgtgagagcagtgactttgccatgttcaccactacacgtagctactcagtaggttctaagtcaatgtttgttgaatgaataagcttttggataccttagaaaagtctctttaaatcaaagcctagcatctatttatgagatcaaaatcctgaaaatatcctaaattgtctaccagcaggaagatgggtaagttagcaatcagcaggaatattgtattgtttttaaaatgataatttgtagaaaatttataatgacatggaaatacttacattaaatcaaaagaggatacacggttttattatatgagcacagtttttaaatcagggtttctcagcctcagcacagttaacatttcgggctagataattctttgctgtgggggtgtcctgtgcaatgtaggatgtttagcagcattgctggcctctacccagtgattccagtagcacccacttctcgcagttgtgacaatcaaaactgtctccagacactgccgggtgggggatggggggcaaaatagctcctagttgagaatcaccaacctgtccattgtgaaattgtagtgagaaaaaaaaatggaaacagttaatactcagtgatagaaaaattgctgaataaattgtagagcctccatgtaatatgcaaataaattaaccaacctcaaaaattatatattgaagcttcctctactgtaaggaaatccatgaaactgttaacaactgttgccttttggatgttgccagtagcccttgggcagaacatgtcttttcgtcaccatttcccacaatgtttcaacagatggaaaagaaaaagcaagagaacaaaatgagaagagaccagttgaacgaccagtacttggagctgttagaaaagcagaggctatactttaagactgtgaaagagttcaaggaggtaagaggaaggctgggtagcacattaaggctaacgtgagatatatgttcacctcaaaagtagccactaaaaaacagcagttttttggttttcctctggtctgtgaagggaaataacaagacagagtgtgatctggcagtgaagtgtggcgtctaggtagctgaagattgcgtttttctgtggcccatcttgaggtctaattaaatgttttaagacatcacatcactttagttttcctaacacttagtaagcacattaactcacaaaatgactccatcagtccgtatcaagggccacttggaaacagcatttgttgtggattcagatatagaatcttctttcctgccaatcttagggtggggagggacctcaagaagctgtgtgggaagagagaactttgaagtgtcacaggcttggattcgaatcctacatttaccacttaccagctgtattttttggcaatgacctaatccctcccagcctcagtttcctcattggtgaattccgttgcgtcaggtgagaaatttgaaacatccagcaccaggcctggcacctcctaacacccaacactcaactgaatttcggttttccctgtttttccttcctgcatttgggcagttactcttcattgttccagaaagaaaagtgcctgcccttaagagattttccaaaaagacttcatttggtcccttgctagggtctcagcagctttattttaaggaattccttctccctaacctaaatccatgtggtttcagtgagtttagagactgctgaaaatacagcagagttaaaggtagattgtatcctggtgtttggtctgcagaataaaaaatgtagtctttccatgctcataattttgttcttaatttaagacttttcttccttcctcatctttcccttgtcttctacgtatttccttatctgtgatttaacttctagaagccacatcccataggcatttcaaaatctcatcttttccagtgttccagctcctactatacccctgggcagatgccaggttgtaacgcagacctcctcctccttaaggagcatacgctgtggtgggagagacggatggcaagctaagaacaagtcataacaaataagtagtaacaattccagactttgccatgtgaggagactggtttaggtagtgtggtctaggagggccctctagggtgagcaggacctagccatcggaagaaagagttcttcagccacagcagtgcaggaatggggagcggagggtctgcggctcagtctgggactcctttgaggctagcacaggctgcagctgaggtcccagaagggccagtgagtgaactggcagggaacaattaggaatttgctgccctactcagagctcctcgttccctttaatcaaaactaacaaaaggagaagaactgcatctcaaatgctgcttggagacacccttttgacagtgtagaaacaaaaagcaagttgaggaggataagtataagctgtcaaagcaattgaaaatgaaatggaaaagctcattcttgccctgcaggctctcagatgagagcttaggatgacctccaaggcaccagttccttcagaggtgttaagtggcttgggtctgggttcccacctgtgctggcagtcattgtcacaccagacacagagggtggttccttcagatccagctaagacacctagaccagattcttgccaggcctctttccttcagtccaaagcaagtcagaagagggggaggggatgaaatatgtttttgcatatttcttttttttattatactttaagttttagggtacatgtgcacaacgtgcaggttagttacatatatgtacatgtgccatgttggtgtgctgcacccattaactcgtcatttaacattaggtatatcttctaatgctatccctcccacctccccccaccccacaacaggccctggtgtgtgatgttccccttcctgtgtccatgtgttttcattgttcaattcccaactatgagtgaaaacatgtggtgtttagttttttgtccttgcaatagtttgctgagaatgatggtttccagcttcatccatgtccctacaaaggacatgaactcatccttttttatggctgcatagtattccgtggtgtatatgtgccacattttcttaatccagtctatcattgttggacatttggcttggttccaagtatttgctattgggaatagtgctgcaataaacatacgtgtgcatgtgtctttattgcagcatgatttataatcctttgggtatgtacccagtaatgggatggctgggtcaaatggtatttctagttctagatgcctgaggaatcgccacactgacttccacaatggttgaactagtttacagtcccaccaacagtgtaaaagtgttcctatttctccacatactctccagcacctgttatttcctgactttttaatgattgccattctaactggtgtgagatggtatctcattgtggttttgatttgcatttctctgatggccagtgatgatgagcactttttcatgtgtcttttggctgcataaatgtcttcttttgagaagtgtctgttcatgtcctttgccccctttttgatggggttgttttttttcttgtgaatttgttttgagttcattgtagattctggatattagccctttgtcagatgagtagattgcaaaaattttctcccattctttaggttgcctgttcactcctatggtagtttattttgctgtgcagaagctctttagtttaatgagatcccacttgtcaattttggcttttgttgccattgctgttggtgtgttagacatgaagtccttgcccatgcctatgtcctgaatggtgttgcctaggttttcttctagggtttttatggttttaggtctcacatttaagtctttaatccgtcttgaattaatttttgtataaggtgtaacgaagggatccagtttcagctttctacataatggctagccagttttcccagcaccatttattaaatagggaatcctttccccatttcttgtttttgtcaggtttgtcaaagatcagatggttgtagatgtgcggcattatttctgagggctctgttctgttccattggtctatatctctgttttggtaccagtaccatgctgttttggttactgtagccttgtagtatagtttgaagtcaggtagcatgatgcctccagctttgttcttttggcttaggattgacttggcattgggggctgttttttggttccatatgaactttaaagtagttttttccaattctgtgaagaaagtcattggtagcttgatggggatggcattgaatctataaattaccttgggcagtatggccattttcacgatattgattcttcctacccataagaatggaatgttcttccatttgtttgtatcctattttatttcatcgagcagtggtttgtagttcttgaagaggtccttcatgtcccttgtaatttggattcctagatattttattctctttgaagcagttgtgagtgggagttcactcatgatttggctctctgtctgttattggtgtataagaatgcttgtgatttttgcacactgattttgtatcctgagactttgctgaatctatcagcttaaggagattttgggctgagacagtggggttttctagatatacaatcatgtcatctccaaacagggacaatttgacttcttcttttcctaattgaataccctttatttccttctcctgcttgattgccctgaccagaacttccaacactatgttgaataggagtggtgagagagggaatccctgtcttgtgccagttttcaaagggaatgcttccagtttttgcccattcagtatgatattgactgtgggtttgtcatagatagctcttattattttgagatatatcccatcaatacctagtttattgagagtttttagcatgaagtgttgttgagttttgtcaaaggccttttctgcatctattgagataatcatgtggtttttgtctttggttctgtttatatgctggattatgtttattgatttgcatatgttgtaccagccttgcatcccagggatgaagcccacttgatcatggtggataagctttttgatgtgctgctggattcggtttgccagtattttattgaggatttttgcatcaatgttcatcagggatattggtctaaaattctcttttttggttgtgtctctgccaggctttggtatcaggatgatgctggcctcataaaatgagttagggaggattctctatttttctattgattggaatagtttcagaaggaatggtaccagctcctccttgtacctctggtagaatttggctgtgaatccatctggtcctggactttttttggttggtaagctattaattattgcctcaatttcagagcctgttattggtatattcagaaattcaacttcttcctcgtttagtcttgggagggtgtatgtgtccaggaatttatccatttcttctagattttctagtttatttgcgtagaggtgtttatagtattctctgatggtagtttgtatttctgtggtattggtggtgatatcccctttattattttttattgcgtctatttgattcttctctcttttcttctttattagtcttgctagcagtctatcaattttgttgatcttttcaaaaaaccagctcctggattcattgattttttgaagggttttttatgtctctatttccttcagttctgctctgatcttagttatttcttgccttctgctagcttttgaatgtgtttgctcttgcttctctagttcttttcattgtgatgttagggtgtcaattttagatctttcctgctttctcttgtgggcatttagtgctataaatttccctctacacactgctttgaatgtgtcccagagattctggtatgttgtgtctttgttctcgttggtttcaaagaacatctttatctctaccttcatgtcgttatgtaccctgtagtcattcaggagcaggttgttcagtttccatgtagttgagtggttttgagtgaggttcttaatcctgagttctagtttgattgcactgtggtctgagagacagtttgttataatttctgttgttttacatttgctgaggagtgctttacttccatctatgtggtcaattttggaataggtgtggtgtggtgctgagaagaatgtatattctgttgatttggggtggagagttctgtagatgtctattaggtctgcttggtgcagagctgagttcaattcctggatatccttgttatctttctgtcttgttgatctaatgttgacagtggggtgttaaagtctcccattattattgtgtggtagtctaagtctctttgtaggtctctaaggacttgctttatgaatctgggtgctcctgtattgggtgcatatatattcaggatagttagctcttcttgttgaattgatccctttaccattatgtaatagccttctttgtgtcttttgatctttgtcggtttaaagtctgttttatcagagactaggattgcaacccctgcctttttttgttttccatttgcttggtagatcttcctccatccctttattttgagcctatgtgtgtctctgcatatgagatgggtttcctaaatacagcacactgatgggtcttgactctttatccagtttgccagtctgtgtcttttaattgaagcatttagcccatttacatttaaggttaatattgttatgtgtgaatttgatcctgtcattatgatggtagctggttattttgctcattagttgatgcagtttcttcctagcctcaatggtctttacaatttggcatgtttttgcagtggctggtaccagttgtttctttccatgtttagtgcttccttcaggagctcttttagggcaggcctggtggtgacaaaatctctcagcatttgtttttctgtattttatttctccttcacttatgaagcttagtttggctggatatgaaattctgggttgaaaattcttttctttaggaatgttgaatattggcccccactctcttctggcttgtagagtttctgccaggagatcagctgttagtctgatgggcttccctttgtgggtaacctgagctttctctctgtctgcccttaacattttttccatttcaactttggtgaatctgacaattatgtgtcttggagttgctcttctagaggagtatctttgtggcattctctgtatttcctaaatttgaatgttggcctgccttgctagattgaggaagttctcctggatattatcctgcagagtgttttccaacttggttccattctccccatcactttcaggtacaccaatcagatgtagatttggtcttttcacatagtcccatatttcttggagactttggtcatttctttttattcttttttctccaaacccctcttctcgcttgattttattcatttgatcttccatcactgataccctttcttccagttgatcaaatcggctactgaggcttgtgcattcatcatgtagttctcatgccatggttttcagctccatcacgtcctttaaggacttctctgcattggttattctagttagccatttgtctaattttttttcaaggtttttaacttctttgccatgggttcgaacttcctcctttagctcagagtagtttgatcgtctgaagcgttcttctctcaactcatcaaagtcattctctgtccagctttgttccattgctggtgaggagctgcgttcctttggaggaggagaggcactctgatttttacagtttccagtttttctgctctggtttttccccatctttgtggttttatctacctttggtctttgatgatggtgatgtacagatggggttttggtgtggatgtcctttctgtttgttagttttccttctaacagacaggaccctcagctgcaggtctgttggagtttgctggaggtccactccagaccttgtttaccttggtatcagcagcagaggctgcagaacagcggatattggtgaacagcaaatgttgttgcctgatcattcctctggaagttttgtctcagaggagtacccagctgtgtgatgtgtcaatgtgcccctactggggtgtgcctcccagtttggctactcgggggtcagggacccacatgaggaagcagtctgcccattctcagatctccagctgcgtgctgggagaaacactgttctcttctaagctgtcagacagggacttttaagtctgcagaggattctgctgccttttgtttggctatgccctgcccccagaggtggactctatagagggaggcaggcaggcaggcaggcaggcaggcctccttgtgctgcggtgagctccacccagtttgagcttctcggctgctttgtttacctactcaagcctcagaaatggcgggtgcccctcccccagcctcactgccgccttgcagtttgatctcagactgctgtggtagcaatgagtgaagctccatgggcgtaggatcctctgaggcaggcgcgggatataatctgctggtgtgccatttgctaagaccgttggaaaagcacagtattagggtgggagtgacccaattttccaggtgccatctgtcacccctttctttgactaggaaagggaattccctgaccccttgtgcttcctgggtgaggcgatgcctcgccctgcctcggctaacgctgagtgcactgcacgcgctgtcttgcacccactttctgacactccccagtgaggtgaacccggtacctcagttggaaatgcagacatcacccgtcttctgcctcgcttacactgggagctgtagactggagctgttcctattcggccatcttggttccaccccctgaaaatcctgcatatttcatttaaatatatttcacctcacatttagcatgtccttttattttttggtgttaaaattgtcttagaaaataattgtgatggtgggtagtccttttttttttttgaacatattacttggcaaaaatttaaaactggcacccacatgtcagtgttccagcatctttctcccacaagctcttttgaggtaatttggggccaccacaggtgttgaggaggaggtgacgatagggacttgcttgctactccacagcctctaccccatatcttcagccagactagttctgctgcttttctgttttatatattacagtttaatttggactttcatccagggtggagccttctccagcaccctctattttgccttctcaccatcccctcactggccctctacttctgcgttctgaattctcactgcatcctgggcccaagcacttgtagtgtgcaataattattcttcatggaaaacacaacattgttgtctaccatatggttttttgccaccttagcggttgcctttgttgggtttgatttaccccacgttaaatgggcaacagttatgcaccgtgggcgccatcaggtcatgatactaagatttaaattcaatagcactgatgaattcaaaccctacatttttgtgaagctggctttcggtacataaccttgagtgaacttagctctctgtctggcacctagtgggcatggatagagttttcagcaggaaagagactgaggtgatgagacattttcccttttcttctagaaacaaacacccaaagcgcctcttttgtatttgctttgaagagacggagaatatgattctgtaggctcacatactaggtgacattgcaggctgtctctaccgaaaagtacaagcatcgcctagggttctgtgacacacacagttccccacggtagagttctgatgctgtttttgcctcatttaaacggtgaggtgggtgacagtttaaacttatttactgtttcatatttttgttatggaaatcttaaaaaatatacaagtagagagtgtagtataacaatataatagtgtagctctctgttcttgttccatctcttcccctccatttgttttaagctggagtcttttttccccccaagtacatctcaagccatttttaaaaggaacccagcatcaccttatttctgtccccccactgccctgcccatgaactgcccctctctccccaaaaaggtgctcaaaagtgtcagagcaccttgcttctgacagcctcaaagtattcagccttaccaccaagacaagcacccacctgtttccttgctccctgagtgaaggacacatctgaatcctgtagatgagccagcactagtcttagcaaaaccaaggtcgttgtggtcatgctgccatcacactgccaaaagatcagggcctccagagagctgggagcacctgaccctggcccagggagctggaaaaattgaccgtgggggttttgagtgcagaaggttcaagggtaaaagtttttctcccacaataaatgcacctccaggaaaacacagcccctggaggcctgaccactgccaagcctgtgagctctacctctccgggccctttctgctaccacttttatctcccaatttaaaagcaggactccttgtgaccctgcccagagaatggggtcagagttattggaggtttgctagcagatggaggtatcatgagctactaaggccagtggaacaagggcaggaggcgcagttagaagcttttgaagatgatcccagagggaacatgaaatgatgcagaggtgacttgtgccactggatgtcagattctacaggcagaggatgggacagtgacctccttcagtgataacctgtagcacgtgccattgatttcatacagttcagttttaaggaagggcaggttatctttttttttttttttttttgagacagagccttgctctgtcacccaggctggagtgcagtggcacaatctcggctcactgcaagctccgcctcctgggttcatgccattgtcctgcctcagcctcctgagtagctgggactacaggcgcctgccaccacgcctggctaataatttatatttttagtagagacggggtttagtagtagccaggatggtctcgctctcctgacctcgtgatccgcctgcctcggcctcccaaagtgctgggattacaggcatgagccactgcgcccggccccattatctcttgatgaatatctcttatcctattttctgagtttcttaaagacaagaatattcttaactttcactgttagaactctatgtgttttgcctgctatgtaaactagggctcccttttatctctttttaggctgctgtctccaaagcctttccccactccctcaccatagtaggccaagactggcagataagtgtgctttctgcttctatccccttgaagtttcacagacttcatgaagtcttttggaatgacagtgcctatcctctcatcctattttcagtctgacagcccagaaatggagcatcattatagttatattggtgttgatgtcagtaggtcatcaggaagcttcaccatcctggcggcagcatgccaagagactgggttggccaggagatgtctcccatagggatatgggaagggctttgagaccatcttggcctcacatgggtgctaatgtagtcaccactctctctatactctctgctttccctccaggagggccgcaagaacgagatgctgctgtccaaggtgaaagcgaaggcctcctgaacatccccagccgtggctgtatgtcattgattttacttttaagcaccgtatatcacctacaagatcatgaaatggttctgaaagcgacagtagagagatgcagttgtgatgatttcaacaacctggatgttttctttctcctctttgcttccattcatctctgttggctgctgttgatggagtcagacagtaaacacgtggcttggataacacccatcatcctatgaagaatatagggagtacttgttctctgttgattcaacttttatgtctccagtaacattgcgcttatgaaggtacctgtatttgtatggactctgaataaagaagaattcatttgtttagcaagtattagttcagcaaccactgagaaataagcactgaggaagattcagagacgtgtaaaacacagttcctactgcacaagtacccagcaggtggcccagggaggcagatacagcacacttgaccgcagaactgggctatccaagatgtttttcagtaaacagaaggcatttagctgaaatgatcagcccatgtagtgttggtcacttgggcctttcacctgccatggtaccttttgttcccagctcctccaggtgccagccagcaggcttggtggtgacagcaactggaacgaaagttcagtgttgttttaatttttatacgttactcaagttgatttctcagaaaattgaaaacagaccttgtgctgaggacacgtcaataaaaattataccttcccctgccccaatgttcatgtgagtcacagcatgcagaggggctgtgcatccccctcattgaaggcacatttgatgaggctacgctgcagatgggtcatggtctgagccaggagagagatagacactgttccctgcactcaaggcaagtagggtgtcaggaggaagagcagtagggtttgcagagatccagggaaacttcctggaggaggcagcatttgagccctatctaaagggagaatcggatgttgataggaagactgttttaaatgaaaatacactatgattaaaaacccaagagagtgcagaggagtacaaggcatgcatgttgggaaaggagggaataagctagtctctgcaggaggcttcagagacccgtctgggaagtagggctgagactaggctttggagggccttgaagggcagctgagggttgattttaatccttggaaatgaccagtgcagatcaaacatggagctcctgctgccctggtcctcaggagtctggtaactcagtcatgttctgtaggtttgtgctccattttgcataaatcttgcaaacataccaggtggcaggtttgcacagtaacacaaaagcttaaacatgtcaagcaagtggggcattcagcagccacagaaatgtgttcatttttagtccctaatggatgtgattaagcagggctgatgtgtacagatttaaaaacacacacacgtgctggattaaaaacagccactggtttcagtgccagggccagcaaggcctacctgagccaggcggaagcagcagcttgcaaatagaaactgccacctgcgagcgcttcttgggtcatgtgcagctccacctcagctggtccctgagccgtggtcatgtgggggttttgaagggctaagttgaagcaagtaattgcaaaagaacaggtggcactctgagggcaggggaaggagacagaagtttgactgcgtttgaaattatttcagtcagggaaacatctgcgttgtcttgttaagcagcttgtaggcccacccctggctaactgaactttgtgagcagttggggcagttatttggatatttgtccaaaggtggtagggaggcagatgacattctggggttactggagtccacctctgtgctgatggggaaagtatggcatgatgaatccaaagcaaccagtaattctttttgaaagtgcaggcatttattttgagctgtatttcataggagtttcatttggtttggttttggtatagagaggtgtccatagatctctattccctttttttttttatcgacaaggcctactacggataaatcagtttttgttgcctgaatacactttgaattagactacagaagccagtttgagctcaaatttcacacttgctgcagacaactctcagtgtggacagtgcctttctgagtaattaggatgttatatgactttttggtgaagccgtatagggtaaggagatgccccaaggcccctgatcatttcagaagccacctggagcaccagaaggggtcatcttcccagggctatggctctgtgtgcttagacatagtatggaattgtgctctaagcccacaggcttctccagagttaaaaggaagcaagaacatccttaagttactttttcaaaatatgcgcttcaggaggaaccaggtttccccaggagagagaggctccctgctcaatcagcacagggagttgctagcgggcaggctgcccagtgctgtggaatctccgccagcctctgggttgggggctccctcccacttcttgcttcttatggagtacatgggactgctctgctttaagccgcgatcagagctgttgtgagcaggacaagattgcgtgatcacgaggtgcgtggggagatgctaggacatttgttgatgtctttgacctgtgctccgtctctgttggatgactgggttagctaacaccactagagggaggtacagaatgttaaacagtcgtcagagtcacactgagggttgttttaacagagggcaaattcccagtttgtcaagcatatctctgttagagtccgaagttcatggttttaatggttctagctcgtagcccttaatattttcaggatagctgggtcctgccagtgtccgctgagtccatcagcacaaccagaaggtccagggtccaggcatgggaagcattctctgacaataccgagccctcgggacctcctgaaaccttgagcagaggctggagaagaccttcagacagtccttttactacctcacaaagtgccatgcccgggacctcagacctcagggttgtgacgttgttgatgttgtcaggccccagtacgtctctagtgaccgaagcagacctgcctgaaagggcactccggacagtgagccctggctctaacctgtgccctcatatttctgctgcctcatatggtcttgtttgcccactctgtaggtgactgatcaccctaaaagggaggtaggtatctagcagtagcacagttactttgagcctgaccacttgttctgaagtgcagatgttgaaacatgcattgaggaagaacactttaaggaagcactttatgatttactcatggctggtgttggcctcaaagtaaaagaacatcttaatgcagaacagtacaataaagagccccataggatggatgccatcatctgtccccatggttgggattgccaaggaaagtgccttgttctgtgcatcttcagaatcccccaggccctctcttgatccttttcatgaagtccagagcattccttctattacaggctgaagatgcattgtaaaaggtaatgctataatagtattccctcttctcaataaatgtgcaaaactggagaatctggtgctgatctgcagcatacttgacaacacagggaataccgtggatgttccacgccagccttacatccgtccccattgcctgcccatgtccagtggccctgcgcaacaaaagtaagggcttgtcttaccacactctccccagcatctagctcaaggtagatgactgactgggaaattccggttggataaaatggcttttccacattgcaactttgcatctctattaggaaaatttagattgaacctttcctctacttgatgcttagtttgagaacagttttcacaactttagagggtctctctcagagtatgttatactgtaaccttgaagtttgagatgaaacaaggtgtcagaggttttgaatctttcaaaggaattgccttttacagattttttttttattccctaagaagggaaaaagagagggaagaactacactaatgttagagataaggtatgttttggctcaaaatgtgtcatgaacctaaaggtaacttgatgggcagaaatgtctcagccatgtgaaccaagaagtgggaccacagtgcaaggctgtgggtggcagcactagatatggtggtggcaggagtgtgacatgtaggcactccatgggggacagctggacggtgtctatcaaaagtgcaaatgcgtaagctctttgaactagcaatgctactcctaagaattgtacctgtgtacaaggtacttgtgtacaagagtttttgttgaaacattgtaatagcaaaaagttggagagtgccaccaatacaggggaatggttaaatacattatggccagcttaaacaatggaatagtttgtagaaatttaaaacaatggatcctgtgtgtgtgtactaccatagaatgggccccaagatgcatgattaagtgaggaaaaaagcccatggtatcctaatgtttggaatggagaaagtgtgtagatgtatgtgtgtgcatatgttttcacacagacgtatacacgtgtatatcatatgtccacctgcatatgcctaggatgtctctgggaggatatctagcagcccggcagcctgaattgcctctgggaagaggggtgggaatgacttttcaatgtacaccttttgtaccttttgaattttgtaccatgtacatgtattatctattaaaaaatagttcttaatttttaatttggtatacttttcttaatagaaccaaaatggaagaaaattctgattctctaaatctgctttcttaaagataaagcctttgattcaaaagtagtgagactctttcttgggtcttgaggcaatgggccatgcaaagggaggtgtccttttctggtggaatagaatgcggcagtgaagcagaggctggctcttctcacactctgggagcatgttgggctggcagagggagggatggggatggggaaatggatggtgatgtgactaatcactgggacagacgggctgctgcagggttccgtccatcttacaaaaatcacagtgcaaccctggtcctctgacttttggggtacaaaagataggcatacctctgagtcatgattcaaggggggctgttaacatcctccagaagccgtgcccatcttgtgtagaaacctgctgtgggtgagccttccccacccctgccttcttttaaaaaccaacacaactctgattttgtccagctccgaggtggccgtgtgtcagccccaagagaggaacatgacagcttttccagtcaggggaatctcactttttttggccaactgctggtttgcggatggatgtctaacccagttatggccagttttggggagactgctgaacttctggcaaagactttcctgatgatcagtgagagatgcactaggagagcttcaccctttcttcctgtgataagttatggaggggggacagggtttgagcaacttcagccatcttgagaccatgaaaagagacatcacaacacactgaggttggcagagggaaaaggtggaaagagccttggctctctgaaggcatgatgagcctctcaaccacactgaggcccacctgcttccatattcttgttccatgagaaaaatgaacctctgttagcttgtgcattcaaccaacaaatacttgagtttcttctatgtgtcaggccctgagaatatagcagtaaaaaaagcagacaagagaacctgctttcctggagctactctccagtgggaaaaaacacacaaacaagagaaatacgtaaatattgtcatgtggtatttcaacatgctgattaaagcacggaaggtatcaggagtgtctggtttggtggcggctgcaattttatattgagaagtgaaggaaggcctcactcactgactagtgagggagtgagtatatagatacctgtgtaaagaacagtccaggcacaggggatagcaagtgtaaaggccctaaggtaggagcatacccagcaggtgagtttgaggaacatgaaggagacctgtgtggggagccactggagggtttttgagaaggaaagcaatgtgatctgggttcatttttgtttgtttgtttgtttgtttgtttgttttgagatggtgtttcgctcttgttgcccaggctggagtgcagtggcacgatcttggctcactgcaacctccacctcccgggctcaagtgattctcctgcctcagcctcccgagtaactgggattacaggcatgtgccaccacacctggctaattttatatttttagtagagatggggtttctccacagtggtcaggctggtctcaaactcctgagctcagctgatccacccacctcagcctcccaaagtgctgggattataggcgtgagccaccatacccggccaatctggcttcattttaataggcatccctacactggtgcagtggctcatgcctgtcgtcccagcactttgggaggctgaggaggggagatcgcttgagcccaggagttcaagaccagcctgggcaatatggcgaaaccccgtctttactataaatacaaaaaattagccaggcatggtggagcacacctgtagtcccagctactcgggaggcagaggtgggaggatgggttgagcctgggaagtcgaggctgcagggagccatgttcacgccaccacactccagcctgggtgacagagtgagactgtctcaaaaaataaaaataaataaaaaataaggatccctctggaggctgtgttgactatagggagggcagaagcagggagcccagttaagagacccctgaaatagtccagatttaaatataactgaaaggaaagttttataagacaatacttagccttttaatactacactctgattttttttcctgttttgaaaatgctgagcattgaagtgctgctttccatcatcccatcatagcagatgccttttcatggcaggtggaatgtacttccccttgactctgggcttttgcttgtcctatgggttagctgacttgacacaagttttgaaagtatgcttgcatggttgggtttaccttcttgcccttctctcttgagaagaacgtaccctgttggcccaaggacaggatgaaggacaaacagagcaggcctagacgcaacctaaagcttgaagccaagcctagatgagccctgcctagatcagtgaaatcccagccaactcaggcatataagcaagaaataaagacttgctatatgtcacagagacttcgtagtaattgcacatgactattgagaatgtcgctgattgagtcaactaccaaattggtttcatgatagggtgtgacctggagttgaaaagatacctctcaacaccactcaggtgacaggccagaagagcagcctctggggatgggacctacatgtggaatagacactcacagagcacagccatcatgataagaatccacagtccctcagacaagaccaggcatggtagctcatgcctgtaattccagcagtttgggaagctaaagtgggaggattgcttgaggccaggggttcaagggaccagcctgggcaacacaggaagatcctgtctctatacaaaaaataaactttctacatatggctagccagttttcccagcaccatttattaaatagggaatcctttccccaatgcttgtttttctcaggtttgtcaaagatcagatggttgtagatatgcggtgttatttctgagggctctgttctattccattgatctatatctctgttttggtaccagtaccatgctgttttggttactgtagccttgtagtatagtttgaagtcaggtagtgtgatgcctccagctttgttcttttggattaggattgacttggcgatgtgggctcttttttggttccatatgaaatttaaagtagttttttccaattctgtgaagaaagtcattgctaccttgatggggatggcattgaatctataaattaccttgggcagtatggccattttcatgatactgattcttcctacccgtgagcatggaatgttcttccatttgtttgtatcctcttttatttcattgagcagtggtttgtagttctccttgtagaggtccttcatgtcccttgtaagtggattcctaggtattttattctctttgaagcaattgtgaatgggagttcactcatgatttggctctctgtctgttattctgtataagaatgcttgtgatttttgcacattgattttgtatcctgagactttgctgaagttgcttatcagcttaaggagattttgggctgagacaatggggttttctagatatacaatcatgtcgtctgcaaacggggacaatttgacttcctcttttcctaattgaataccctttatttccttctcctgactaattgccctggccagaacttccaacactatgttgaataggagtggtgagagagggcatccctgtcttgtgccagttttcaaagggaatgcttccagtttttgcccattcagtatgatattggctgtgggtttgtcatagatagctcttattattttgagatacgtcccatcaacacctaatttattgagagtttttagcatgaagggttgttgaattttgtcaaaggccttttctgcatctattgagataatcatgtggtttttgcctttggttctgtttatatgctggattacatttattgatttgcgtatattgaaccagccttgcatcccagggatgaagcccacttgatcatggtggataagctttttgatgtgctgctggattcgttttgccagtattttattgaggattttcacatcaatgttcatcaaggatattggtctaaaattctcttttttggttgtgtctctgccaggctttggtatcaggatgatgctggcctcataaaatgagttagggaggattccctctttttctattgattggaatagtttcagaaggaatggtagccatatgtagaaagctgaaactggatcccttccttacaccttatacaaaaatcaattcaagatggattaaagacttaaacgttagacctaaaaccataaaaaccctagaaaaaaacctaggcattaccattcaggacataggcatgggcaaggacttcatatctaaaacaccaaaagcaatggcaacaaaagacaaaattgacaaatgggatctcattaaactaaagagcttctgcacagcaaaagaaactaccatcagagtgaacaggcaacccacaaaatgggagaagattttcacaacctactcatctgacaaagggctaatatccagaatctacaatgaactcaaacaaatttacaagaaaaaaacaaacgaccccatcacaaagtgggtgaaggacatgaacagacacttctcaaaagaagacatttatgcagccaaaaaacacatgaaaaaatgctcaccatcactggccatcagagaaatgcaaatccaaaccacaacgagatatcatctcacaccagttaaaatggcaatcattaaaaagtcaggaaacaacaggtgctggagaggatgtggagaaataggaacacttttacacagttggtgggactgtaaactagttcaaccattgtggaagtcagtgtggcaattcctcagggatctagaactacaaataccatttgacccagccatcccattactaggtatatacccaaaggactataaatcatgctgctataaagacacatgcacacgtatgtttattgtggcattattcccaatagcaaagacttggaaccaacccgaatgtccaacaatgatagactggattaagaaaatgtggcacatatacaccatggaatactatgcagccataaaaaatgatgagttcatgtcctttgtagggacatggatgaaactggaaaccatcattctcagtaaactatcacaagaacaaaaaaccaaacactgcatattctcactcatatatgggaattgaacaatgagaacacatggacacaggaaggggaacatcacactctgggaactgttgtggggtggggggagcggggagggatagcactgggagatatacctaatgctagatgacaagttagtgggtgcagcgcaccagcatgtcacatgtatacatatgtaactaaactgcacattttgcacatgtaccctaaaacttaaaagtataaaaataaaaagaaaaattaaaaaaaatgtttaaaaattaaaaaataaattccctcagacatgcctaaagaaacatggagggcacctgttgtttcctgactttttaatgattgccattctaactggtgtgagatgatatacaccatggaatactatgcagccataaaaaatgatgagttcatatcctttgtagggacatggatgaaattggaaaccatcattctcagtaaactatcgcaagaacaaaaaaccaaacaccgcatattctcactcataggtgggaattgaacaatgagatcacatggacacaggaaggggaatatcacactctggggactgtggtggggtcgggggaggggggagggatagcattgggagatatacctaatgctagatgacacattagtgggtgcagcgcaccagcatggcacatgtatacatatgtaactaacctgcacaatgtgcacatgtaccctaaaacttagagtataataaaaaaaaaaaaaaaaaaaacatggagggcatattcaaagggagaaaagtagcatactttatacattatacatgaccaaattaataaaactcttccattagccacatccatcctacagacctggaactttgtgaaattaaattgtgataccttagaaaataaatccacacaggaaagagatgaattcctctaacagcctcccaactccatcttagtcatgttctataggcaaaggagacagagataggacagagacattacacttaccaaggatgttcctagaatgttaactggaaatcagatgtgtttttgtcaatagaattccattctgaatactctgaattaaaaggaatcataagtgcatccttgcataaagtcaatcatcaactgatccgtttcaggaattcaacattttgtaattattgtgagcagttgaagaaggctttactaactgaagaaaagtttgaagcctaaaatgtccagcagaagttgccaccaacttagcaagcaaatagttttcttttaaggaaatctaaacatacatgtgattccgtctgcctgagatgcttccacaatgagagcacgttaagtcaaacccctgccaaataaacattaaaagcacactatccaatagcaagagtaaaccaaaaaattctataggtgcctacccaacgatacccagactctccttgaaaccttcttcctggaatccaactagaatcatgcaagaggattcactatatcaggtgtagtctgcaaaggttcatgcagatctcatgctgcaaaatgcaagccaaagttgaaacatggagtctagtcaggtttctattaggttcctttcatctttctcatgtttggaaacaggcagacttgagtccaaatacctgcctgctatgtactcactatgtgaccatgggcagcctactcaccctcttagaatatagttaagtgaggactatatttaccttacagagtgaatgcaggagtaagtgatcatttgtatataaaacccagtacaacagctgtgcatgatgggggctcaataaacactacttttaaaaatgtattcctgaatgtgcattttatgaagggagaggtggggagattattaataccccctattatctttcagtcaatgagggaaaatcctcagtagacccaagattgagctctgacccttaaaagacaacaatgatggatgactgaatatataatttgactcgtaactacataccttacctgttccacctcctacaggttgtcagtcacctgcttattactttcttccctgccttaattcacgagatttgaggtggcttgtaggaaacatgcagaataacagtaaactataaactgaacataaaacactaggatagggaaatctaaaattggaattatagactggctggaaacattatacacaaataagcaggctactgggttttatataaattccagagttaagccaacaatttggttctgtgcttcttcttcctcaaaatgaaaacataaacacagtcaattaataatcctcattatcatgaaaagaaaacatgtcttcacaaagaatgcaataggataattaactgcatccttatatgaaatgcactgatgagttttataagaactattccaattgatagaaaaaagagggaatcctccctaactcattttatgaggccagcatcatcctgataccaaagcctggcagagacacaacaaaaaaagagaattttagaccaatatccctgatgaacatcgatgcaaaaatcctcaataaaatgctggcaaaccaaatccagcagcacttcaataagcttatccaccatgatcaagtgggcttcatccctgggatgcaaggctggttcaacatatgcaaatcaatataatccagcatgtaaacagaaccaaagacaaaaaccacatgattatctcaatagatgcagaaaaggcctttgacaaaattcaacaacacttcatgctaaaaactctcagtaaattaggtattgatgggacgtatctcaaaataatgagagttatttatgacaaattcacagccaatatcatactaaatgggcaaaaactggaagcattccctttgaaaactggcacaagacaggggtgccctctctcaccactccaacatagtgttggaagttctggccagggcaatcaggcaggagaaagaaataaagggtattcaattaggaaaagaggaagtcaaattgtccctgtttgcagatgacatgattgtatatctagaaaaccccatcatctctgcccaaaatctccttaagctggtaagcgacttcagcaaagtctcaggatacaacatcaatgtgcaaaaatcacaaacattcttatacaccaataacagacaaacagagagccaaatcatgagtgaactcccattcacagttgcttcaaagagaataaaatgcctaggaatccaacttacaagggagatgaaggacctcttcaaggagaactacaaaccactgctcaatgaaataaaagaggatacaaacaaatggaacaacattccatgctcatgggtaggaagaatcagtatcgtgaaaatggccatactgcccaaggtagtttatagattcaatgccatccccatcaagctaccaatgactttctccacagaattgcataaagctactttaaagctcatatggaaccaaaaaagagcccacattgccaagacagtcctaagctaaaagaacaaagctggaggcatcatgctacctgacttcaaactatactacaaggctacagtatccaaaacagcatggtactggtaccaaaacagagatatagaccaatggaaccgaacagagccctcagaaataataccacacatctacaacaatctgatctttgacaaacctgacaaaaacaagaaatggggaaaggagtccctatttaataaatgatgctgggaaaaccggctagccatatgtagaaagctgaaactggatcccttccttataccttatacaaaaattaattcagggccaggctcagtggttcacgcctctaatcccagcactttgggaggctgaggcaagcggatcacaaggtcaggagattgagaccatcctggctaacacggtgaaacgctgcctctactaaaaatacaaaaaattagccagacgtggtggcgggcacctgtagtcccagctgcttgggaggctgaggcaggagaatggcttgaacccggaaggcgtagcttgcagtgagccaagatcgcaccattgcactccagcatgggcaacagagtgagactccatctcaaaaataaataaataaataaatatattaattcaagatggattaaagacttaaatgttagacctaaaaccataaaatcccttgaagaaaacctaggtaataccattcaggacacaggcatgggcaaggacttcatgtctcaaacaccaaaagcaatggcaacaaaagccaaaattgacaaatgggatctcattaaactgaagagcttctgcacagcaaaagaaactaccatcagagtgaacaggcaacctaaagaatgggagaaaatttttgcactctactcatctgacaaagggctaatatccagaatctacaatgaactcaaacaaatttacaagaaaaaagcaaccccatcaaaaagtgggcaaaggatatgaacagacacttctcaaaagaagacatttatgcagccaaaaaacacatgaaaaaatgctcaccatcactggccatcagagaaatgcaaatcaaaaccacaatgagataccatctcacaccagttagaatggcaatcattaaaaagtcaggaaacaacaggtgctggagaggatatggagaaataggaacacttttacactgttggtgggactgtaaactagttcaaccattgtggaagacagtgtggcgactcctcaaggatctagaactacaaataccatttgacccagccatcccattactgggtatatacccaaaggattataaatcatggctgctataaagacacatgcacacgtatgtttattgcggcactattcacaatagcaaagacttggaaccaagccaaatgtccaacaatgatagactggattaagaaa

SEQ ID NO: 77 - DNA, 6821 bp, Homo sapiens
agtttccgctttgcactccaccccggtagcagctccgcggcagggacagcttcctccggacgcttggcgggcttcgctctcgccttacgacagcccggtcggatcatggggttgcccagggggccggagggccagggtctcccggaggtggaaacaagagaagatgaagaacaaaatgtcaagttgactgaaattctggagctcttggttgcagctgggtatttcagggcaagaattaaaggcttatcaccctttgacaaggtagtaggaggaatgacttggtgtatcaccacttgcaactttgatgtagatgttgatttgctctttcaagaaaactctacgataggtcaaaaaatagctctgtcagaaaaaattgtctcggtcctgccaaggatgaaatgcccacaccagctggagccccaccagatccaggggatggattttattcacatatttcctgttgttcagtggctggtgaaacgagctatagaaacaaaagaagagatgggtgactatatccgctcctactctgtatcccagttccagaagacttacagtctccctgaggatgatgacttcataaagagaaaagaaaaggccatcaagacagttgtggacctctcagtaatgtacaagccccgtcggaaatacaaacgccaccagggagcagaggagctacttgatgaagaatctcgaatccatgctacacttttggaatatggcaggagatatggatttagccgccagagcaaaatggagaaggctgaggacaagaaaacggcacttccagcagggctgtcagctacagaaaaagctgatgcccacgaggaagatgagcttcgagcagctgaagagcagcgtattcagtcgctgatgaccaagatgaccgctatggcaaatgaggagagccgtctcaccgcaagctccgtgggccagattgtgggactctgctctgctgagatcaagcagattgtgtccgagtatgcagagaagcagtctgagctatcagctgaagaaagtccagaaaaattaggaacctcccagctacatcgccggaaagtcatttccttgaacaaacagattgcgcaaaagaccaaacatcttgaagagctgcgagcaagtcacaccagcctacaagccagatataatgaagccaagaaaacgctgacagagctgaagacttacagtgagaaactggacaaagagcaagcagccctcgagaagatagaatccaaagctgatccaagtatcctacagaacctgagagcacttgtagccatgaatgaaaatctgaaaagtcaagaacaggaatttaaagcacattgtcgagaggagatgacacgactacagcaagaaattgaaaacctgaaagctgagagagcaccacgtggagatgaaaagaccctctccagtggagagccgcctggtaccttgacctctgcaatgactcatgacgaagacctagacagacggtataatatggagaaagagaaactttacaagatacgtttactacaggctcgaagaaatcgagaaatagcaattttgcaccgcaagattgatgaagtccctagccgtgccgagctaatacagtatcagaagagatttattgaactctaccgccagatttcagcagtgcacaaagaaaccaagcagttcttcactttatataataccctggatgataaaaaggtttatttggaaaaagagattagtctgctgaactcaattcatgagaacttctcacaggccatggcctcccctgctgcccgggaccagtttttacgtcagatggaacagattgtggaaggaattaagcaaagtagaatgaagatggaaaagaaaaagcaagagaacaaaatgagaagagaccagttgaacgaccagtacttggagctgttagaaaagcagaggctatactttaagactgtgaaagagttcaaggaggagggccgcaagaacgagatgctgctgtccaaggtgaaagcgaaggcctcctgaacatccccagccgtggctgtatgtcattgattttacttttaagcaccgtatatcacctacaagatcatgaaatggttctgaaagcgacagtagagagatgcagttgtgatgatttcaacaacctggatgttttctttctcctctttgcttccattcatctctgttggctgctgttgatggagtcagacagtaaacacgtggcttggataacacccatcatcctatgaagaatatagggagtacttgttctctgttgattcaacttttatgtctccagtaacattgcgcttatgaaggtacctgtatttgtatggactctgaataaagaagaattcatttgtttagcaagtattagttcagcaaccactgagaaataagcactgaggaagattcagagacgtgtaaaacacagttcctactgcacaagtacccagcaggtggcccagggaggcagatacagcacacttgaccgcagaactgggctatccaagatgtttttcagtaaacagaaggcatttagctgaaatgatcagcccatgtagtgttggtcacttgggcctttcacctgccatggtaccttttgttcccagctcctccaggtgccagccagcaggcttggtggtgacagcaactggaacgaaagttcagtgttgttttaatttttatacgttactcaagttgatttctcagaaaattgaaaacagaccttgtgctgaggacacgtcaataaaaattataccttcccctgccccaatgttcatgtgagtcacagcatgcagaggggctgtgcatccccctcattgaaggcacatttgatgaggctacgctgcagatgggtcatggtctgagccaggagagagatagacactgttccctgcactcaaggcaagtagggtgtcaggaggaagagcagtagggtttgcagagatccagggaaacttcctggaggaggcagcatttgagccctatctaaagggagaatcggatgttgataggaagactgttttaaatgaaaatacactatgattaaaaacccaagagagtgcagaggagtacaaggcatgcatgttgggaaaggagggaataagctagtctctgcaggaggcttcagagacccgtctgggaagtagggctgagactaggctttggagggccttgaagggcagctgagggttgattttaatccttggaaatgaccagtgcagatcaaacatggagctcctgctgccctggtcctcaggagtctggtaactcagtcatgttctgtaggtttgtgctccattttgcataaatcttgcaaacataccaggtggcaggtttgcacagtaacacaaaagcttaaacatgtcaagcaagtggggcattcagcagccacagaaatgtgttcatttttagtccctaatggatgtgattaagcagggctgatgtgtacagatttaaaaacacacacacgtgctggattaaaaacagccactggtttcagtgccagggccagcaaggcctacctgagccaggcggaagcagcagcttgcaaatagaaactgccacctgcgagcgcttcttgggtcatgtgcagctccacctcagctggtccctgagccgtggtcatgtgggggttttgaagggctaagttgaagcaagtaattgcaaaagaacaggtggcactctgagggcaggggaaggagacagaagtttgactgcgtttgaaattatttcagtcagggaaacatctgcgttgtcttgttaagcagcttgtaggcccacccctggctaactgaactttgtgagcagttggggcagttatttggatatttgtccaaaggtggtagggaggcagatgacattctggggttactggagtccacctctgtgctgatggggaaagtatggcatgatgaatccaaagcaaccagtaattctttttgaaagtgcaggcatttattttgagctgtatttcataggagtttcatttggtttggttttggtatagagaggtgtccatagatctctattccctttttttttttatcgacaaggcctactacggataaatcagtttttgttgcctgaatacactttgaattagactacagaagccagtttgagctcaaatttcacacttgctgcagacaactctcagtgtggacagtgcctttctgagtaattaggatgttatatgactttttggtgaagccgtatagggtaaggagatgccccaaggcccctgatcatttcagaagccacctggagcaccagaaggggtcatcttcccagggctatggctctgtgtgcttagacatagtatggaattgtgctctaagcccacaggcttctccagagttaaaaggaagcaagaacatccttaagttactttttcaaaatatgcgcttcaggaggaaccaggtttccccaggagagagaggctccctgctcaatcagcacagggagttgctagcgggcaggctgcccagtgctgtggaatctccgccagcctctgggttgggggctccctcccacttcttgcttcttatggagtacatgggactgctctgctttaagccgcgatcagagctgttgtgagcaggacaagattgcgtgatcacgaggtgcgtggggagatgctaggacatttgttgatgtctttgacctgtgctccgtctctgttggatgactgggttagctaacaccactagagggaggtacagaatgttaaacagtcgtcagagtcacactgagggttgttttaacagagggcaaattcccagtttgtcaagcatatctctgttagagtccgaagttcatggttttaatggttctagctcgtagcccttaatattttcaggatagctgggtcctgccagtgtccgctgagtccatcagcacaaccagaaggtccagggtccaggcatgggaagcattctctgacaataccgagccctcgggacctcctgaaaccttgagcagaggctggagaagaccttcagacagtccttttactacctcacaaagtgccatgcccgggacctcagacctcagggttgtgacgttgttgatgttgtcaggccccagtacgtctctagtgaccgaagcagacctgcctgaaagggcactccggacagtgagccctggctctaacctgtgccctcatatttctgctgcctcatatggtcttgtttgcccactctgtaggtgactgatcaccctaaaagggaggtaggtatctagcagtagcacagttactttgagcctgaccacttgttctgaagtgcagatgttgaaacatgcattgaggaagaacactttaaggaagcactttatgatttactcatggctggtgttggcctcaaagtaaaagaacatcttaatgcagaacagtacaataaagagccccataggatggatgccatcatctgtccccatggttgggattgccaaggaaagtgccttgttctgtgcatcttcagaatcccccaggccctctcttgatccttttcatgaagtccagagcattccttctattacaggctgaagatgcattgtaaaaggtaatgctataatagtattccctcttctcaataaatgtgcaaaactggagaatctggtgctgatctgcagcatacttgacaacacagggaataccgtggatgttccacgccagccttacatccgtccccattgcctgcccatgtccagtggccctgcgcaacaaaagtaagggcttgtcttaccacactctccccagcatctagctcaaggtagatgactgactgggaaattccggttggataaaatggcttttccacattgcaactttgcatctctattaggaaaatttagattgaacctttcctctacttgatgcttagtttgagaacagttttcacaactttagagggtctctctcagagtatgttatactgtaaccttgaagtttgagatgaaacaaggtgtcagaggttttgaatctttcaaaggaattgccttttacagattttttttttattccctaagaagggaaaaagagagggaagaactacactaatgttagagataaggtatgttttggctcaaaatgtgtcatgaacctaaaggtaacttgatgggcagaaatgtctcagccatgtgaaccaagaagtgggaccacagtgcaaggctgtgggtggcagcactagatatggtggtggcaggagtgtgacatgtaggcactccatgggggacagctggacggtgtctatcaaaagtgcaaatgcgtaagctctttgaactagcaatgctactcctaagaattgtacctgtgtacaaggtacttgtgtacaagagtttttgttgaaacattgtaatagcaaaaagttggagagtgccaccaatacaggggaatggttaaatacattatggccagcttaaacaatggaatagtttgtagaaatttaaaacaatggatcctgtgtgtgtgtactaccatagaatgggccccaagatgcatgattaagtgaggaaaaaagcccatggtatcctaatgtttggaatggagaaagtgtgtagatgtatgtgtgtgcatatgttttcacacagacgtatacacgtgtatatcatatgtccacctgcatatgcctaggatgtctctgggaggatatctagcagcccggcagcctgaattgcctctgggaagaggggtgggaatgacttttcaatgtacaccttttgtaccttttgaattttgtaccatgtacatgtattatctattaaaaaatagttcttaatttttaatttggtatacttttcttaatagaaccaaaatggaagaaaattctgattctcta

SEQ ID NO: 78 - protein, 627 aa, Homo sapiens
MGLPRGPEGQGLPEVETREDEEQNVKLTEILLVAAGYFRARIKGLSPFDKVVGGMTWCITTCNFDVDVDLLFQENSTIGQKIALSEKIVSVLPRMKCPHQLEPHQIQGMDFIHIFPVVQWLVKRAIETKEEMGDYIRSYSVSQFQKTYSLPEDDDFIKRKEKAIKTVVDLSVMYKPRRKYKRHQGAEELLDEESRIHATLLEYGRRYGFSRQSKMEKAEDKKTALPAGLSATEKADAHEEDELRAAEEQRIQSLMTKMTAMANEESRLTASSVGQIVGLCSAEIKQIVSEYAEKQSELSAEESPEKLGTSQLHRRKVISLNKQIAQKTKHLEELRASHTSLQARYNEAKKTLTELKTYSEKLDKEQAALEKIESKADPSILQNLRALVAMNENLKSQEQEFKAHCREEMTRLQQEIENLKAERAPRGDEKTLSSGEPPGTLTSAMTHDEDLDRRYNMEKEKLYKIRLLQARRNREIAILHRKIDEVPSRAELIQYQKRFIELYRQISAVHKETKQFFTLYNTLDDKKVYLEKEISLLNSIHENFSQAMDAARDQFLRQMEQIVEGIKQSRMKMEKKKQENKMRRDQLNDQYLELLEKQRLYFKTVKEFKEEGRKNEMLLSKVKAKAS

SEQ ID NO: 79 - DNA, 5332 bp, Homo sapiens
gttatgaaagttacagggaaagtatgacaaaaaagattaacatgcaattataagaccaggctaatttccatgccttctcagaggtttagcatccttaattgcctgggatcccaggggcccccgtggctccactgtgcgttacaaagacctgattgcctctcctaagagtcataatctggatacagagctgactgcttggcatttccccctgcctcagagtcctgtgtgccggtcataactctactggtttttctttcagggccatggcctcccctgctgcccgggaccagtttttacgtcagatggaacagattgtggaaggaattaagcaaagtagaatgaagatggaaaagaaaaagcaagagaacaaaatgagaagagaccagttgaacgaccagtacttggagctgttagaaaagcagaggctatactttaagactgtgaaagagttcaaggaggagggccgcaagaacgagatgctgctgtccaaggtgaaagcgaaggcctcctgaacatccccagccgtggctgtatgtcattgattttacttttaagcaccgtatatcacctacaagatcatgaaatggttctgaaagcgacagtagagagatgcagttgtgatgatttcaacaacctggatgttttctttctcctctttgcttccattcatctctgttggctgctgttgatggagtcagacagtaaacacgtggcttggataacacccatcatcctatgaagaatatagggagtacttgttctctgttgattcaacttttatgtctccagtaacattgcgcttatgaaggtacctgtatttgtatggactctgaataaagaagaattcatttgtttagcaagtattagttcagcaaccactgagaaataagcactgaggaagattcagagacgtgtaaaacacagttcctactgcacaagtacccagcaggtggcccagggaggcagatacagcacacttgaccgcagaactgggctatccaagatgtttttcagtaaacagaaggcatttagctgaaatgatcagcccatgtagtgttggtcacttgggcctttcacctgccatggtaccttttgttcccagctcctccaggtgccagccagcaggcttggtggtgacagcaactggaacgaaagttcagtgttgttttaatttttatacgttactcaagttgatttctcagaaaattgaaaacagaccttgtgctgaggacacgtcaataaaaattataccttcccctgccccaatgttcatgtgagtcacagcatgcagaggggctgtgcatccccctcattgaaggcacatttgatgaggctacgctgcagatgggtcatggtctgagccaggagagagatagacactgttccctgcactcaaggcaagtagggtgtcaggaggaagagcagtagggtttgcagagatccagggaaacttcctggaggaggcagcatttgagccctatctaaagggagaatcggatgttgataggaagactgttttaaatgaaaatacactatgattaaaaacccaagagagtgcagaggagtacaaggcatgcatgttgggaaaggagggaataagctagtctctgcaggaggcttcagagacccgtctgggaagtagggctgagactaggctttggagggccttgaagggcagctgagggttgattttaatccttggaaatgaccagtgcagatcaaacatggagctcctgctgccctggtcctcaggagtctggtaactcagtcatgttctgtaggtttgtgctccattttgcataaatcttgcaaacataccaggtggcaggtttgcacagtaacacaaaagcttaaacatgtcaagcaagtggggcattcagcagccacagaaatgtgttcatttttagtccctaatggatgtgattaagcagggctgatgtgtacagatttaaaaacacacacacgtgctggattaaaaacagccactggtttcagtgccagggccagcaaggcctacctgagccaggcggaagcagcagcttgcaaatagaaactgccacctgcgagcgcttcttgggtcatgtgcagctccacctcagctggtccctgagccgtggtcatgtgggggttttgaagggctaagttgaagcaagtaattgcaaaagaacaggtggcactctgagggcaggggaaggagacagaagtttgactgcgtttgaaattatttcagtcagggaaacatctgcgttgtcttgttaagcagcttgtaggcccacccctggctaactgaactttgtgagcagttggggcagttatttggatatttgtccaaaggtggtagggaggcagatgacattctggggttactggagtccacctctgtgctgatggggaaagtatggcatgatgaatccaaagcaaccagtaattctttttgaaagtgcaggcatttattttgagctgtatttcataggagtttcatttggtttggttttggtatagagaggtgtccatagatctctattccctttttttttttatcgacaaggcctactacggataaatcagtttttgttgcctgaatacactttgaattagactacagaagccagtttgagctcaaatttcacacttgctgcagacaactctcagtgtggacagtgcctttctgagtaattaggatgttatatgactttttggtgaagccgtatagggtaaggagatgccccaaggcccctgatcatttcagaagccacctggagcaccagaaggggtcatcttcccagggctatggctctgtgtgcttagacatagtatggaattgtgctctaagcccacaggcttctccagagttaaaaggaagcaagaacatccttaagttactttttcaaaatatgcgcttcaggaggaaccaggtttccccaggagagagaggctccctgctcaatcagcacagggagttgctagcgggcaggctgcccagtgctgtggaatctccgccagcctctgggttgggggctccctcccacttcttgcttcttatggagtacatgggactgctctgctttaagccgcgatcagagctgttgtgagcaggacaagattgcgtgatcacgaggtgcgtggggagatgctaggacatttgttgatgtctttgacctgtgctccgtctctgttggatgactgggttagctaacaccactagagggaggtacagaatgttaaacagtcgtcagagtcacactgagggttgttttaacagagggcaaattcccagtttgtcaagcatatctctgttagagtccgaagttcatggttttaatggttctagctcgtagcccttaatattttcaggatagctgggtcctgccagtgtccgctgagtccatcagcacaaccagaaggtccagggtccaggcatgggaagcattctctgacaataccgagccctcgggacctcctgaaaccttgagcagaggctggagaagaccttcagacagtccttttactacctcacaaagtgccatgcccgggacctcagacctcagggttgtgacgttgttgatgttgtcaggccccagtacgtctctagtgaccgaagcagacctgcctgaaagggcactccggacagtgagccctggctctaacctgtgccctcatatttctgctgcctcatatggtcttgtttgcccactctgtaggtgactgatcaccctaaaagggaggtaggtatctagcagtagcacagttactttgagcctgaccacttgttctgaagtgcagatgttgaaacatgcattgaggaagaacactttaaggaagcactttatgatttactcatggctggtgttggcctcaaagtaaaagaacatcttaatgcagaacagtacaataaagagccccataggatggatgccatcatctgtccccatggttgggattgccaaggaaagtgccttgttctgtgcatcttcagaatcccccaggccctctcttgatccttttcatgaagtccagagcattccttctattacaggctgaagatgcattgtaaaaggtaatgctataatagtattccctcttctcaataaatgtgcaaaactggagaatctggtgctgatctgcagcatacttgacaacacagggaataccgtggatgttccacgccagccttacatccgtccccattgcctgcccatgtccagtggccctgcgcaacaaaagtaagggcttgtcttaccacactctccccagcatctagctcaaggtagatgactgactgggaaattccggttggataaaatggcttttccacattgcaactttgcatctctattaggaaaatttagattgaacctttcctctacttgatgcttagtttgagaacagttttcacaactttagagggtctctctcagagtatgttatactgtaaccttgaagtttgagatgaaacaaggtgtcagaggttttgaatctttcaaaggaattgccttttacagattttttttttattccctaagaagggaaaaagagagggaagaactacactaatgttagagataaggtatgttttggctcaaaatgtgtcatgaacctaaaggtaacttgatgggcagaaatgtctcagccatgtgaaccaagaagtgggaccacagtgcaaggctgtgggtggcagcactagatatggtggtggcaggagtgtgacatgtaggcactccatgggggacagctggacggtgtctatcaaaagtgcaaatgcgtaagctctttgaactagcaatgctactcctaagaattgtacctgtgtacaaggtacttgtgtacaagagtttttgttgaaacattgtaatagcaaaaagttggagagtgccaccaatacaggggaatggttaaatacattatggccagcttaaacaatggaatagtttgtagaaatttaaaacaatggatcctgtgtgtgtgtactaccatagaatgggccccaagatgcatgattaagtgaggaaaaaagcccatggtatcctaatgtttggaatggagaaagtgtgtagatgtatgtgtgtgcatatgttttcacacagacgtatacacgtgtatatcatatgtccacctgcatatgcctaggatgtctctgggaggatatctagcagcccggcagcctgaattgcctctgggaagaggggtgggaatgacttttcaatgtacaccttttgtaccttttgaattttgtaccatgtacatgtattatctattaaaaaatagttcttaatttttaatttggtatacttttcttaatagaaccaaaatggaagaaaattctgattctcta

SEQ ID NO: 80 - protein, 80 aa, Homo sapiens
MDAARDQFLRQMEQIVEGIKQSRMKMEKKKQENKMRRDQLNDQYLELLEKQRLYFKTVKEFKEEGRKNEMLLSKVKAKAS

SEQ ID NO: 81 - DNA, 707 bp, Homo sapiens
agtttccgctttgcactccaccccggtagcagctccgcggcagggacagcttcctccggacgcttggcgggcttcgctctcgccttacgacagcccggtcggatcatggggttgcccagggggccggagggccagggtctcccggaggtggaaacaagagaagatgaagaacaaaatgtcaagttgactgaaattctggagctcttggttgcagctgggtatttcagggcaagaattaaaggcttatcaccctttgacaaggtagtaggaggaatgacttggtgtatcaccacttgcaactttgatgtagatgttgatttgctctttcaagaaaactctacgataggtcaaaaaatagctctgtcagaaaaaattgtctcggtcctgccaaggatgaaatgcccacaccagctggagccccaccagatccaggggatggattttattcacatatttcctgttgttcagtggctggtgaaacgagctatagaaacaaaagaagagatgggtgactatatccgctcctactctgtatcccagttccagaagacttacagtctccctgaggatgatgacttcataaagagaaaagaaaaggccatcaagacagttgtggacctctcagagatatggatttagccgccagagcaaaatggagaaggctgaggacaagaaaacggcacttccagcagggctgtcagctacag

SEQ ID NO: 82 - protein, 175 aa, Homo sapiens
MGLPRGPEGQGLPEVETREDEEQNVKLTEILLVAAGYFRARIKGLSPFDKVVGGMTWCITTCNFDVDVDLLFQENSTIGQKIALSEKIVSVLPRMKCPHQLEPHQIQGMDFIHIFPVVQWLVKRAIETKEEMGDYIRSYSVSQFQKTYSLPEDDDFIKRKEKAIKTVVDLSEIWI

SEQ ID NO: 83 - DNA, 121124 bp, Mus musculus
  misc_feature (1)...(121124): n = A,T,C or G
caggagccatccaatcagaaggctgagagccacatttccataacgatgattggctagtagtctggagactggcggagctgcagggggatggggaagaaatgctctcctgagaaaatagcagaacaactttctgttgtttactgcatattctccaaatgattgtagtgattcatcctttaggaaggcttgtttagcaaacaaaagaggcacagttgttctcaacaacagtagcattcaaccgccaagaagctgagcaaaatggaagtctttaaaatcaactttaggctccctgagttcttctagctgaatatgcaaaacctgtctaggagaggcatgaggaacataaatcactaattcgggtttgctggttttgatgaacgccaccgttgctttattaaacgtgtgtcaactttatgaaatctgaacaaagtggagttcatcaagtatgaaaatcctttgaaatataccgagtattttcctagttaggggggttctgccaccctcaataacaaagttgtcctgagtatttctttttcctcctgcagtcatttatacatgaaaaatcttagagatgtattcatcaatgtgttaacgctctcacaaatttttatacttatacccgtctgctctcagtaattctctccacaggacaaagaaaaggggaaatgtaatggctgtatccaacagcctttgtcctttcccaacttggtgttttttctaccctgttgttttaaattcacaccgagttgtagctacatttcacctacaagtttttaaattttgttttacaaacacccctccacccccatcgtttctccttctggcaaggaggctagccccgcaaagcagactaagcagaagtatttttcagactttcccagtgaccattccttggctggctaacagaccagccattcagaagcaattttcttcaggctgaaattatgtgctgaccgtagcagatcacttcccataataacccttcccccacccagcgctaaatacaatctgtctcctactcactgtaataacgtgcaaatgactgtaatttcgcagacaagaaacagcccaaagtgaaacgtgtctaaacagaggtcgatttgaaaaatcagggctattacctaaatctgtaaaatacatattgtaataaaaccagcaacagcaatctccaataagtagttctaaaaaacgcagcttgtgttttgatcttctttatgcacccggtcttcagaggcataaaagagacctccctcctttcctagaaatgctttcatggcatgtgatttcaattgcctgactttcctagctgatcccagaccctgctagggcacccatgcagacacagtagccaacaccaccctgctggtgcctagggccaagatgaggtatgatttgagacacttaaggctgacctacctacattgctgttctcttaacgcaagtattatacaagtattttttataagagagacagagacagagacagaggggaagagagagacagagacagacagagacagagacaggtggggggagagagagagggagagggagagggagagggagagagagagagagagagagagagagagagagagagagagagagagaggggctgttttgttaggttttctcacagtgaagcatagcaggagcagggtgctgccttttcttcacccattaagcaactggacctgcagaagaacaagagctagtccagcatacagagagaagccaccctcatctttctccttctgtcttggtattgaacccatgccatcaagtaggagaggcaaacactctaccatggaactatatccctatatttttattttcttgctattcaaattcattgtaatattaaatcacttgatatagttgccttatattgtctacagttgtttaaaccaagctagattacaaagagctgtcaagactgcatgaatctccatctttgtgggtcaactggtgagacttcaggctaaaatgtgttagtaggacataaaagctacctcaaaaactaatgtggtaatgttagaaggtatagaataatgtctgtatttgtggatgtctgtcagaaatgtgtttttcgccaggggctatcatgaggtcttttttccctcacctctttctaccaaggacttgaaatggttctatatacaagatcttttttccccttggaactttgttttggtctaaggttactttaggattatgcacactatcaaatgtttgcccaaaatggcaatatttgactctgcttatgacaactatccccagatagatattgctaaaagtattcaatggaaacttgagtcggaggtgtagcaggatttttttgtttgtttgttttgttttgctttttccctccctcttttcagaagctctttatcaactaggaacaatgatctgtaggtgaaaagagtgaagaccttctaatgtctctgtgggtgtttccttaatcggctccatagtctctggaagggagcggaagccaaccagtgcttaagggctccaggtggacaagagtcattccctagagttctgttgggtaaccaatacatttatagttacccctaacttaagtctcttgcctgcaaattaagcttatataatttatattttaggattttctcttctagtttttgtctcaatcttgagagctcccaaagaacccccaagcttgtgttctgtgtagagttagaaaagcttcgacttgcttccaagtaaatacaaactcaagaaagaggtctgctggtcttgagggcacattctatgatcctaccactgggaaagcagagactatcaagtgcctagctagcctgggcggcctagtaaattgcttgtagaaaaaaaaaaaaaaagaggtggtggtgctggtggttataaaactggttttgattgcctttaataatacaacgccaatcagaagaaagaatcacaaacaaaggtcgctttgattttctgtgttgttgcctaaagctgttcacctcctcttcagctctttccaggaaaaaaaaatagaaagaaaaagaaagaaagaagggaagagagagagagagagagagagagagagagagagagagagagagagaaagggagaatggagaaaaggccaagttggcaagattcttccacttccttgttaacgatgtgttatgtgtagtgctgagctgatttggggggcccatggaagagcgatgacactctctaattaactcttttacactaacctcatgtctcccccatccctcaactccgaacactgttcctttttcccagacatctcctccgtctctcgtgtctctgggtagacacctggtgaaatgtaaaattacaaagtctacgtgttaatagagtgtactggtgtgatcaaggaagtgcagtggatatcacttggaagacaactacaccccctggtacattactttgataagaaatatatgtaataataagaggtcatgaatttgaaagggaatagagtgcacaggaagaattggaggggaagagacagagaggtagaaattatgtacccaagtataaaattctcaaagagattaaattaaaaaaaattaatcagaatgaaaaatttttcagttctgtaaacagagccaaactttccaattttgtgaggtaactccacttgccaaggctggtagctaattatctttcagccttccattatctgagagtcttcacatgcctcctgattgtcctccaccccttgtcaagcaaaacaaacacatgcaaagccagtataacaatagtagtctattcaaaagttgcctggaagaatttgggaggtggaagagacagggtggggaataaagggcctgtgggaatcataaaaatgggggaaaaaagtgctttgatttgccaaaataatttgaattaaatatgtactcaagttggccttccttggccaatggtgtttatctaaaaagactataggtttaggtttggctgtagaagacagggctaggttcagttacacatctggatggttacattttggatctggtttgactccctgctttctttagtaatgggttgttttgaaaaaactttaccctctcccttttttacccttttgtttcaagagataatagttgattttttttttcttcctaaactaatgtcacatatggcgtaaccacagcctgaaatggagacaacaccccagggacacaggaagcacacaagtgtgagttagtctttggaggaatcacacttctaaaagaagaaaagttatgacttctgtaaggtcctgtgccattcccaaggagccacacataaatgtaaaacctgtacagtaaaaataaataaataaataaataaataaataaataaataaataaatactacccagaagccagaagcagaatagaagatgagcggatcctaggtgtctggtttgtcctgaggatttgttattgtacatcttcaatgtgagtaagagaggagatgacatgatccctttctgtgtctcactgcagtcaaggtcagaacttgcagtctgttgcttttttttgcagcatctactctagttcatctaacaaattggcatttttttaaaaatggggtaaatatattaaaaaaacacaaacattagtcaatagccattacttataacatgtggcataaatgtttttattgatccacaaagtcgcctccaaacatttacatcatagttgtcttctgccagaggcaatttactcttgtgtgtccattttcgtaagctatggcatgtctaaaactccaattgtcaactgaaaactgcagtaatatccgatctttcaaactctgagtaataattggtttgcttgaaacccaaagactaagtgacgttaaattccccacattctagctcctacaataattgaaaataacaacgcaaacttaaaaataaaccatgttctaaagacttaatatgtaagactacattagtttaaatatattaacgggctgttttcacattagcctcctgtcctggaaaatgagtcccattaactcggctgtgtttgtcttaccataaaagtgggaacattttgtatgtttgtgnnnnnnnnnnnnnnnnnnnnatcgatttattttttaataaggctcatttgagatgttaatgtggtttgcagaggccttcttatctatctgtctgtctgtctgtctgtctgtctgtctatctgtaggtcgcagaagattggttggataagttggagggactcattggtaatttgaggagaatctttcagtggttttgctgaatggtgatctgggtccacagttcatggcttgcagatcagaagcctggaaacaaaagggttacttgttctcccatcaccggacgctccccactgaatttttttttatttaatgagagagagagagagagagagagagagagagagagagagagagatttggggtgggggtgggggaaaggattacaggaagggcaaggtggtgggggaagggctgagaggcaggagctgcagaactgggttgccgagtccttgggacttggaaggggccacagtaaaccgctcgcctgggtttccaccgcgcggcgtccccgctctgtgcgggtggctctcagctggcttccctctgccaccgagcgatcacacacattatttcccccaagataacacaatcaaacttgcatttaccgatatcctctcttcgcagcctgcttgagatgtgttttaataaataagtgttttatgtgaatgatgtagtaattgaaacaggcgccccattttcccccctcccttcgtcctgcgggaggttttgcaaccccaatctgcttggaaaataaaacgctttgtctccaccgccaccccccaccgcacccccacccgcgctcagtgtgtgttttatacgtgtgtatatctcaaccccctacagtagccaagagaaagcagctagccaatgagagagcccagtttcataaaagctgctctctgattggtcctgtgcgaaagggcattgggaacaaagaaaagtccctttcaggtatacaggctgagagctcctttggctccactccccctgtgcgtgtgttgtgtttcagttctgattccactgttccagaacaagcttggtgtgtgtatgtgtgcaccggggggatttctgtgttttggttttttttttgctttattttttttatttttataaaaaaatacacgggacggtctgtgacatttgctggtccatctttaataaaaaaaaaattgaagaaattataatttccaaaataaagaggctacaaccaaacacactcaatgcagttagaaggaaaaggtcaactcgctcccatacagaccgtaagtacggttgcgtggtgtgtcgctatatagcactttagtggggtattcatgcaggggaatgtgcgagttttatgcattgaaatgaggaactagttacagggtttggctttgcatttagaacagcccaagaagggtgaatttgattcagtggaggggactttgtaacttctttggacaaattaagcttgactgggcacttggactaacttagagtaaattaccttttgggctcgaacccaaaggagactaagagtgattcggttacacaccctggtcctccgtgtcaggtctcttgcgcaccttccccctcctttccctttctaccggagctgagctgacccccgcccagaccgagccaggcaaatgggaacccgggtagaacaagccgatttctctcctgtcacatcctcctgctcagtaatttaatagtaaactagggaatattcatccattacatgtaatgactgtaactaccattttccacctttaaaaaggcaaggaaaaaaaaaacccaccattaagagaaggtgtgtgtgtgtgtnnnnnnnnnnnnnnnnnnnncccaaacaacccccacaaatagtaacaatggtgtgtttattacaagtccctgtttgggagctagcaaaatgtttttctttgtttaatacatgaaggggagggggatcctaaatcccagcagctcggaggtactctgcccgcccccccccgccccccaggcgtccgctgcattggcccccttgggaaagccgacaaattggagatcagttgaggagaggtttataagctgtttctttaaaacatctgctttgctcttgtggccattacatttccctccttccgaacttccgagatcctagatggctgagaaatgtttcacattcataacttgtagcttcgcccactgtagggcgtgcagggggaggggggttgcagcggggagggagaaaccttcagctttttttttaaagaccagatcagtattttcttgatacgcttgtcaccatttttgttctcacgacaaccaattgagcccttgatcctcacgtgatgtgaaaggcttgcactgtaacaaaaccgctccttttagatggttggtgttgctaacgcgcccatcccccactctcccagccccgacatttccagcaaagcgactctccacttccaatccatcaacaattcattactgcttttagcttccaaacgccagctaattaaaaatactaagccaagctccgaggccatctgactaaacacaggagggggtgggcgagaggtggagagaggaggagaaaaaaaatagagacgcactgtttgctgtgtgtagagaaagagaaattgtcctggagaaaggtcgcctttaaaaaaaaaaaaaaaaaaaaaaaaacctttttgactctaattatcgaattaccacatgacagatcggcttgcgcggcggaggattttaacccctcctcagggactattctaagaactcggttctttttttctcaaaaacaacataaaacaggaaaacatcacatccttcaggtttccaagacagccccttttagacgccgttattttcccggctccaccgccccccgccccgggcgaaagctgctctaactggtttatcagctccctgcatcgtctgctccctcctcctccacacctttctttttctcctccagccgggctcctcatcccaccctttcttcttcttcctcctcctccccattctttcatcccctccttaagttagttggagaaatcaaatgtcaggacgagcggaaaaatgccacttcccgactaacaggcggaatccagcccagattttcagtcctttcttcttattctttcttccctttcactaatttatcccgatgttagcacattctgtctcgttactagaggacgcctgtaggttggctacatgagatcattacttactgatcacggtgactctgaagtctgcaacagaaagcggaatgagaagttcggaaaagttttttctctaatnnnnnnnnnnnnnnnnnnnnccctcccctgcccctctcctctccctctctctcaacaccctattattctgaatgcttgttaagaggaaaaacacccttcggtgctcgggttgtgaacgtgaagcatctctcagctgcacagtgacacattttttttaaggagaaaaggactccagagctttttgccaaatgggggatgggggagtggaatgatgttactgagtgattattttggctgagatgtgttacttggtttcttcctttttgatcatttggtgtttaagtaaaatgaggcacagggctgtgtgcctagtggactgagaaatgcttttttgatttgccggcctaattaaaaaatgataaaggatttaaaggtaagcattccctctctctctctttctgcgtctctctctttctctctccctctcactgtatttatttattttcttgacaatcaactgttaaaagggggctgatccctttaaaaaactgttttaactgctctttgtcaaacacacactcatttgtggtcactgaggccaccttggcgcagaccacttaaagtgtatgtcttaatcagtttccctacagtcagtagcaccatatttaacagactgagcagttctgtgacccaggggtatggaagaattatttagatggatttttctttttcttttcttcttcttcttctttttttttttttcctcaaaaaggaagatctttaaccttttccctcatactgtctttttactgagaaaaatactcttaaagagatctgtgcatatttcataaagaatgtgtagcttttggggaagggggtggtaggtatgtgtgtgagaggggaactgttgtttttctgtttcttgtggagaacaaaacattggttgtctagacaatgtgcaagaagaagtattaaaattagaaataaggaaaacttagtgacatcattttgaacactagtcctagagaactttgagggcctgtggtgttttttttttttttttttttttttttgttgttttttgcttgttttgtttttttacattgcaagacccaggccatgcttagggaatgtttaacagggtgtttttcttgtatgaatatccatgatcttttcctagggtagaaatagcacatgtgccaggcaaaaataaaaaatgttcaacttaaaaaaaaaaaaagccacaaaaacctttctgggcttgaatcagatccttggagatattttaatgcttttaaagaactggctatccccctgctgtttagagggattttagttttagctactgtaagatgcttattgtcggggaaagggggggtgcttttcaagtctgcttgttttcctttaaacatggtattggactgtggaggcaataatgagcccccagctctctgtccttctctgtgccccttcctaactcctcagtattaatggttttctatttcggtaatacccagacaagaaatattcgactttttccccccctccacaggagaagctggacctcgagtgaaggaagtgagatccctggacacatttttgggggcaggaaaaagaagaggaaaattgcaaggaaaaaaaaatttttttttctttacgagaaaacccagaggagctaaacgaatgtcccctcatccctcaaagaaagttcatcgggtttttaatctcgagagctcatcttcaggatgtccgtgaacgtttcgactgcaggaaaaggtgtggatccaaatacagttgatacttatgacagtggcgatgattgggaaatcggggttggaaatttaatcattgatttggacgccgatttggaaaaggacagacaaaaatttgagatgaataattccaccaacaccactaccaacaccactaaggattgtggaggtccggcctccaatgggacctgttctacctcagccttagctgatggcctaaaatttgcttctgttcagccctccgctccccaggggaattcacacaaagaaaccagcaaatcaaaagtgaaaagggctaaaacttctaaggatgctaataaatctctgccttctgctgccttgtatggaattcccgagatcagcagcactggcaagaggcaggaagtccaagggcgccctggagaggctactggcatgaattcagcgctgggtcaaagtgtgagcggcggcggcagcagcaacccaaacagcaacggtaccagcaccgggacctcggctgccaccgcgggggcaggctcctgtgggaaaagcaaggaagagaagccagggaaaagccacagcagccgaggcgccaagcgggataaggatgctgcgagatcccggaaagagaaacacgacctgctgcagggccaccagaatggcggcggaggccaggccccctccggtggtcacctctatggctttgggaccaagagcaatggaagtggcgcgagcccctttcactgtgggggcgctgggagtggcagcgttggggctgcaggggaagttagcaaaactgctccggattcaacgctcatgggaaactctatgctggtcaagaaggaagaggaggaggaggagagccacaggcgaatcaagaaactgaaaactgagaaggtaggatacgatcgccttcttgtgtgccccccactctgtgtgcatttgtttggggttgtgggatgtgcctccaggtgtcttacacttcctagtgctttcgggttctccgtgagatttctatgacgttcatcctttatggatgctatcccgagtgcagattttggctcttgcttctgctgcttgcttctgctggtggtgccagcgtttgaaaggtcatagggtgggaggctctgaatggtccaagtgccttttgccttcttgtaagagcgactgggcagccagcaaattgtccgtgtgtgctttgaccagaaaacctgctgcggcactagcttgagtttcgtcctggtttcttccctaaagagaattgtcgtctgtgttattgttaaccgtgtgtctttaggaacagggttctagttccctctgtggaaagggagtgtgtagtgttattgacactcattgttctgttactttcccccaaatagttccgtcaaaggatgtactccaggctgggagtattgatcactgactttgtaactatgcagtcaaactgtgccagttttgggtgactgtggagacgctctctactttgctctctcacccactgcagctagagccgtgagactgttatcacttcggtctttagcttgcctgggcagctgggagattagtaagtaagactcggaaagcacatttggcttgtgttcttgaaatgtgaggatccgaccaagggggccattggggcagcagggaagccaactgtggtttaacaatgcctgacgtgagccatttggacccctgcactcttgttgttcattgtcttaaagtctgtggttagacactgtgctggaaaccccctgctccagtgttaccttgattaggcatggaggcctggggtttgcttgtctgagatgcagttgctttggggtaatgtttgggaactggcggctatgtgtcctccaggctcattggttgggaggtgagagtggtgtttctgtgaaattaatctttagactcattccacaagttgtagcatgaagatgtagtgtttctatcaagtggttgtagtaacgtgatttcttctaactatgcttattattgtggtacgattatgtttcccctttctggctgtaatgatgcgaagaagtctcctggggattactcctgcatgaaataacacaaagttctctgattccctttattttcaacttcaggtgctcagagttaaagttggaatggacataggaataaagttctgattgtaaacactgatggaggcagagagaggcatagacaataccgtcaaacttgcaaaaggctactgattgcttttggaatccaaatcctcttagccttttacattgatgaatttagatcaatttaaaaaaatctcaggctttgcttcttactttaaatgtgtggtttcacataatttctactaaaagacagtttgaaatcttcttattacttagtacagtgggacatttacttttgttgccaatagtcttcaaattgcagctttaatctgctttaactatctggatgaattgccctaatccagtgctcacaatgctgtggttaaggagtcagagctatttgattggatccactggctgctgggaatgtgggaggttctggccttttgcattccccttagccttttaatcttccagccaaatgttcacattcaacaattttgtttagctggcgatcggaacatttcaggatctcaaaggctgctgtcatggcaactgagattagtgcgtggtgtcggctctccagtttgtgttcctttggctccccagtcacagagggaagtggctgaagaatggagtggctgaattattcgcacgcatgcaatgcgtcttcaggcagagcagtataaatggcatcctatgaattccataaatgaagagcgaacaagtcatgcccggaagcaggggtggaggtgggggcagggaagagagaggacgcggccctgctgtgtggaagccatgctccaacctcagccaccagagttgacccagaaatcattttaggatggtttcaggggcctggaaccttcagtgttagccactcttgccaagctgaggggttggcttgggatcttaaacattggtccttaaacactgccccacccccacccccaaaatgacttcataatcccatccatccttgtctctcagagatgacaactccctggcatgatagcacccagagaagagagcctaatcccactaacttattgggtatgtcaaattaggctttgttttagaaaatacagtggccgaaggatgcctgtttaggaagctagaacttaagagggcatacttgaaaacatgcttcacatctgaggcctcatgaaagaagtttttttttttttttttttttttttttttttaataaaaacattctatatgctttaagttcaacatacttgaagaaccaggttactggagcataggtaccttcagaggcaagatgcaacaagattttctggtttttctcttcttccttccttcctttctttctttctttctttctttctttctttctttcttttctggttggaaggttaaaggagattcataagatgcgctgtcactgtttaattttcacagcatgcttaactgtctatttttggtctgtttactctgtttcttcactacccagggtcatgtaaagcatgataaattggaccttatgaaacctaattaaatcaatgagtgttctggctcctttatgtggaaaccacaagtatgttgtaaaattcgccactcccttaatacgtgaaaaaaaatcaaaacaaaccataattccaagatgtttgagctgtagctctatagcccattttgtggttaagccaccagtgacatgtctgcctaagtaggtttgatgagttggcttttggttgttagaacctgcctctccaccttccattcctgcctttcaaagcagaatggtctagcattgaagctgtttgcatatctctcttcattgtcttacagtttagatttatcagaaaaggaactattgggctggtttaaatagttatataaagtactgttacaatcagtggaattatttaatcactagaatactgggaaacacacaagaaaaaaacaaaaacaaaaataaaaacaaacgagtcttaaaaacaactgacactgaaacagaaataaatgaaagtcagatagttgtgtcttaggattcttctatgcagtgcgtattccaagaagggttatttctgtaatagataaactcttttcatttccattgccttgtcttctgaaagatggtgtctataaatggacctgtctataataagatatcattcattttgttttattctcttgtagaaaccttttttacatgtcactagggaatcctgacacattctctaagtgcatgtgagcagtttaagaacatattttgattaatgacttttgtggctacatccccccactcccataatatagtgcgtcctgtgaattagggagtgcatttgatctacagaggaatgaaagggcaggaaggtcactggctttaatgaaacaactgagaccattataggtggacagtgtgttgttttgaaagttacatatggatttagctaaaggtggcttcctgtcagcaccaatcctccttccggttcaatccaatagacaccctgggaggtgaccaaggggctgtctaaggtgtctgtaagaacacacgaatcttggaatatcggtattatcggttccatcattgaattttgagttgaacatttgaaatgtgttaggtttgttggaggagaaaaaaaaaactgtgaaagtatacacaattgctccagatcgagctaaaaaaagataatgttcagctactttaataacttggcaaatagttcataacactaggagagaagggcagggggaggggtgggtgtccaaatgtcttaaggttaagaatatgctctcatcaaggaaaattgtttgggtgcaagatggttttaattaaaatgttataaagacttttttttttcctaagcagcacttttatagttagtaaattgagtgaatgctgaaagtgctaagcagaaatctccttagccacggaggtgttcaataaccagactcaaacaacagggagagtaccatctgttcttggtttccagcatgaaacacagggattgaatgaatggctgagatttgccccaattttgacaatgtctgtgctagtccacctggtacttcatagaaagttgaaattgcagtaacacacacaccactgtgaaaacatgtgttcccacttttttttttaaccagttccacttttttctctattttgggggagggtttcctgaagctcagccattggctacttcctacagccctcttctactttctagaggccctcacactgagggggtcagtgcttcaaagatctaaatgatcctgtcaattttcctcctgcaggctatgggggaaaagctccccagggctcaccctggtcatcactcttcattaaactaattttgtgtggtagtgctgggcactagtgtttaccagacacgggtcacgctctcattcagagccaccttctagaatccttgataaacaacaacacacttctgtaaggataactctcgagtatttggctctgagagacaggtattcctggctctgggtttagtgggaaccctgggtaaaacattatccggcctttgtttgaggtcttttattgaagctaatgactgggcttgtgccttcctgagataaatgacattatctctgagtgggctgacaggaagcagacatgttaatggtgaatctgcaggggagtatctgcttgggttctgacaaaggagcggagaagggacccctggttgtggtcattagcacataatgcattcttgctcatcctaagaggcccttgataattggaaagctattttagctacaagcacttaaatcataaatttactacctaagagtagcaacgtaaagtgtttttgttaagaagtatctgttctgctctttgaaggtggtggcagatgaggctgttggtaatgacatttgggagaagtggcaggttgaagcatttgttttagaatcagatgggcaccctctttttctgtcaacattgctcagccttccttctgcattcaccaggccaaaaagaaaaaagaaagaaagaaagaaagaaagaaaagtggatccaaagctccagggaagtcagttttgtatttgaagatgtctcgtgggagggggataaaaatctccttttttataagctgggaaagagattttgctcagtgatttgagtgtggtgaaacctgccttttgaagtgtaggttttaaaaagtcatgggtataattgagtttcaatgcaatttaaacgctgctgcttgaacgaagataattgccacgttgaacacactctagaggtggaaggatcacactctcccattctttactattaagcattgggaagtttgtcatagtaattactgtaacacaacatagttttgattgccagtgctctcagcttgccagcgatctgaacatcaagggtgtagcttggatcctaaacagtttatttctaagtcacctggagagcgttcttctgttatgtagaagccagaactaaggaaacattgggctacccttggctgcaacttcacagtggaatatcatttctttgctaggattgttaccagcgattatacaatgattatacatgtctgattctgggccattgaatatggtagggatagggaacaggtgaaatgtaatgcctttggtagtcagagactaagtaatgtaaagatcatattagaacctggtaaggggtcttttataaaggtctgagagtttaaatgatgtaattgcatgtatagatgttggattggtagtcttgtgtggtgtgagctctattcttaaaacacaaaacaaacaagtaagaacaacaagccaaggttttgagctggcccaaagggtgtaggcactggacaacaaacctaaggacccaagtgtgttccttagatcccacactcaagaaagagagaaccaactcttgtcatttgttctctctgaccctctttatgtgccctatggcaggggcacacacccatgcccaagggcagatgcacctataaataagtaaatgtactttaaaaataaaaaaaagaaccactaattttgcatttcactctgctagagaggggggggcatccctccctctgggtcaaattttgtctcccctctgaaatttcactagtgactgcttactttctgtaacaacttctcaattcaagctaaaggatttggcaactgtaacaaagccattgcaacaggatgaaaggttgtttaaactcctcttagctgtctgaccagcagttgggctgtttgtaatgttatttttgagagcttcaggggaattcaagatgatgaggctggcactttgttctggaagctgaatgttacaggcctgctgaattttgcttagaaacacctttgggaatgcagtagaagagattatggattctgcttcaaggactaaagtgaccacaaagcaaatgcttgagtcttggtagggccagtgggccttgaactataggaatgtatgtcatcagatgtttaaggagtcctttacccccagggacgtgaagtgaaactttaacatcaatgctctagctctgatggagaactcaatgggtagggtgttctgattaggacaagcaggcttgaaatggtgaacagacatctctgctgacattttcaaagcctctccccnnnnnnnnnnnnnnnnnnnntccccctccccctccccctccctctttctctccctctctttctctctctctctctctctctctctctcctcccatctggtcatttggacccagtctgattattattcatcataactctcagccatctcactttcttcatcctgggactcttcagtgtctgctagaactctaagaaaaatgtacatttaggtatatcccaataatgccttatgaatgtaggcaacacagtttaggggtaaataaaaacatattgattatatttttgtgtcgttcctaatggccttagaaagcacatatttagggttgagaatgggcttattatgttaaccagggagcagatgtcatggtgccacagacgtataattttacttaaagggacttttaaggtttttgatgtgttttcttttcctcttatttccccgatggcttctttttattgaagggtaacttaaggagacctggtagcaattttactgccttcccttgacagtttgaaataatagcttggtctttgcttgtgctgatctcataccagtgagcttgattctggtttttgtcatgtggcagcaaatttatttatttatttatttatttatttatttatttatttatttatttaaaaagtgtaatatgttttaaggaatggactcttttatatgcttcaattagcagcagacgacaaagttccagttggtcacactttcgtaaactcttggaagtcgttgcttgcccctttgattaaagaaaacttgtggtttggttgcaaagcgcatctggccttctggaagcttgcttttccttgcacccctgtgtccttcacattagtcactgagggttcaaaggtcgtgtccaagtttttccgtgttaggttagcagcctatgttggagggctgccctttagttaggtaccggccttaccgcacctctgaattccgctagcataaaaatcactgtttgtgcagattttatagtttagctaattcttcactggaaataggagggggatttggaaaacattcctctctcaccctctccatccccctttccaaacagtgctcaaccagaccggcttacttttgaatttcctgtcatctctttcactgattttatggatagctcatattaaaaacaataatgtttgacttggaaggcctgaaaccttgggtttttcattcttcatggggaactgtgtatttgcatgtggctcaccacagtacatggataacgccatcaaatctggtctttccgtttgggctcatggtcagcacaatagcacttagctctctgttccctggttccagtgcttttgtgatggaaatgaaattaggaccagagtctaggaagcaaaggagaaaatacgcaacagcaaatagaacctgacccttgacctacttcaaaagcaagcagtggtgatttaaaaaggaagaagaagaagaagaaaatcccagggagtgaaagagagggtagtccattttaattcggtgtgaagctgtgtggaaggtgcgcagagcgcagatgaatggtggccacccggtcaaccagacaaactgaaggcttggtagctgatgaagaagctctgagcattcccggatctgtcaactgctggaaggtacaatatgaactaactctctcttgcgtgctggctggggctgcccaaagggagcaacaggatttcacaaaggagcaattggtctccctccacccctagctcaatgcatccagctccgtttggacaattgtctccatttacattcctcgcccaaatcctttccccagccttttccgtcatggcgaagcagatgccagacactgaagtcgaaagccagcagctgtttccattacttcatggctctatgggcccttactagcctgctgcttccccttttcctcccctcccccacctggtaaagaaaggccctctcccttggactgggccccgacctgtgtgttagtgtgcaggtccctttattttttgtgtgtgatgggaaccagagaccagcctgcttcggtgggggcgtggcctgggctccttggggcgcgctgcttgctcctggactcactcaccctccttgcagccagggacccgtttatggccctgagcacagtaaatctgtcagctcttcaggacgccttcacctctttcttcatttgctccagcttctagtctgacaacgttcccctgaggcggaattctaatctgcttccaattagttgtaaaatgtgactgaaatttccacattatgactgctgttttacttacacgcacacatctagaaacaaattaatgccttcaatatttatttatttatttcttgagcctttagatttactcgaagaggaagagttaccgactattaggaataacttccatgggttccatcttctccactctcctatgagggatatattaaaacaagaggactccttccgctaggagtcccctcccagccaccgttcaagattcagaacgtactgcaaatgttttacaaaaaaaaaaaaaaaaaaagtagaatttctaaaataagttaagtaggggcccctgtagagtgttttaatagctacacatacaaatttacttctaagtatagcacagctacatttatttggcccagacacattgttacctttcaaaaattatttcgttatatggccaaaagctgtagccccagatagaggaatcaggtcgctctggcttgaaaaatagggttctgttaatgatgtcattgtaggcactaacaaataccctaagttgtgtctaagtccctggagcaaaacttcttggagctcttgggtcccccatccatggagtcccatggtttaagcccccagcgcccatgaaaaaatgggtggctctcaggtggggggcatctttacacatcagtactcatgacccttctcttcagtgaattttctcgaagttgttgatccacccgatatttgggaacattagaagggtttaaatcttggcctggaaagagacattaagaacactattttgtcacatcccctggaaactactttctcaaacagccgtgcggggatgacgtgagtacacatagcagtggacccgcagcttagcattggtgtagaggtggtgctctcggtgttaaaggatgtaaagccagaatttattggcactgtttatagtagagttccgtcctccagcatcttggcagattgatacaaacaggcgtaatgggcttgaaagaggtgtgaaggattttactgatggcaaagagcttatgttgatcacgtcactctgttggtttctaagtaacagctttccctgtaaatggaggtatctattgtcttttcaaggtctttgtcatataatagtgaaagacccatgttgattgattcttttttaaccctcctttttatgtgctattttcaatctctggaatcaagagaagtgtttatttcacttcacttaaacagatcttattttacattatttattatatatggaatataaattacttagatgatttttaccaaaactcttcatgtttattatctatgagacagaaatggctcaaatagtttttacaaaagccctttatttaaactaggtacaaaccccatagaagcagcaggcaagtcttttatatggcttcctttcttcttctttaatgtttggtagcaaaaataaaatgggcagattgaaatccctgaaattttaaggcatagggcctcttagtttgcggagccccgccccccagcttaaaaaacatggccatcttcatactaaaaacctcacaataggcacgactgtggtagcccctccagtcctggggttcactaattaccccttaatgaggtcagtgtgccccagtagctccctatcttgggaagaaaagcacacaggatagttggatttcaagtggatcttgctgtatttgcaacttagcataactgctttgaaggcccccagggtacttaattggggcctggcatttgggtttggggggtgggggtggggctgctgcacacagctattctttgtgtgtctggaagccactgtgcaccttggaagcattacaggcttttgttgctggtgcatagttttataaactctgaatgagcctcttacctttttaaaaccatcgggagagcaaaatagtgggtgaacatagaagtctttgagttggtcagcagccaagctgttaacaactgcagcagcagcagcagcaacaacaacaacaacaacaacaacaacaacaacaacattcagagacgaatgaatggttgaatattagaacaaaccatttgttgccaaactaagacttactcctcactcaaacctctgggctggtaggtgacactatgaggctgtatagtacagaaaccgaatgcccagggttgtgttttgtgatcgcgctcaactgtttcccccttgtcctttctttgcatgcaaaacaggtgaaagggagaaatgatgtagttatttaatggtgaggctgcttagccaagagcatttcttattaagaaatgagctaagaggtgtggatgcagcttcctcgcctggtcaaggcagtaaaactctaagatggctggaagaaaaggcttgaggactctcaaccaacttagttggttgagatggtggtggggagggtcaagcgagtcggtaagctcaggaggggagcagaagccaaaaggctgggtagtggagggcccttggtgccccatggtcttacccaacacattctccagaattgttggggcatttgtcagaaacatcccctgtttaattgggtagtggcatggttctgaatagaaagggactctccaggaaggcagtgatgtggtctacaatcaaggggccaaagagctgttgtctggcagcctaaaatcggtgtgattctctttagaaaaggacaggttatttatttatttttttgacagtaaattaccagaaacaatagcttttgttcccataggagttgtagctcagccttctaatctcatggataaagaagcttaggggtgtctccagtaaactactgttttctggaagtgtcaggctaaacccttattcattacttttatttttacatcaatcttgtgagtgagaactcctcttttgtctacaagctaccacacttcctgacagatccaattttttttttttttaacactgcctctgatctttttgatcatggtcaaagctatcccactggaacatgaaaaccatttgttccttacgcgatgcattcctcactattttatgtgtatgagcgtttgggctggatttgtagcgtgtgcaccacgcgcaggagaccggaagaggcctttggatgacctgaagttggagtgagggatggttgatgctggcagctgaacctgggtcctcctggatgacagctgggtgctgttaaccaccgagccacctctccagccccacatgaggcagtcttgaaaaaatggagcttaacaattatctagcctgcttaaccttgattgttttcttcctcaagttttggtactgctgttttaatagttggataactccgacgtggtatgacttcctattcaaatggaatcgggtaggtttattggtagctctcttctgtggacttgcacaaaacagggaaagcggagttgaggaacaaataggatataagagatcaggtcttaatggcttcactgccaaacttcttgtggctttttaaactgtgctattatttacatctgatgcttttctagtgatgtagtctctataagtgaaggaagagaacgggtttatgtctgtgagaattcaacataactcttaaccatagacttagatcttcactcttaccgctagaagtaccattcattgtctctaagaccactaagtgagaatgtttctaaatgtaaagaattactcattgtggtgccttctagttttcatcccagcacttgaaagatggaagcaagtagatctatgagttctcggccagccaggcgtacatgtgagaacctgtccctctgacctcccccacccccaaaaaaaacccacctcacttatatttgatttttcagtgagcattctttcttcaaatattaatgtgtgctcagtctaggtttacttaacaaaccaaaatgtaagtgtgaaaaaaaaaatcctagcacctgtgtgaaagcccagaagtcctgaagcatgaatgtccctatggctttaacctttcctgaaagacagcttttcttgccacttgtccttggctccgtgatgtaaatccttgctaggcttttaagacgtcaccacctaatcatgccctctactcaggtgttcagtttgacacaggtaggataaagaattggggagggcaggcgccgagttttctgcccctatgacttaatatgaattcctcttgggtcttgctggtcccgttgagcctgcatgatatgctatttagatggctcctttttgttactggtataaccatgtgtgggggagggaactgacctaagatgctctgaaaatgatttttataaatctgcttaccccaagtctaatgctttctattgtagcttatattaaaggcttaaggatcactttgaaagatgaccacgtgaatccacaagcctcctgcaatatcatgtacatgatttcctggtaccaactaatcttctctaggtaccggagcttgtgcagctgcagttacttccataggctaatcctgcccagttttaaagggacaggagttcttactagctgcagttatgtcccagtgatcagctagcacaagatcacttgctttgctagagttcagctgtctacatgttaaatcgtaaacaccttggagtttctgacaattgtgaacactgaagaagctggaagactttatacttgaacttcctttttagcccacatctttactagaacactggatgcacataattcttctacttattaaaatgatgtgtatgtagggtggcctgtgtgtgctgtgtgtgtgtgggcgtgtgtgtgcgcgtgtgtgttcgtgtgtgtgcgtgcgtgtgtgttcgtgtgtgtgtgtgtgcatgcgtgtgtgcgtgtgtgttcgtgtgtgtgtgcgtgcgtgtgtgtgtgttcatgtgtgtgtgttcgtgtgtgtgtgtgtgtgtgggtgcgtgtgtgtgcgtgcgtgtgtgcgtgcgtgcgtgcgtgcgtgcgtgcgtgcgtgcgtgcgtgcgtgcgtgcgtgcgtgcgtgcgtgcgtgtgtgtgtgtgtgtgtgtgtttggctgaggaggccagagatgttggatctcctcccctggaactggagacccaggcagttgagagcagcctggcatgggtactgggagtcaaactttcaacctctggctgaacagaatgggtttttaactgctgagctttttctccaagtcctcaaattgcgtttttaatctggtgagtgagtggcttgccaccatataccagtagaggaaggagttaaatggcggtgaaaaaaataggtaatgatttatctttcatctgccataaattctaaaagctttctggagtctccctcattttgggcccattgtcatttgttttaggatctaaagaatgaaactaactggataaataattctgtgcaatggagtagagtcgtcttcatgttatttgagcctgaatgtgcgtgcataattggagagattattggagagagagagtgttttgctgtggtagatgtggtttcaatcctagcgttgagcatagcatttagtttctcagcttacccacaaaatctgtgactaatttagtgaatgtgaagatttttgtccagatggttaggtttaattgtaaaaactggaaagatttcaaagtaccctttgggggagtgtgggaaatgagtaaacagcaagaaagaattaaaagtaacgataaatcaccaaatatagaatatatgtatattttatatttataaacacacactcatatatacttaaacatacacatatatttatatacaggcagggaaaagcttaaagaattgattatagcagcacgaaggtagaggatctagaaagatgagtgtgttctgcgtggttagctttccctgagctcagaacaagcttggtcacaaaggcggtggagttcaacttcctcggcactggctggacatggttaaggtcattagttattaactcactagatgctgaagtgggttgtgctctctcccctgagacttggcttagaagcccaggcctgcgtgttccgttcacaatgcagctgtgtaacccagagaggtaggaagtttgatttttagcacccatttcttcttctcaattccttcctgtgatagccatgccagaaggtgtaaaacaattgtaaggatgctctcccaactatttaagagctccttctctctatccctatcccttcttatggggccggggactgaaaacacagacgttgcctcttttgtgctttgcagtcaggatactgatgacctaaaccttgacctcataaattatctttctctttcccagaaaattttctttgaagttggtagcctaatagattctatactgaactctttttgtgtgtgtgtgtgtgtgtgtgtgtgtgtgtgtgttacctagatttatagggagagaaagaagtgacgtgccaatgacttcaggaaatatctagacaaaaggggaggccacaaggctattgacaatatctgctgtgtaaagtgggcattggctgtggaaaatggtccctaaggaagcaacagaaatgtatccagacatcagagagtgtcgaggagtgagctctgtgagctaaatcgatgtgctacatttaccatataccaattgctttcataagagactggggctgctttgcatgaatggaaggtttgagagaaaaagaaaacaccaccaccaaaaacaaacaaacaaaccagaggcctgccatattgggacggtgtttttcaggttctgaaaagacatgtctaagaggagtcaaaccatgagaagacaatccacagaatcatctaagcatggctcataaggtctcccagaaatggaagcaacaaacaggctctatgggtctgagctaggtcctctccatataccttatggttgcgtagcttggtgtttttgtgggactcccaacagttggagtgggggctgtctctgactcttttgcctgttcttgggacccttttcctcctactgggctgccttgcccagccttgagattacaatttgtgcctagtcttactgtatcttgttatgtcatgttgggtgaatatcctgggagacctactttgtttgtttgtttagggaaacagaggaagtgttggtggggtggttagctcggaggagtggagggagtggtagtcactaggaatacaacgtttaagaacgaaaaaagagaagtttggagagagagctttctgtgtgggagtaagtttaagtctcctaggctgctacaccaatggcattggagagcaaggttaactgaaggttctctatcctgtaacaaggaagtgctctttgccttgctcctcttggctaaattcctgcaaaaaaaaaaaaaaaaagatatctttttccatcttctgacagattcttatctggctatagtctggtttttctcccactgtttatcaagagctttgacctctgttagcaatccattggatggcttttactgacgatcctgatagtgctctgcagtcccaggtgaatggacagataaagggcagagataagaggctcaaaggtacagactgtctggtaggggaagaggcaggagagtgtggttgctgtcttcagtagcacgcctgaatgagtcatattttctgcctacgtgtcaggctgatttcaccatcagcttgctctatgctctagtcattttcttcctcctgtttctttctttcttcctctttccctcccgtcactcttctccctaacctaaggcctcattcatactaggaaatgctctatcactgagctatttcctccatcctttctgtagagatttcttttgctatggtaatacacataatgtgattctgatttttctaaccttcttaaaacttaatatagagcccatgattcaaatagagaactggtaaggacaggaggtcctagagacggatgctgccattcaagtgcactgtaatacaacttgagagcaagagtcatgctgtttttttctgtaggtttttttatttgttatgaatttcatatattagtccagttatgttgtggtttccagaaattattgcagatttctcatgaacctggtaagtcaattacaggcatcgaaataagaatagtgcacatcattgaaaagatgagggtagctttacacaggtcaggcaacaggaattccaaagatacaatgggttttaagaacacagaatctgtgtaagtagtaagtaatacattttatttcttcccaagcatcgatttggcaaaagggagttttgggtgacagagcccatgattgtgtttttttctgttggaaacctgggctatcttaagacccaatggaaaagaaggtcactggaaaattgtagactacttttgtcgctgcttctttcaggctttcaatgacaggaagttcctataatggaagaggttgggtctcagagactgagagagctgtggtttgaagctgtattatagggtacagagccttgtcaagtgtgctgtttgagatggaagacaaagagcgcttgcagaggaaggagctgcgacagcagctccagcaagtgatgttgtgtaagagggggcttgagtttggaatctggattgattggcttggacacaaccacaattttctggattgtacttcctcaccgttttcttggctgactgcacatgctgttaaatcccctcagataacacacaaggcatgtattttgcacagtctgcatccagattggattgggacctggtcctaggccccatcatgcagggccttgtaggctatggtgaaggagtttatattctagttggagtgaaacaaatagcatgacttagttagatttaaaaaaaaaatcttcctctgacatgtgttgggtggagagagccaattgccagaggtgcagtgaaattgattatggatttttccagaaggtcccataagacacagtagatgtcttcattagtcctagagttaggttgaaagtggtcatgttgtccaaaggtaaagacagactaggacttgatctggagttgggaaatagtaagagttaaggacagcagctgaacgggatgggggtggggtggggtctgagggatcagtagttatgagtcacttttgtttgtttgtttgtttctgttttttgaaacagagtcttccatattcctgactggcttcagtaaatagtcaaggatgaccttgagtctctgcttttgccttctgagcgctagcattgcaggcgtgtaccagcacagccagctaggatacacctttgacacagcctgaggcaatctgacatttgtgatggttagggtccggacaccgacaaggatgaagttgatttggaggttggtgggctgagagaggtcacccaaagagtgagtgcccttagaaaagacaagagagcagagatgagccctggagttttaagaggagcctggggcacgcgtgctttggaagaggaaaccccaggcaatctggtgttttctggaaagcaagttttgaaattccatccaggtggcttggatcatctgtgccaaatgctgccaagaactcaggttacgatgagactcagaatcgatgactgctaaactcagcaatcatagtccttactgaaacacaggggcagggaaacaagatatcactgaaagacttaggttattgaaggagggggatcaggatatatccaaaaaaaggttagcgtaaggactgaaatgttaatctaagtatttattatttaccaaggagtgattatagctgtgggtggagctcagttgatagagtatttgtctagcatgcacaaagccctgagatgaatctacagtggcttctttagctgtaaagcaagttcaaggacagcctaggatacataagaccctatctcaaaaggggaccagaaagtaaatatctatcactttcaaagtgtaaggaacttttaatagcctgtttatgcactgctgtggaatggaggcaggcaattatactagagcggaggcaataaatgttctttattaggcatgagggtcagggaaggggagatttggtttggcgggggtgggggggtgggagtgctgctttggagcttggcagttgaatgagtcttctattgtagcatggaaagatgaggcttagcaacatatactgagttgatagaattagtggctaaaaacaaaacaacccctctggattaaaataacagcaacatctagcaaatttttgctggcgattacacaggccttgcacatgcaaagcatgctgggtaaaatacgcccctagccaggaagattttattttaccatctgtgcagcattgttatggtgttaagggacttagaaatttctttaatagagatgttttagacaacaattgtgtatctgcccccccccccattggtttagggatctttgactactctgactggtttttcaggagtagaaatagtagaaaagcaaggtgcatatacgtgactctgtttatttctctatttgtacctttatccatctcttcattgaacaagtcttttctgagtgcctgggtctgggtctccaaggcacagtagtgagcaagccaagtcttcatcctgtgaagcatttattatattctgagttcttatggagaagccaccgtattgtgcgttgtgagggggaacgtagcaggggaggatggaagagagctggttgaagggagagtttatatgtgtttgttctggagtaggacgtgaatacagactgccaaggaccatttgacccatggaggcaatcaatactagacccagagtgcagtccctgaggtgggaagtgtttgcaaacctgaggagatgaaagtgtccaatgtgtcatgagtgagagatggagatgacaaggaggccgtgtgatctcagtggtattagctaaacttctgaggccaccccagatctttgggtttttcatttctctgtggtcccgggagatggaggtatcatcttgtgtgaaatatgtctatcagtcccacaggaatgctgcgaatcccaaaggctattggtagaaccttcctcagaagacattaatgaaagaatcactttccaggtggagtgttttctcagttctgagtattcacacttgcacacaggcacaactgtgcacgcacacactcatgcgcacacctcatgtactgccaagttataaataacgttgattattccatcttcgaaaaacaaagttaaaaagccatgggctaatgattcaaagaccaatcccatttgttttacaccctctaccttctcagtcccttggcatctgacaaatctacatgttgggtgtttgtggagaaggttgttaatcccagcacacagaaggctgaggcaggactgcaagtcagaggacagcctggacaacacagagaggtcttgtcacaaacaaacacacttaaaacaaaagactatgtctcctactttgagacctgcctcattaagctcaattagttgtgcttagtaaattactgctttgctatgttgtgttggatacagaatcttctacgtagcccaggctggcctcaaactggagatcctcctgcctcagacttaaagtaattcttaagtgactttaaaaaataaaaattaaatcactacatgagtttatagaaattgaagttgtaaatatgtagcccatgatggaaaccaagcgttcctgtccctaatgcttggcccctcccaggcccctcccactaagttccatccatagctttcttgaagtggtccttctctgtcagtcacgtgaatttgcaattcgcatctcctgtacaatgagagcatgctagagacgcggatctgagcatttctgttctcgagtagctatgttttggaaaaatcacttgctgtccttggattccacgagttagctgggctggcagcacgggggctgttggcaacctttctcagttataagaaatgtcctacggaacatctgaaaatttaattccgcccccagtcccctccccagccgacaggatggtgtggatcacccaacactagagcattcagtgtgcacttctctacaactcaccgtcaccgtcgggtatgattttctggcttcaatcagatagggacttgtggtttcaatttgtatttttcacgagtatgctttgaaaacttgtaatctttgcctggttttatggtgaaccagccactttttgaccttaaatatttcaggtgcaggttaactaatcacactcactttctacgttttgcaaatttcttgcttgccgccttatgtttgcacccccccccccccccgaggtctaactacatggtggatggtttgcaaatattttttttcccatctcttatctctggatggtgtttattcatgtcccctccctatccccaactaccagtcctgtgtaaaaatcttaaactgtgtattgaagttctataattaattttccttcatagatgttgagctttgcaccggcttagggagaccttccatatcctaagatttattgttttctactacttactaagtgctgtgatcatcttctaagttgtttttgtttttactgagatatggtctcacaatgtagccttggctagactggaactccctatgtagatcaggctggcctaccactctcagcaatccatctctttctgcctcatgagtgctggaattaagaacatacttcactgtacccggcttaaacgttattgcttgatcagatctgtatttttcaattacccaaggaatgctctgtctcctgccccactcccatttcccagggcccctgccctgttcttttgtgcacttttgagtacagaatcagatgacacatctgaagattcatattccactccactctatctcaagaatggttatttgtatctactcataaaatagctcctttttttaaaaagtcatcatagtaccattaaataccagttcataaaggtgttttgcagttaatttgtgggcatggccaaatgggagatgcagccaaaaatacagacagtctagactcagggagatgtatggccaggacacacttagtcctgcttcctcaaatcctagggcaggagcttcgaagcacagattaacttcttaagtagtgaagatgagccaggctgctcttggttgaccgcttaggcttagtattacggacactggcagggcaaaggaagtgtttagggggtgtccaaacaatgggtttcatcaatttcttccacaatcttacccgtgcagcaacaccatctctggtggtcagctgggttttcatctcttttaggataatgggcaaaagccactgtttggggtgatcttgtcttttatttttatatgctttctttctgggactgaattttctgaatgtccttctatttcccaaagagctgtaaccctcctatccccatctctactttctgcactttaggcaactgtctcttctctgcaccttctccatgtttttctgtgatctgtgcctgcacatttctcctgtgcgctgggggacccctgaggacatttttacttatttttatgtctgtcagtacttgttgagctgtgtcctcttttcctggtgtcacagggtagaggagaggcttcagcacggctcccctggatccagacctttttatttctccctctcttctgagaacagagacaaagacacttggaaatgagctaagttttcaatctgtcttgcactcacagacacttgtgataatataaaagttccgttatgtgtgtagttggttggattgcctatgcctcctaagtctggtagggtctgtctgttaggttaaagaacatcaatgaagtgactaactcaaaaggtttatattgcttccgcataacagactgtggtgatgtcctctgtggtgcgagaatttttttttgtctgatagtttctttgttaaccacaaaaccgccagggcaaaatggacaactattcttccaaaaatggggggaaaaccccttcaatagttgaatgaaaaagagagatgcctatgggaaagtttgtaccagcaaacctgatttgcaaaagaaataaaatagacttgggaagatgtttggggggggagggtgtaaaaagtttgatgtgtttatgtgagggcctgcagatcattggcacacgttaaaaactcagttggaaaaacattcccccataattctggcctgggatggtatagacagaattctctggggattgctggccagcccatctagcagaagtggagggctctgggtttagtgacaaaggttatctcaaaaaataaggtgaaaaataatcaaggaagacatccaacgtcagtttcacatgtggacaccagagcacatatatgtgcacccaaacgtgtgcatatctgcacatgcataaaaagggtcagcctatgtgtttggagtgtgatgagctcttaggaactcaagcatggaatttgccctttctctctatgctaaaattcatgaaagaacttgaaacatgacggtgtctgagggtttctgtatgccatcattgtttgtactcatctgtaatcaatcattgcccataactggtgtggaagaggacagtggttttggcagatctttgtggtgcacagcattcaggaggcagaggcagagaggcagagaggcagagaggcagagaggcagagaggcagagaggcagagaggcagagaggcagagaggcagagaggcagagaggcagagaggcagagaggcagaggcaacctgcctgaaaaaaagagttgaacagtgatttcttttttcttttctttttacctttggcataagtaaaagtcatcaattattttttgattttgatacactaatctttaatcttgttgcctgaggaatgtttcttgatttcagtagcatcttcagttatgtttaaggactttcaaagtcctattggttttaagataaccttcaaagatgttattattatatacctggtttgctgacaaagaaactcaggttttgtatgaatgtcagaaccctggtctagaaagagatcctttaaaaaaaatttttttaagtcttgttttctttctgtagtcctggttgtcactatgtagaccaggctggcctcatatttacagagatcgaccagcctctgcttcctgaatgctaggattaaaggtgggggacattgtgtctgcctggaagcaattagagtgtgcactgtaaggagaaagtggcgcaatgcttgcctgaattccctcccggctgatcagctgcctgtaggttaaccagttaggattttaactgagcctctatggttcctgtctccagggttgaggagaaaggaaatagagacaagaatactgactggaggagcttccgtgaaggcgggccttcttcggctccaagtgtttgaatcagaatgcaggctctttgatttaaaattacttgtcaacaagcccttgaattaagtgacttactgggaaccaagcagcccagactaggaagatggaacaggaaccccctgcttcgtttccttctcctaatgtttccccccattgccccatgctgatttccaaatgaagaacaacaaatgaaataacaggcgaacactttgtaaatatagagtgttttacaaatccaagcacaaacaaagctgtaagtggtagggaaacccaggccacgcattttgtgatggcttctgttcatacattagggagcctgatgggacccccactaaacaattagttaccagctgtttgctttaatctgatcatttacaaaaatacagcagttcttactggtagtaaatatgatagacataaaatgaaagccatgcgggtgattgacattttttttttaacgctgtctatatgggtggtggaaactggttttaactctaattccagaaatatcaataagtttatatctgtcttcccgaaagatttggagagaagacactgaaggcttagagagcacacattgtgatttctttgacaatggaaagcaccgtgctaatttggagaaactcattaatgtgtaggttaatactagtagtgcctcttaattaagtttcagtggatagaaggagtattaggaacagaatacataggagatttttatagaatctctgattgaggcaagccaccggttatttctactgtgcatgctaatttaaaaataattcaataacgattcaatttgtgtcatcctggcatttacaaggggacatgaagaagtcttgcttgtcattattcaccaaatagcagtttgtagacccttacaagttcccatatgttagtgaaaaacattttccaagaaattggcaggatcgcactttgtagcccatgccagcttcttcctggggccaattcaacagagaagagagagaaggcaaaaggaaagaaagaaaaaaaaaaggccttccttgtgttagtggctgaattactctgacaggctttcaccttgcccctcctcttattaatattctttttgatgtgagcttgtaaaacagaggattggctgttaatctccaagatctcaagggcttttggcagtggcccataattgatgtgttcacatggctgttgtctgactactaatgatcagacagcagcgttatctaccagctaaatctgtgttgcttataaatcacacttgataaactgaagtttcatttcttcaaagagtccgtacagaatgccaggggcatttcatgattctctgacagcttagattaggtttatttttcatttctgtttgacaaaatattagactccctaacgcaagggaaagggaatttgttttgtttctctaacgaggcagttggagggtggggtgataagcagagaaggatggcctgttttctacccagaggatgtacagatcggggtggcagatggaattttcgctattgttgccatccttcaaggtgagtggagtttgatccatggcatagtgaaagacaaagggcagaggaaagttctaagaatgtggatctgggttcagattgtgacacggccagggcagggtaaccagaactgtgagattacagtagccattcagtcacagtgtgtgttgagcctgtgtgtcaggtatgacttcctcctatggaaggccaagaggaagaagacagaaggttttacaaaataaggtaacagccacagaacttctgggttctgtcctttaccactcgctggggatacttatgcccgtagacgtacccagttccccctccaatatggagatttgaaaccaggataggatatatataggatgcacgtttacagtgcgatatgactgggaacttctgctaagtcatggttgttcatttggccacagactcctgtggctctgagctaacttctgccatgtataaaagggaaaaacaaaaggactgaatttcatagcccattttgttgcttttctgtaaatattcatgtcctctgactgttcttacaaagcattttgctaaagcactagtttgtgtgtgtgtattatacatatgcatatatatatcatatattgtacatatatatgatatcgaatatatacaatataatatacatgatacaaggtctctatatgtagtccctgctttcctagaactctctatgtagaccagactggccttgaactcaccaagatctttctgcctctgcttcccatctgcaacaccatgcctgtggtttgtgcccataaatcctgaagaccacatattttcaggtttcaaaaaaaaagatggtcaaatcaaaattgtgatatttaagaacaaattttgttttgttgtgtctttgaggtagggtttcattctgtagtccagtgggcctgaaactattggtgattcttctgcctcagattcttggtttctgggatgacaaacatgaggctctatgcctggtttggaacctaggctggcctggaatttaattctcctgcctctgccttcagcagtgttgggatgaatggagtgtgttagttattatgcctggatgaaacaaattagaaacatagtattttaaagagaaacttaaacaaatttgaggtgtgttagaagttaatttctttaccaaaatggatagctttctgggcagtgaggtggttcgtttaaatagaggcatttgctctcaagcctgaggggctaagtttgatccccaagacctgcatgtaaaaggagagaactctcacaccttgtcaaagctactaaagtgagtcccaccagtccatccctccccacccagtgcaacctaacccaaccaagcacagcttaagatcaaaagaggccaaagccaggaaggtctccaagtattgcccttttggtactttttttttttttttttttaagatttagtaggaattgtgtgtgtgtgtgtgtgtgtgtgtgtgtgtgtgtgtgtgtgtgtgtgtgtgtatgtatgtgtgcactcctgtgtgagcatgggtactgaaggaggctgttggagtccccaaagctgggacaacagttagttatgagccatggattctgggaattgaactcaaattccctccaagtacaggctcttaattgctgagccatctctggagcccagtttttatgttttaatcctaggtgccaaatgtattccttatctggcaggagtggcttgacatgaggattcccttttcctagaaatagttttaatgctgtaattaaaattagcactcccatcaaggagtgaatgtttattgataagcattagtgctgattaacaaagaaatttacttatttctgctgcttaccataccatggttgatggttccgagtaattccgttttttattaaacaaaaaacaatttcagtttaagttgtttgggttaaggttattagattttaatatactggaaaaatatccgcgattaacgttgagaagattgctcttcggctattcaaatcgaggcttccctgaattatgttataaaattagcaatgcagggattctaatagttgtaaaatatgggaagaagtgcatttagaggtgtggagtgcaatttgcattataaaaatgtgtgtgtatagaagggctggattatgatagtaaaaataaaatactgagactgtttgaagagtttttaaaatctcatctttaaataaaaaatccacctgtgagttttataaagtgtatagccattatggcaaaaataagcatgaattctttaatttttttaaaaaaagatagcagtttttcttgactgatttaaataatgactcaagtcagcttgatttaaatttagctgagtctactgctaaaactgcaggtgtttactgactaactggagaagtgggtatcattttaatgtagataagagaagctctggtggccaccacgtgctgggagtttggtaatagcgtgtggagtaagcccaggtcaccttcagaagagcacatcctatgaaatatatgattcacatgttaagaaatcttgggcacttggagcacccctctgaaagatacaaccacatgtttgtttggaagtcatctctgctgcttccatgtgactaagatttatagcagatagtatttattaggtatgaatgaggttggatgagggcccttgaattagcaaggccaagctcctccatggccactgtgtgtgtgtgtgtgtgtgtgtgtgtgtttgcatgtgtaaggtgaggtcaatttcaagtctccagtgttctcctttgtctgcctcataacagtgggtcttactggcacacgctcagctttttacctcggtacaagagacatgaactcaggtccttacgtttgtactcactggttgatctgtcttcccagccccctgggatagtctaaaattctctttttgtttttgtttttttttttttttttggttgtgtttcattttatccttttaagatttacttttgcttatgtatgtatgcaagagtttttttaattttgttttgtttttttttgttgttgttgttgttggttttgagacagggtctcactgtatagctctggctggcctaaaacttatgtaaacaaaactggcttcaaactcacagaaatctgcccgactctgtttcctcactgctgagattttatatatatatatatatatatatatatatatatatatatatatatataatttatgccaccggcccagctctgtagaggtttatgtgcttcgagttcaagcaatatccaaatatcataggggccagagaagggtacatagaactgcaagcagttgtgtgctgcccctctgggtgctgggaactaaaacagagtcctttgcaagagcagtaagcactcataaccactgagcactcacaaccactgagcactcatgtctagcgccgagtctttggaacttcttctaatgatctagattatcttctgaaataaaaaaaatgtctaaaaatattctggaaatatgaatgtccagagaatgtgattctgttaacacctctgtctgggtgtctataaataaaaggcactcgcaagtgtgaaaggttaaatagagattgtaactctcgttttttaatttgcatttgtgattcataaaggtgcttttttttttctggaggttttactgtgacatagttgccacaggccttcagagtgccattttatagatgttgactatagaagacccgacccccaatcttcaaccctgggtttgtccaaaatacaggttttagaggaggaaaaacaaaatcactctttgtccaaatctcatcaaacaccggattctaagtgactgtaaatattgaatgttactttagccaccttagcctgtgacaaattaaacagaccgtgaacttcactgaactcggtgccttggggatcactgggcggaccaggagctggcagcttggaacagcttgactccccacaggttttgtgactcctcttgagatgaaggtcacattaccttttctcctggctgctggggaggctcaacaggttggggcctttaaggctttttccaaggtgagtcaggagtgagtaaggatgctgaatcagaggcctcagtctgctgagacagaagctcctggtcggtgagaggaccacacaccacgggtggtccagagctgtagactgaagtgatggaaaatgctaacatccctcatcttctggaaggtgagagacacagggagaccttcagccagctcctggtggtgttgaacttcccggacctcagaaaccaacttcctcttaaatctggtcttctttgattgaggctacctcctagtgactaggaccattactctgagcagtcttcctttcttcctctgctctatttgggtttcttggactccttcctccttccttccagccctcctgttttccccagagcatcgcacaccccctcccccactgccttcatcctgtgtgctgtgcattactccagtccagcccttgggtcctgtgcctacccaggaaacatttccctacagatatccctctgcctaggttctccttccaggggctgactctctctgtcctgattaaaaagaaagatacgtgagaactgtctttgaattcatcatctcccaccttctctaggcttggctgtgtctctcccttggagttcagccatggcctcttaaaacatatctttctcctctcctctctctctctctctctctctctctctctctctctctctctctctctcacgctctcctccccccccccccgtgtgtgtgtgtgtgtgtgtgtgtgtgtgtgtgtgtgtgtctgtctgtctccaactttgctctctctcatacattttcatttagagtccaacatgggctttaccgggtgagccagataatttttctatacccctacttcagaaagaagcccacactttttttttaaacccctaggttctcatccttgcctggactcttgactttcctattgtgcttcctggctccctagactgtcagtcccgtgactaaggtagcattcagaatggcttagctctgtcctagcccaagtcctacgcaggtttataaatccactacagtacactcactgccccacccccttgatgctcccacaatgccttgggcttaactgaccatctgaaccctgcccatattctcgactctgcagtgactattcatctctcctggaacaatgcttgccacatagaggcacctgacagaaagatactggataagaggatgacttccctaacagtgaggcagctttcattagcaactcttacgaaggggagggcatggggtcagtacatggtccttctgtcagaaaaaactagctctgttattcaatacatttcgtatcggaagctaaataataatctttcattaggagccttcgtcctcagctttggactgttagttcttttcttccttctcttctatttttctgaaacaggttctatggaactaaggatgatgaccttgaagtccagatattcctccccttcacctttcgactcctgggatgacagacatgtgcccctacacaccaaggtgtttgttttgatctgaggtgaaatggcttggcctcatttttattaaaagattttttaaaagaaacatcttgagtgtgttcgctcacacccagtcatcccagttattttgaagccgagagtctgaagctagcctgggctactcagcaagttccaggaaagtctaaggctgaagtgtgagacatcaacagcaaatgagagagaactttttaaaaaaaaatgacaccagggcttccagttgttattccacaaatattgaagacgatagtggaggcatctcctcctgccctgcatgttattctgtggataaacttgctcagaggatacttatcacgctttagaaaaaagttgttctcactagagagagacctattgggttttaaaaattggttctgttctcagaagggaaataagctttaacttggaaactgcaatttacttatggagttgtcttatgggtctgggggaggacttaacctaacaagtatgagttaaatgaccctgggtgagtctgatcctcaaatgcaaacatacatagagtatgtgatagtgaacttggtagagggcattacagatgttactgggaaaattcatgacttctgatttgtttattgttcttctttcccgactccgcactccctggcttctggcctgaacagacagcctctcttttggcctttagtttcgtcatttctcaaagtcaaatgagaagacttacagctgccttttagtcgaggtgtggtaggaatgaatgtgttgcaatgtgtcctttaaaaaagataggcatttgataccaagatagataaagtcaaaattgttaccgtctatggttggcccatgatgctttggtaaaatatgttttgaccctttgcaagacactgcctaagggcttgacgtgactcagactttcccttgttctttgtcactagcagcgtatattgtacagtgcaatatattttacaagactatctttgggtggttggaagaagtcacctaacctgagtagagaaaggattttagttaagaacagaaacaaaagactttcttgtcctttcttcattgtccttctgtcctccaagaaatagtgtccacatataacagagatgagacacggctatttatcccatttcaacctgacttcatgagaatttaggatccctggaactacagtgcctgagttcaattgagttgaaattgacccctaggctctcataggttccctatgctgagcagcatctgagttcacttctgggatgccttgtaaagtaatgggaatgagccttaattggtagaaatggaatttgggtagaacttttctcggaactcaactttataccaaggggataataaaaggattcttcccaaaaagaaggcgccctttctagtacctgctatgatctccaccaccttcctcagtggcttgtttttatattctaagtatctttggaaacagtatgcaaaaaaccaccattcactgctactatgcagagctcaccccactcacttttcagaatagattgtctgtggttcagctgtggggcagtagtctttgagagaacacaatcgaggctaggtatgtgacaactaactgataggatgcagtggaagagatctcgaggcctagatctgtaggaaatgacatattgagcatctttgaggggagattttgtttagcttccaaaacaaaaataaaaacagaacaaaacaaaacaaaacaaaaaaaactgagagcattgggctgagtagtgtaattacactgtcagcccacaccatacctttgatagtgcttggaaaagagccaaagcgagacaaggaagcttcaagacatgctgctgttcaagcatgctttctccgtgggcttgcacatagggacatgtctggggtgattcctgatggacagtgacaccctacccatccacccccataagcagcattatagagagcctagattgttgacattctgtgtgtccagcattctgtttgtcttggctggaaatggaagcaggcttcctggcccaggggtcagagccctggttgtgactagactctagcagcatctcagctatggtttcttccctctggatgctgggaactgagtggagggtttcatacaagctccaccacgtactctaccattgagttaatcctccactgctcaggtgtgcgcatgcgcatgcgcgtgtgaggtatgggcacctgcatgtattatgtgttctgtgtgcttctgcataccctctgagaggccatagaagatctgctctgtcgctttctgcattattccctccacacaagaactcttaccaaacctgagctaggataacatccataaagccccagctacctcctcctggctgtgtaaacacccacctcaacaccacaaggtttacaggcccgtgctaaccatgtccaacatttttttcatagagtttggaggtgcaaactcatgtactcctgtacaaagtcctctgcctctggggctaggggtaggagtttggagggatcacagtatttgtgtgcaaacttcaaactgtaggcatttaaagtaactcaggtgcctggcttcctgtgtacacaaaaggataagaaattccctatagaggaggcattctctccgtctcatgctctgttttacatttagagcaggttgctgcttttggctgaccttggccggttcaaattcccgcttggttgctcttcctaagagacccttcatctcttctcatctcctcttcacgactttgtgaagatcaaatgaaaaaaactcgagtgcacaatataatcctgcctatgatgtctgtttgaaaactattctaatccctttacgttatgtgcgttaaacagtagctcagaatgcgaactctttctacaaacaaatcgagagcaacaagcaggcaggacttttgagtttttagctctttggataacttgcccctcccctgcattggggatcttgcttctgcctctctaatgtggagacacagtgttagaggagaaccggtcccttcaatcattgacatgagtttacccctaccctctttatttttgcacagcaagtcccaaggcataaattgcattgatcttgtttctcagaagtgtccaccacatttaggagaggctaaagtaagaataatgagcaaagctggcgctgttctggtttgtccaccggagatggaaatttaaacgtgattaattttggattggggatcagtgtccaaggaacatgtttttaagccgactcggctttgctaatgcaacagtgacgtcaggcagctgtctaacacagatttgctgccacagtggcaagtggtcacctccaaaaagcctggatttctacttaagggcagagcagtcttctgcctaatgcgttttaaattaagaggtgactgtgggcaatctaataaaacagccaaataccaggatatgaagaaaatgtgagccttaagtacccatgccccagcatgcgcagagaatcaaaacattgactatgcaaactgaaacaccactcctcccgcctgtggcggttggcagtctgagaatcccaggattgaggggttaacggcaggatccgtgtggagatttgtgagaacagatgggaagaagctcgggcaccgtgccctgtcagggttcaaccccgatgcaggccaatcggagtgaggtggggtggggtggtctctgcagtgaggatgctcctctgtgggaagccctgggctcctttctcagccctcccggcaacactcactggctgtctcctactgcagagccacgtggatgcgtctttgttggtctagagtgcctgctgcagggcccctcagcccagcccgggagacccctctgtatttgctttgggtttcctggtagtgcagaccctccccggctgacacagtcaaatgtgcgatgatgaaaagcagccgccccccagcactccagcttttggagccttcctggctcatcaccactcaggaagcccttgaaataaggtgaacagagaaaatattgccaggacctgcagaggcgtcccccagcccccagcccccgcccccgnnnnnnnnnnnnnnnnnnnnaatagccaggctactgcacagcgtgcaccaacacctgggaataatcatgcaaaaataacagtgagagactgcggcgcgtctgttcttgacattaactttcctcagtttgacaggctgccaccaccagctgttagacttacgagtctttttttttttcccttccccgtcccctgccccctccacccccacccccgagatggctgctttactcttttgggctttaataggttacatcagtgtcccatcaagatgacagacacaagctttgacaaaggaacccctgctataactggccaatgcttttttccccctgatctttaattttcgctattactactgtataagccttccccctcccccgtgagttttaatgagcactatcttattagaagtatgtttctccccccaggaaggtatgcagagttgcctttcttgaattgccttttgtactaaagcttaacctttggcctctcaagaccaaaccactcatcaatttcccttcattcattcaagtctcagatatatttgccatggtggtaataattctgacggtagcactggctccgacttattgagtgttactctgtcctacggccctgaattaaggttgcttgtaagacaccctgtcacattatctaggggctatttgtgtttggtttttgtttgtttgtgaatcacatagagatgtagtagcttgcctgagcatccatatcgaataaccaagctaggattcccactctgaagaccacactgtctgcacctcactgctgatcacgaacgtcccacctcttacactcttcccttggacacagctctacaactgaagttgtcatttcaactcatttatgattaattaacgttgattgattctcttgatgaagcttgtcagccttgggggataggaccttgggttcactcttttttttctttcctttacctttttttttttccttttccttcttttttggttgttgcaggttgctcagagtttaggggtagtagctctttagtggatgtgagggttgaggagagcaggagtacattttttgggaagcccgtgtgcgaaaaggtgcaattggagattagaagacttcttggtaattcaggactcatcaggacctccgggatactcttgtcattgctaggagactataaattgagtgtggatatccagaggatggacagctaccaggtgccagtgtttgaaagagcccgtttcctcaggctgagcttctctggattaagcacccccttttcttatactttaacacattttaaccaaacttagctatgaatttagaggggattacagatttatgttaaatatagtagcatataaaaaacagctttgtaaggttgtgtatagggtttagagagttggaatttgtcagactgggagaatctgccacgctctaagagagtgtttacagagatgtacccagtcttactgcaaccctgtgcagtgctgagcattacttacaaccttcatttgaactgtaccctgtgctgagcatcgattttgcatgagtttcccttgcaacccagtgggtgtgatggatattaacaggcccatttcttagactctggtcctgatgttagctgtcattgacttaggttcccatctagcatgcactgatagagccaggacttgaacccaggcctcctgttcacaaaaccctagtttcaccccttcagcggccctgctcagaagctgctgctgccccacagcagacaggcctatggaatggtttgcagtcctctgccttaggaagcttcattggctgaagaaattatgccttcagtgtaggtcagtgacctgagaaattgctcaagaggagttggtctttttgtataactatcgaggcagggtgtgggtcttgtaattccagaatgaggggagctggagaatgcacagattggagccagaacattctgtttaaggtaaccctgtctcaacaaatactaaattagctgtcatgtatcacttaaggtcctgcttatgaacatggtatgtgtgctctgtgtgtaacaccacgacatacatgagagaactgaaatcttctcagaggaacatttcccccgggcattacctggtagaaattactgaccatattctctgaatgttccgctctgttttagtctcctggggtaggtgattctcttgtgaatttcctactgccatgtggtcttctcggctgtcctggatgacatctgggctagcttattgctcttgctcaaaagtgggacacaagtttccttaggattgagtgcattgatctcaggagccttctttctggagcattctgtggtggcctcaggcaaagtttcgaggcataaacacacagagctgcgtgtggctgatgtgaggaatgcgggctccacgaagctccatttccagtcattaattgagctaatggaaattcagtttcttctctaagctcctaagtattggtaaataagaggaatgctttttaaaaatatcaaagcggccaaataaaacactctgggagtggctgtaattcccatcccaaaagccttctttccatttggtgacctgtatcgaggagggcctgctgaaggccacatgggtggtctttgcgccccacctcttcaggactcatagagctgtggggggagaacaggggcagttcttctggaaacaacacttatgggctccatgaggaaaagagagaatacttcacttgtgtccatcaaagatttgcatatttgagatcatattatctaccaggtgttaaggcctttagacaattatcattttatgagtaagttcatatttatagtcctaatttctgaaccttcacttccttgttttaaatcatgatggatgggacttctatcttatccctaactcagctttggtccttacgtttggattgtgttcatgaaaaccggcttattgggaggagtttgttaccaagaaacccaacttcttcaggaatttggacttagggttaagagtgtctgaccgtgatcatagcatagaccgagtctgcaccaggtcctgggttttgcaccccaccaccaccaccccagaagcagcagcagctccacaacaaaagtttcacaaggaaatttgagatctggaattatataagtatcaccaatactgtggggtgtgtccgatctgtctctttaagtggagttgtgttgaaatgggtatttaatgcagaaacgggtgtgataaggtttgtgagcaatgttagaagactgaagaatccattttccaaattgagaaaagtggaccttaggcagagaggttaaaggattaggaagggtcacagactaattagtggcaggtctggagccaaagtcctcgtgtgagcacttgctgcacccagaaaggtcccactctttgtccagtccatccttgccttccaaatctaaactacagctctcttggactcctcactgcttgcatcttggcccattttctaacacgtcaactcaagccgtctttgttctcagtattagtgtgggctgtgaatcaggccacctgaggctattttcagaaaagtgttccatatttgtccctttagcattaaaccatcacctcgcagtttttaattttgtagtgtgattctgatctcacacaagtttttatctgcatagttaggattgtgtgtgtctctctctccccccttaatttccttctgcagaacccctttcctctttatcagcccccattttaaacaggaacttgctgtgctaactttgatccgctttaagcagcagtaactcagaaggcataaatcaccttatctaagactgggcccccgccgccgagggcttttctttctgggactctgcaatcaggaatgcagaacaataaaaagtatggtgcaaaagaagttttatggcagctttgagagcaggaaattaagtttctttaacatgcagatgggtgaagggctgttctctggcatctagaagagcctcagaggaaggaatgtcagtttataatcattttagataggatgcaaattgtagaaggtcctctggtcatttcatcctggagcccacacagacaactaactaactgcctctgctgtttaagaagaacaatttctcatctgactgtgttgaaatactcttttttgttttgcttgcaacaaaagctatgtaatattacatctgtaggcaaagactgcaaagtagactttatgaagcaagggatgtatgcacaacagatggagttttactaggtcaaccatctgtgtgtccttcttaaacatttactgtctgctaacccaactgatggcaaatacaagatgctgttctgtgcattgccattgtctgtgcacagtgcataggtaatccttagtcccagtacacaggggtgttcctctgtgtctttttctcaaccaatgacctgttcacaaggtcaaatcaaaactgttccgtggcagtcctggcagtagttctgtgagccaaataaatggctggcaatctgtccagtacatatgtgggctttgttttcatctcagctgggcatctaaactggagaagaacacctttgctgcctttctaggggcgccaaggggacattcttggacagctaggccttgaacttggctgccattcccatttcttttggattttgagatagggctgccaagctttggtcaagttcctcagttgccttgataagatgaaccactgaaggctttgtggtttggagagctcaggttatgtcgatgccaggcacacagagttatttatcctccttatgaattcctgctaaacttcacgctagaacacttaattaggaattggttcttaacacaggctaatattcagtttatgtgcttcagtgtgtataatcaagttataaattttatgtattcagcagagtaagttaatatattttagtagtgatttaattcattatgctttataaagtactctgagaataattgtagtccatctcctttatttaaatgtccaataacatagatattgttatttactattatttatcagagcttctcctttagataatgttatcattttgaaaatgaggttcctgtgtgaatgggaagtagtgttaattttacacgacatttttcattcacatttccacagactaaaaggttgtccgttggtgaatttagaaggcctgcttctcattcaggaagctagcactcccctcttcaccttcctggacacgagaacacaaaatgcccatttctgttctttcgacttatattttggcaccatgaaagcactcaaagcctgtgataattgcaaatggaatgtcgaatgatgatctgttctagaagcgatgtaagcagattgcattacagagaactcccagaatgcatcacccctgcagtaagcctgtctgtctttcaggttgaccccctgtttacagtgccggcaccaccgccgccgattgccagcagtctcgcacctcagattccgccctcctactttcccccatcttcatccaatattgcagcaccagtcgaacagcttttggttcggactcggtccgtgggtgtcaatacgtgtgaagttggagtagtgacagagccagagtgtcttgggccctgtgaacctgggaccagtgtcaatttggaagggatcgtgtggcatgaaacagaagaaggtaaatatgttttatttttatttatctccctctgccctcttctccgtgatgtatctctgtccatctgtgaggggaatttattttccttgtggtttgagaggatagaaaggtgatttgtaggttctctgactcttgggttaaataatgatcctgtgttcctggttgcctttaccttaaagatgagccaaagccttaaaagaggcgtcttcatgctgagggctaacatggagagcctgtgagagctggggtcaggagcagctttctcctaaaaggtatcaaggagacatggctcaagttcctttcatttgtggtatgccagccaatttgtctgtctctgtgttgtggggtcttatatttatctacctccttacctccctactgaatcaaacagtgccccttgtgcatagccagggccgttgtcatgatgcagtcgaggctggttggtgctcagagctaataagctaaggttaaaggtttaaagcccagttgagccagccatctcttctgagtctccagacagaacctttcttgccccttaactcagcaagccatttggcaagtgcagcccattagtcaccagggaaacacggcccccgggaaactggatgcatctatcaccgccgttgggaatataagccaagagtaccagtcatgccgatagtccagatcgggtcaccatgtctcatagcacacggcgtacggtatttcaagtggcgtgcatcattaacaggtcagaagatactgaaaagcagctctcagagatggggagcagtctgcacaccgggttgtctcaagaggacccttggaaaatggacgtggggaacctttctcccctttcagctaggttggtcaagggtaaaagagatggatgacagctaccaatgcttgggtatctgtgagaagagttaggacaaagctgagtatgacatgaaggggctgagactccatcactagatgggtttgtctgaattaaggagggaaaaggaggaggcaaacttgaaggaagaagataggatacatgctacagagacctagaggcatccctctgagggctttattgctggaaagaagtagtagctctgactgtttcaagaaaaaaacgaagattggagacatctttgaattccactataacattatatgtatttttgtatgttttgtttcttgataaaaaatttaaaaacaaagattgtagctggtgctagtgatgaagaaaaacatattaactatacagtaaaagggagtgaaaatagctgtaggattagttcttgtttatttaaatagaagtgacacctaaactttgatttttagacttttttttccatcttctctatcgatgcattttagttttggtttgctggcagtctgaaaagccaattaatgcaatactgtgagaaaatagggctggaatgtgattggagagtagagaaatttaaacttttcttatcttgcctgtttgtttaaggcccacttccaagaccaaggggccagttatatggaattctgggagccgcccctcaggttgtccggttttcctccctagagttctcctgtagagcagatggcagagaacggattcaggttgatcctccctcttgtggaaagagaattaagacacgaaaaacataacactaattaattagctatataaagattttcagcaacagagggaaaaaagatttgaagaaaatatgagctaacttccataaacttgaaattgagatttcttggaaaattcactcattaaaatgagtctctgtcttcctgttttttaatggactcattgcttgtcatgattttatttatgtaagtgtggagtagggcaggcttcctgcggtgtaacctcactgggtggtagatgttataaaattagccacaagctttctgggacagttgggttatttttcagtttgcctagaagtctgtttagttttgacttttaaccttggcctctaataaaagtggattatttggagcagagggcgttgaggggtcgtgctgaatagccaaagcaatgcatacattgaacagaatccggatgctctggtcctatgtttaaagagcttgaagatattgttttgatagtatacaaataatgaaagccatagcacttccaccctggcctctaaaaaatggtttttgatttaaaaaaaagatattttttgagacagcttcagtctgtattggaggctgatgttgaattcatgaacccctggcctctgccgcattgggattcaaagcctgtgccaccatgcctggtggtctccagaatttgatagaattggttttctttgccttcacccagccatatctgtggctgctcctggtagtgtctctgcactggctcctgactacagaagcaaggcatagtagctgaccatgggcaggcccagtctccttaccacctcatgacacatgcagatgtttcctctggtggtgtaaggagctacagccactcatagacttatttttgctggacaaactagatttctggcctctgtagaatgtaagaactcctctttatggaagccttagtcctaagatgtgtatttaacacacacccattttcaagatgcgtacatttacgttatttctttctctgtacagtgttcagagtccttggcccccatttaaaggttaagctaatggacttcttcaccttctcaggaaaagcaaacacattcagaggcagttattttacagagctcagaatggaagggggagcttggggttttaggaaggggaaaggtataaaaagatgcaatagtttgtccaatgaagtttgataaaaggaacgactgcatatcctcacacttataacactgttgggtgcctgggactaagggcctataaactaaattgaatcaaatccattcttactatgacagggagtgttacacacacacacacacacaccccaaacataattcgatagtgtggaggtcgtctgcgcctatgttttaatttgatagtgcattcgaatcccaagaattcatagttacagtcgtcacaggacagtgggtattttggcagcctcttggaggtggtaggaataaagactggcttgaggaataaagaactttggcttaagtatttagctgcctcctgaatttggaaagcctcattagggttggcttcttttcgttagcctttacttctccagttacaacctgtaagtgaaattctagttgttcaagaaccaagttgtgcatgggaataaagtgttaataacgaagttgctcctggaaaaaattagcaggtttcagactgtgcctaataggagagaaaaactattactacatgtgggtgtttgcttattctactctgatctttcttctccaagatgaacgtttaggagccatgatggattgtatgaaatgactcacagatgttggaggaatttccatagcatttcactcgtgacatttgggacacacatgcctaaaatataagagtttgtttgaaattttgctcttaaaaatgggggggggggaaattggtgaaatcagcactatatgtaaatacatgtgttgagtttggctttaggagtcttgagtgtgttttctttagcattttgtttaaggggggattttcaagttattatttatttttaattatgtttacgtgagtgcatctatggacatgtacccattagcacaggtacccaaggaggtccaaagaggatttgaattcccaaagctggagtttcaggtggctacattgcagggcaccctgggtgctggcaactgaactcttgaccactgagccagctctccagcccctcagtcatgcttcttagtgggcctttatttgggtaggtggccacatatgaaagaaaaaaaaaaaaacttggttcagccatgtccatgtccattcttataataacccttcccctcctctttagttctgtaatggtaaactgagtaaagccaaggggagaaaggaaaagtggcaattgccaaggatggcctcttgaacggctatagagcatgagttctcagcactgtgttgttggacctctgagaaaggaatggatgcctttcagatagcatccctaggcaccgagtcaggctgaattggtgtagatgtgggtattgatctggtttggttaatgacctgccattgatggtataatattccaaaagtgattgggggagcatgggagagaaaaggagaaagagnnnnnnnnnnnnnnnnnnnnagaaaaggagaaagagagatgctaggttctttgtaagcaccttgaatcctttctctttaagggaatgtacatgtattccttgtctcaagtgcccaagcataaaatggactaagggactcttgcctttgcccagtggttgatgagatctaccaagaagatgctgaaggatggaaggagagcatcgttgttcagttagtagtaagggctgtgggaagccttgaccattcaaatgaaccacagaggatttggagactagccctcagagacaaccaatcgatatcacccttcctaatctagtgggaggcaccttactgttgcgttctcaaatgagccagggactataggttaatttctttgtagcctctggtgaattacttttgaaacagaccagaaaccaagagtagcgctaccgcagcatctgtgctggagaaggtggatctcatttgcagttccagcaattcttagatggacagagagaatgcgagcttgaggccagcttgggctccagagagcccctggctacaaacaagcaagcagacaaacaaaccaatcttgcttaaagcgtcaatgggaaatttcctaggagacagcggaataccagtggctcacggagtatgactgtaacaagtcagaattctgttgaaaggaagaatgccatataggaatatcttcacctggtgtcctgtgcttttgctttccagtgggggtgaggcttaggaagtgattgttttaaaggtaattaactggagaaataaatgactcttttttaaaaaccattagagacgtttgtaacttctgcttctcttggatccaaagtcataaatgtgaagtgcagtgagtttcaagataactcattaaagggcaaatgatctgcataattgaggatagtctaaaatacaatgttattatgattcttattctgccgtatttacttactgatccccaccacttcaaacaaaacatttcttttaaaattctgattaatttgagaagagattccgtactaatccaggcgtccaccgtgttttctgtgactaagcatagagtttgtgccatgctttgctgggtgagaaactgttattgaggttcatagctgtgttgttgtaaacctgtctgtgattcacaggggcatgaaatgacactgttgatttgtatgcttcattatccacacccattactgagctagtcggtgactggaactggtgaccagtgctcagtagaaattttgtcagctcatgtatttgtcaaaaataaatagtactttaattactacactggtaagaaaaaggttttagccttgattctcaatggactcccatggaggttttgacagactgaaggaagtatttattataatttatcccactgcgtgcactagccatgaacttttccatagccttcgttgcccgacttacagagtggtgacaatgagtacatttagtcccttgaaagccaccgtcactggtggcagaacagtgccgagcttctatcttccaggttgcatgttcatgtggcaaggaaacacacatcaaaaaccaaagtgtgtgttcacaggacacaaaccctgtctttacttctgcttattctgagtttagggttgatttgtttttgagagaatcttagtaagttgtcctagaaccaagccatcctcctccttcagctgggtagctcgggtttcaagtgtaaacagctgtgttcatccaacatctttaaattaagaaaagatttgcaataacaacagaatgctgggaagtgatgtgagtgctgttctgctgaaggaaagtgggcacactgtggacagagtgagcattggtactgtgtggtttttgttggaaagccccagggcagccacctttcctgttatcaagatgaatagcgtgctgctttcaagtaggacttggctcactgttttagttcggcctttactttttggttatctcaatccattctttggtggtgacaccgggtgttaagtaatgaaggagaagccttgaactcacttcataaagacatttaaaaacctttttcgtccctttatctcaaagacaaacttctatatttgaatatagaacttcaagcatttaaaagtaaatttttcttaggacttaggtatgagaaaagatgaaagctgtcttgtaaggtgtgtgtgtgtgtgtgtgtgtgcaactgaagtattttcctttttttccctaaaagaaggaatttataaagaaattttgaaggagtcttgatgttacagtgactttgaactgtagatagatttataattacaaatggaaatgaactcactatttgaaagaatagctactgactcatcagatagataccagctgaaannnnnnnnnnnnnnnnnnnnnnnnnnnnnnnnnnnnnnnnnnnnnnnnnnnnnnnnnnnnnnnnnnnnnnnnnnnnnnnnnnnnnnnnnnnnnnnnnnnnnnnnnnnnnnnnnnnnnnnnnnnnnnnnnnnnnnnnnnnnnnnnnnnnnnnnnnnnnnnnnnnnnnnnnnnnnnnnnnnnnnnnnnnnnnnnnnnnnnnnnnnnnnnnnnnnnnnnnnnnnnnnnnnnnnnnnnnnnnnnnnnnnnnnnnnnnnnnnnnnnnnnnnnnnnnnnnnnnnnnnnnnnnnnnnnnnnnnnnnnnnnnnnnnnnnnnnnnnnnnnnnnnnnnnnnnnnnnnnnnnnnnnnnnnnnnnnnnnnnnnnnnnnnnnnnnnnnnnnnnnnnnnnnnnnnnnnnnnnnnnnnnnnnnnnnnnnnnnnnnnnnnnnnnnnnnnnntgtgatccatgcgtgcatgcacacaaaaaccaccaatgagatcctgacttcaatggtatggggtaagtatctaacatgtgaatgttatcttttgatttctatataatagttgctattctggcaggcctagcagcgtatgcctatgatggcagcgcttgtcatttgatttacattccccggatggttagtgtcattgggcaccttttcatgtacttgttagccatttgttcatgtgttttgaagaaatgcacctcacatcctttgatggttctgtgaaatactgatggatcagaggctttgactggagatctgaaggctcacgtgttcttcctttgctggtcagatagagaggattcacagtagctctcttccaaccctgccactgccttttctccccatcagcgcctcttgctttgagggagccgttagctttatgtagtcccactaaactgttttgctcttttcttcccactggcttaacgttttcctatgcattcaaaagaatagctgggctcagatactagacccactttctaggacaaatgtttaataacatgttcattaaaaaaatctctgtcaaactgcctttgccaagtgactgggccatttctgaattctcacagggatgaataaaagctctggttactctacaccctctagtatttagtgttctcaagttctgagttttgacccatggaatgagatcttgttttgtgaagttcctgttcatctaaaggatgctgggctagaacctgcttcaccgtcctagtcaccatttgtctgtcttctgtgatggtttgtgtatgctaacatggttgggccatttgaaacaggcgtttgttttcttactatttaattagaagagctcttagtctattatagatgacaaatactctctcttgctccggtgggttttttaaggcagccatattgttacagtaccatgagtgcagattcggcgacatttctaggagacacaattttaaagcaggcttttacattttcttgagtgtgtaacatattctgctgtttctaaagtgtttctcaagatgggcgtgacagtgatctgggcatggtgaggcataactgtggtctcagcatttgagagtctggagcaagaggttcatgaattttagtctatgctatactgtatttcagacaggaaggcaccttttgctttctaagaagcatttttcactggtatggaatattctgcggaatagatataattagtataattaacatttcttcagtgctttattcacattggttccaattttagatgaatgtaagttcataggatgacatctttatataaagggagatgcttgtagatttggaatcacggtgtcagtgtcggtttttaagaaactgctgagtctataaaagcagatatttgttatatactaggacacgtggtttaatgctcttctggaattgactggatcagtgtggacacctacgatggaaggatgtgaacgcttttctttcccagcccagctttgcatccccttcatcttaatagcaaaggggattcagctccaagttctgtgtctagctcgtgatgctgatgtccacactctttgggccctgcctccatagaggcctttgctctccatcatggaaaggtttggctttggcatctgcttctgcctagaatggcattcatattaccccactccccatcgaaagggaaggaagttaaaaggggctgttaaacaccagagattcaaacccacagtgaggaaatattatttcatcatctattttctggagccccaaccatttaggcttgtcttctcaacgtttctttgttctgctctgtttcctcaaaggcaaggaagtgaggacaggatacttataaacaatccttttggtgtcataacctgttcataatacatactgtttggcacttgacatagtttagcagggtacagatttctttctggcacatctatggcctgccttgcccctctgcctgcctcctatgcttcctgtcagagtgtctcctcccttggcaggtagaactatcagggtactttttaccagtaatgtcgaccaaagcactcccacatgtccctctccagcattcctgttcaaaaagaagcttggctggtatttccttggcaaagaggaaataagccataatatgggagaaggcatagcttaggttccagatagccattctcagcaaagaaaattgccggaattaggctcatgagcacaattgcaggctatctagcagagtctgacacccattcaggagactccagagaggagcagataaaaagtgcagcgagctacacaaacccctcattgctcatttgataacttcctataacctaatggtaaattgagcagttacacgcatgttcttatttgctttgttttgtttatcataattaaatctcccagctcaataagcatctgaggtacttttgtggcatttcagtctctgaaaggtggctcttgattctttgtgacataggacaggcttggtcggtctgtgcccttttgtcagggaagtgggggccaccttattgttatggtttgaatctgcccatcctctgccaagctcacacttagaacaattggttctcagatggtagttgcactcagggaaggtacagaccctttggaatatagctggcagatgagagccaccaggcctgagacttggaaggctatgcctgcccacaggtttggcctaatgctctacttcctggttgggctaccaggtgaagagccacatgttctcactgctgtgaatgttgtcaggccttccctgctgcaatggtctgaaatcccctgaaacacagtgagtcaaaatgaatcctttcagattaaaagtggcttcctttgggcatggagttacaacagtaagaaaagcagcacacatccatgaagctctacccatctagttagcctcatgcccttaatgtgggaggctcccatagcaaaactaattatatatgtgtgtgtgtgtatatatatatatatatatatatatatatatatatataacataaaattttatttaatttttgactgttaaacatagcttttgatcatatttacaaacacaccctcctcccagactcactccttctagcttcatgttttctgtctcctcccccacccccgtgtctttctaaaacccactgaatccagtttttactgcctataaaccactgatcctcaaccaatgagtcatgaccctttggaagggggaggggtggatctaatgcttcattcacaggggccacctaagaccattctgcatatccgatatttacattactattcatgaccataggaaaatttcagttctgaagtagcaacagaaacaattttatggatgtgggtcaccacagcatgaggaactctattaaaaggtcacaacatcaggaaggttgagaaccaatgtccatagactcatgggtatggccatccgcgggagtatgaccattccccggaggccacaccatttaagtaaactgactcttcctccagctgtcaggagcccttcaggtaggaatggatgctcatgtgcccttacccctaccttaagtgtactgctgaccgatccactcatgagagcagcaaccttctcatttccagaagacactctgttgacccaattctcctgaacctctggcccttaggatttttccacccctagccccatatgctggtccccaaatcttggagggaaggctattctagcagagcagcagaacatctacctaagatgactcctggcagtatttttttcagactctcgcattcctaactaaagtaattaatctctggttgtgtgcgggtgaatagaactagttttttaaaactgccaaaaagcaaataaacactttcctgtctgttaaggttttggctgaaacatgggaactccatttggcttatagagagaaatgttttttaaatttaatattcactgaatatttttacaaaatacccccaaatgtagttttcagctatgtgcgtcataacaagaaaaataaaaacaaaaaataaaaacaaatccactttccttggaaaagaagccccacgtgctctcctaggctggtgggaggcttggatcctgccagctcttcagaagcccccatgtacatctgcagcctgtgttttgccatgtagacctccactgacagacaacttttaaagtcactcaagtcaagagagctggctaagaacatttaccatgtctcattttactggtgaagtagcagaggccaacgggtctaacgagacctaaccagggccactttcctctgggtccctcagcttcctgaatagagactactcacctctcagaatatgaaagtaagcctattacagacggtgctggaagttagtctcttcttagcaatatctctccagtatatgtatggaatggtttcttgtcctaacagatgcgtgggagtagaacctcgagctgggtggaaacagaacagggtcagctgccttggtttgatgttctagaaagctgtcaccaagatggctgcagtaagatgactgtgtgagaggtatctttctttcaatagatgtttttgagtactcaagcacagactgagcatcctctagacaggaaagcatcagagatgcatgcaactctctgcagcccctgcttgataggaagcctagtagacattttatcttctagggagggttttgttggtgatggtgttgttggtgttgctgtttgtttttgtttttgaactgatagtcagacttgaagaataaggggtccattttcaaagaaacaatgctgtgagctacttaaacttacattgactgacatgaatcttcagagacttaggagaagaatattgcctcaacccctcagttggttatttgaaaattctcaaggtgtacactgttcaagagatctcattttatgtctggcttgtgtattaagtatcttcttgaaataaataccatcagttgggccagtccccctgagcctgcggttcctttcgagcagcaggtttcctaagtatggaatttcagcgaagcatatcatgtgtcggatgtaattgttaagtctgtgagactgatttaacatcactgtctttattttctcccactgaagaaaataaagcagtatggggaatttatgacccgttgtgcagtcaagtcaggatccaaaagagaatttagaggcacaaagttccagggcttaagtgatgctttattaagaatctccttgtcctgcttggtcacctacacctaccccagagttccaggagagggtgggctggaccatacatgactgaaggggcagcgagtatagctaaacccaatccctggggacctagttttgggtttgctgatgaggagttagggttcccctctggatttgcctctttgccaggccaccttcattagtagaatcactctttatattctatttggtctgtggggaatggagaaattctagcaaggggtaggtggtcccttttggcactttaggaaaattgtgggtttcttttccaatgtagaaggaccagtttgcagaagagatttgtcagggagcccgattttgtattcttcaactatgaattctggcagcccaacttgttatggctcagtgtttgatgtcactccctcttgtatttccttctaatcattaacgaaaaatgatgaaaggataacaggagcacctggcctattggtgagcataaacacactgatcagagtgcaaaatggaaacacagcaatccctccgaggcagccagagcctttctcccactcgatggggatttttttctctttttatctctctctatctctctgtccctctcccccctccatgtgtctatgtctctatgtctatctttccattatttttaagtgtgactagtaagaaggcaggcataaaacatgactacaaaccctgggctttgtctcctgtggtaactgggcaggggagtactatgcacttcatagcaaatgctggctctgttactacctaaagcagcacgattccatagctcagggagcatttataacattttttttggttttattatctgtaatattctattatctcttcatctagctatatggcaggctcctctggagcccttagtaatgcagtactgataccctagacacatacattttggggaaaggtggatagctaaaccaagagaaagaaagctaaaccaagagaaagaaagctaaaccaagagaaagaaagctaaaccaagagaaagaaagctaaacaaagtgacaaagaaacaaacaacaataaatgaaaactgagcggccagaattgatgcagctctaggtaaggaaggtaagttgctgttaaagcaagttgtgggggttcatacttaggacctcagcattcgaaaggactggggccagaggatcgccatgagtttgacgtcagcctgggtacataatgagtttgagggcagctacactagtgatagcctgacttaaaaaataatgtagtaggattcgaaaaccaggttggggcctcacctcatccttctctctccatgtgttacatgaactcttgtgcgtacggcagcctggtgaagaaatagttaaatgtattcctgttgtgttccctgcttttttgccaacacgacaaacccctcctcttcagtttgacatcagacacatttttcataactcaaatgaaggagatgggagtggaggggtcagacatgccttgggacttggggggaatgaatacggcacactgaataaaaggaaccctggatagcagcactgtctcgggtgtcaaacctagtgctaggtttggtggcatatgcttctaatcccaatgtgtgtaaggtggagtcaggaagactgtgagtttaaggcaagtctgagagagatgaaggtacagagggtgagagggaagaaaggagagggaatgaaatcgtttgctcgagctacagtctcattgttcagtcttcagccttagctgttttctccttggccctgggcctgactttcctcatctgtgtaatggagtggattgaattgcatgatctttggtaggtctgaaggtcctccagcaaaggagtgtaatgatcttgggtgttcacggcagcatcatgtcagacttgacaggttctgcagagaaggctcagcagatcactccaatggcattattcttaaatatgctctgggctggtaccaaagtcctgctgtatgggtaggctggatttcagtcttcatgaacgtagatccatcagcacttcttcaggtaaagtgactcctgtagctcactcgaggaaaggctcactgaaggtctcatctgacaagctgttctgagccaggatagcttcactggcaggttctgagcccttggcctaacagaactgtgcaggcaccactgtgaaacagggatggtattggatgcaggcgagttaacatatgagggcagctttatttcctgtttaaattctacccaagttactcacgcacacacacgcacacatagttgaaaagtccacaggtttctcttaggctgatcacaaaaaagaatagtagattcacaccccagttttccttttctcgtggtgtgtgtgtgtgtgtgtgtgcgcgcgcgcgcatgtgtgtaagtaaatatttctttcttatttggaaacacaatgactaagctctctttttccctccaacacaaatatattttatcccacccatactcccaatataattatgagttatgagctctctatggctgtttgacgagttattctaaaacatagagccttataataacaaacatatattatgtcacagtttccttgggtcaggaatgtggaagcaacttagctgattgcttcagaccaggctgtctccagaggtttttgtcaagctgtggccagagctgttattgactgaagacttggctgaacctgaagggctctcttttgagctaacttatgtggttattggcaagctctaatctgttgtgggccatgaggataaaggttttaacatggactctccatagaaccactcacagcatggcagctggcttcttcagacagacagacagacagacagacagacagtgcacaaatcttgttgacatcctttgtcgtgttaagcttggtcctttgcctggaaggggtccttcagagactgttgacagacagacagacagactgccttggagtaactatggcttccatttcagttcacgttttaaaacctcttatttagaacctcctgttagaatcttccctttccctcctttctcaaaactctggtgtataggtatttatgtattttctgatttcagcagactttttcccaaatttttcattgtttttttttttcacagacaaatctgttctcatgtatttttcatttctaaaagcttttctttaaaaaaaaaaataggattgtttccttaagtcctccatcctacttttacggataagcctcctcttgtttcctctgaaaatacttcttttccccttatcgttagttttaacttctttctcttttgattgtgcttgatgtgaggtttctatttcacggtggtgacactcctcatgtgtctgtgggtcctgtctgtttgctcctacctgttaaggagaagacctttgtgggcctcaatgatagaataaaataaagagatgggccatttccagagcttccctgagctgtggattgccttataactttagtctgcttttatccgttttccaagaaaagctttctctacattcttgactgtcatctttcttgctgctaaatttagggaaccaatggctaaaggtattctctcttatgcaaatttgccttaatcttcctgacttatttagtgactataaaatatattatattatattatacaatgtaagtttgtagctgagaattcctggtagccattatgagatcatttcagttgatatataatatgctactgtaattatcacttaaatactgcaattagtttttttcaagattatccttatttttctttgaagatgaagcctttccacatacggcagaatggaacttggggtcctggtgcctcagattaccatgttctggggttatggtacgcctggtattgtagattgttagacacagttatccccaatgaatgagaccttcattgtgtcttattcttacacagactcttaagtttgggaacttcaaacaggagatacaacttctaatgtccccaaactcctttgattattggttatctaatgcaagattagtgactttttagaatgaactttctgcagcctttgccctgtctacctcgctatgggtccttgccagtcattcttttgaccaaagctctgctcttcttatttttatttagcaagaagagtttgtcacaccactgatattttcccaaaactcttttcagtatttgttgcgaaacccttccttctttgttgaccttctgtgaagttgtagttgagagaggtttctttctccaaaggaaagatgtgttgaacaaaaccaagttccgctgttgtatacacttgtaataccaaacttggacagggtgtgtttggaatgtctctgagcaacattgctcattaaccacacacagcacatgcaactacttgcattttcaagtattgttattttttgtctagaaagatcctgtttggttttgtctacccactttagagaaataaacagtacctgcctttatttcttgagtataaagaccaaaaacaatgatatgaacattgcattaatgtctttggggcatagacgtctgtcttcttcacaaagcatgtggccgagtctcagtcccaaaatggcctcactggatgaatattatccaaagactttattcgccaacgtacaaggtggtgattaaatctgtttctccttcccatacctctatcccacccagttcaagtctgtgctggcatggagtgggtgattgggttgggttgtataggtgtggtaggctcgaggcccttgctgttttatcagtcaagtcaatgaggtaacagacaggaagctgagggaaatagttttacaaccttgaaagtgttatcttggaggacaaggtttgtaatactggagtgaagagaagccccttttacatgggtaagtcagtgcaggcaaagctactaatttgttgttagcttcaaggagatttagagccttggtgtccctggcagttggggtgtacaataaaattctttttctcttccttcatttaagtctagggaaagctgggtgcttatagaatggtaggaccaaatgcttcttttactgatagacatagggatttgttacacagaacatttcagatttaatgtgttttgtggaagatgcactcatcctttttacttcttgagacaatcacagaaaggagaactggaggctagtccccaacctgctgttaagggatgaatccaagggaaagattttaacccccatccccgagcagagctgtctccaaactgggagaaatagacagcaaacagaaaatatacacatcagctgacatgctagctaggtggagtcctttggtaggttgttagctgagcttagctaagcctggccaaccaagtgaggtgttcacgtaagaactgaggctgattggtaaaggacttgcctaccatgcatggaaccctgacttctatccccagcatccataaagtagccatggtagtgcatagtggtaatacacccttaaagtctagccttatacatggcatggaggtgcatattggttatcccaataccagtatgaagagaggaaataaaaacaggaggagcaggcatttaccatcatccccaggttcacggtgggatcaggacacgcctgggctacatgagaccatgtctttattttacaaaacaataaaaggttcaagtggcagtactagtggggggggggggggttccaggaaagaaacggggtgcctcactctcagggtgagggtgggatgcattttgctattccctttggggaaatttgctaaggcactttaacagaggctaaggagttttaactgcctgagccctttgacaggagtattagcatagcagcttcacttgatttaagaagggaattattccaccatccacactaatctcttctggcaagaagcagaataccagcaatggcttctcacagaagatgacagggccccagacttccttcccttcctggacgggaacttgcaactcttcaaaatgttaatataacctcacggatgataacaaagtcacagaaaagtcttacatcacagaagctgtctgttttcctctcacacaattttaatagtctttagactctccctacacacatgcacaagtgttcacgtgttggggtggnnnnnnnnnnnnnnnnnnnnggtagtgcatagtggtaatacacccttaaagtctagccttatacatggcatggaggtgcatattggttatcccaataccagtatgaagagaggaaataaaaacaggaggagcaggcatttaccatcatccccaggttcacggtgggatcaggacacgcctgggctacatgagaccatgtctttattttacaaaacaataaaaggttcaagtggcagtactagtgggggggggggcaggggagacatcagttcaagctgtcttccctggttgccacttaaatttcaagtccaacctagactatatatacctgttggtggcattgagcaggacaatacagaggacaaagctcaactcaatattttttgtgtttgcttatccagaaccttcactggtagtaaagtttccattgttaattttagtgtatcatactttactatgctttctcctaaaaaaaaaaaaaaaaaaaaaaaaaaaaaaaaggtaatagctggatcaacattctagagattgcttcactgccatcttcccttcccaccctccgatggaaaacacatgaataattccttcttggaaggcttaatacagacacaataagctaagaactccctaactgaactttacaggctgaaggggatgagatataagcagcatttgaactaacttctagtcaccataatttagtaaggggtggctgccaaaagccatggaaagctttatttgatccatttatgaattaagagcctgcagtaagttaattgccacatattggggctaataaagactagcagaaagagactgcctttgggttcatgtgcagagaggaatcaaggcagagagagttgctccctgatgtctgagggtgtcctggctgtggaccttccacagagccaggcaaggatgctggtacatgtgcctcaagtctactgaagagcctttgagccagcattcacctctcaactgctgcgaggctttgctttattgatcataataagctgtttcgtcttattaaagttgcatcatggagtctggtttttaggaatcctgttgtgaattagttgcagaagaaatgatttgcttgtatttcccgacagttaacaggccaagcagatgggacagcagacctgaaatagttgggttggctgcctgccactgttctgtgaattttgatttgcatggatatgtaatggttttattattcttttattatttttggaagtacttgcctatgatgcttaagaaaattagacttcagtttcctgtaaacacactgttctaaatgaatggaactgcagtattcctcgaagactctatgctatgttacatgtgaattagctaaggacaccgtagtttactctgtcaaagatgaatatacagctggttgtggtggtacttgcttttgataccaacacttaggaggcagaggcaggaggttctccatgagatcaaggccagtctggtctacatagtaggttctaggacagctagagctacatagtaggaccctgcctcccccccccgccactccccccaaaaaaaggaaaaagaaaaagaaattgaaataaaaactaaaaagatggataaaaacacatgagtttctcctggttgaataatttttattcataattgactctgattttccctttcatttcagagagtgggaattttttccttttcttgacactgttcattaaaagaaagaataaatacaagaaggatgtctataaactttaaaagagggatttcagtgcaagtcataagcaagagtgtcatttgtgtcaagatctgcattcttgctgaaagaagagtctaatatcttgttttgattgttaatgttgaatacatgcaaaatattacttaaaatatttaaggcatcactcataaagaacaacatggaaacaaatatttgtctttctattgccaactaagaatggaactttccagtttctgagacatctgggtgagccttctgtagtcttgccttcttccttctccatgtagtcacgtaatctctattctgaaattgtgtgtgtgtgtgtgtgtgtgtgtgtgtgtaagggtcctatattttatcacagatctctaagttcctacataagatactgtttggcttttcttagtcagaatcacacacagggtttttctttggcttgcgttttccaagctggagctcattccaactgctccatctatcagactctctgaatgcatccttacaatatctcctttcttgtgcccatggacttttggactgcagccagttctttgctgtttcaaatgctgtctctccgtttccaggcttgtgtttaaacaaaccaatctccttcaaactgcacgttgctatttttccttaaggtttgtttggctaaggagatatgtcactaagtatttcaggtactacagattatgaaacaatcacttattacacacttcaaagagaggggtgcatttactcagtagtggaaggactccacagtatggcttccctcctctttgcaaccatccagataaaagccatgattgctgcaaaatgtattgcattagtgtttgctcagaacacagctcaaggggtcaagtggaattttaagacagaaaggataaatagggggagagagcagtgttactttcacctgtgggagggttcacagggcactggttcattcgtccctttgggttgctgctggcagctctctactggcactcaccagaggcaccttgagagcatctcttggaattggcagcctctcttctgcggcctgtgggccttagtatgccgtgaccttctatctcttggctttcagctcttggctcagaaactacttcctcaataaagcattccttgcctgcaatccctccaattccttttctcctacccgtccccaaacccctgtctgtttaattttcttcggggccattgtgtctaaaagtgcagctgttcccctagtgatcatctgtcttgcttcatatggctgtagttcatcttcactgtagtgcctaagccttcaagagaacacgacataaaaacagcctgaggaaattacttttacctaagtaacacaaagactgagaatatttctaaataaaggatggctgtagtctcacagaagtgaatctgggtaggcacaagagacgtgaaactaaaccattaaactattgcagtgttttctctacaaaacggggttaaggatttgggaggtagtgaatggtcatagattaaaaattagactttaaaaaacaaatgggaaagctggtactgtaaacggtgcactagctgtctgggtcactgacagcttttaggcggaacatactgtagacttcatctgcaggaacatgacattcttcaaagataaaagagtgggtcaagtttgaaggctctggaaaatgttttctttcaaatgaatttccctccaagtgaatttcagacattttcacttagtatctagacactttgggatgatttatgtccttaaccaatatgagacatattttcttttcaacacttaagatattctgagttctataaataccacccttgttgatggaatatttggaaaagtcttgttctttgaccttagtatattacttatctgaccagacaagctcaatttccaccataggagaacagttttgttttgtaaggcatattgtatttggcaaggcatagtcttctgctttgcaaagaaagtatgtttgtctaaatgtcataaatggtttaagagtgttttattaaccttaagatccactatattcttctcaatctggatttcacattcagatcatattaggattttttaaaaatgtgctttttaaagattggttcaagtttctggaccaaatatttgtgttcatttggtttaagacagatgatgcctttttccttttctttttctttttctttttcttttccttttccttttccttttccttttccttttccttttccttttccttccttccttccttccttccttccttccttccttccttccttccttccttccttccttcattactgctgttagcctgtaacttccaacatgttgctcagatgaacagagttggcacctactcatctagactaggatgtcacttcataaatgcatggtttttctgtcaaatcaccttgagattaaaacatacttctgcttatggttcttctctagtcactggctaaaagcacccaagatagtcctactgtacagcagtttctgagtcactaacactcagacacaggtttcagtgccaggtatagtttccccttcactgacatcacctgtcagtatagtttatttataatgctccagctatgcattattcctggacacagagaaatgctagcaattccaggcatgctctttcttctgcctctctcttctctctctctctctctctctctctctctctctctctctctctctctctctctctctttctctctctctttcttgctctttctgctttgtaatgcaaatctgaagatccttcttactatattgtggttatgagcaaactgttgcataattttcctattttacagacacatgctaccttttgaataattaagattaaagactttgatatttagggaaaatgttagaaatgctgcaaaaggtgtcaattatgccatttaaggaacaattattgctttctttttgtcattaaatgatcataaactacatgctatgtaaatctgagaaattaacatctcctatttggagataagtttttgatcataagaatatggcagaattagctgtattctaagttgtacaagcgatcatagttaattaaagccagaactgatgaaaagactcagtacttttgagggttctgcctcctccctcttcctgttgtctttttttaattagaggttgtctgttttgtgtttcgctgtatttcaatttcatgacttttgttttgtagagatactgagagatactctgtgtgtatgtgtgtgtgtgtctgtgtgtgtgtacaagcacatacatgttcctgtgagatgtgtcagtggatagagcacttggcaaacttgccaagaaagtgtgagggtggcagttcacatctctggcagggatggagggcgcctgccatcctagcacctggcaatcagagagaggaaatcctacttccaaactggatagctattcagaattggtaagatttaatttcaataaaaccctgccacaataaacacagaatggggacaggggagattgagaaagacactagatgttaacattgagcctccatgatcgtatacgatgctcgtgcacctacctgcatgcatgtaaacatgcatgcacatacacagagaaggagaacgagacacacaaattacttaataggatttattgaattattttattttcctaacattgtgtaagcaactaggaattaaaagtggggcaatgttttatggttgaaggctaactataaacatgcctgtacaatgtaaaattcgttgtttttaatccagtcacttgttacgttattgtgaaaaagtgagaaatctttcttacctccatctacaagtatgggactgtccagcatttctgattacttataagagccctccaaagacagttcccattggtgtatgttaagaaactaagtttaccagcaagcatttctagctttatgctgtgctgaaaggatgaacaaccttctgatgtcaagggatgctggaagtcacactattataatcaggtttcccataataggcaacagtctccaacagcatagtcgcatgtgctcagtctctcagactgtgtatttcttccaagttgagagtcagaagagtcgtctatccctcgtgttggcctttctccctggtatttctcaagagttggcaattatttagtaaaatcttgctaataagaccattgctgactacaaatgggtccatacttctttggagagagaggttttaggagatacatttgtttttcccagacttcctctgaacaatgttaggatctgagatttttttttcttcttggcatttgagacctaacatcaaaaggtatataccttcaaagaatttcatgttgctatatttaaatggtaattacattcccccctggcttagctctaagcttgataaatttcataggctcagttatttttattttattttgttggtatcatgagatgattttttttttctgaaccaaaaccacctaagctcaggttaacaatacagatgaatgctaagattgaagctctgtttcagtgttaggtgttaaaatgtttatgttctgggggaaaagtgaataatccttttgaattatttattttgtgtgagttttttaatttaagtgttggaacacagttttaagagtcaatacagcctactgcagtaatagaggacatagttagattcacttgagcagttctttagagagccatggtttccaagggaagaactgaggcagggggattttaaccctgcccatacattatggacacacatgtcttttagaagctggcctagaactcagatcaactgaccaacactatttagggaccagtatagcatgatggttagaaatagaaattcctgcaagcataaaacacagccgaattggaaatcaaccacccagacaaagcagctctgcactttgttcagctaaaagttaaatgacttaaataaaagttctttaagtagaaccctgggaatgttttctgttgtgttcctcggtagagttcttagggggaaagaatggttttctacgtgatctttgcctgtctgtttcttgactcataaatgtgaacctttctctgtagaattgggtttctgagaactagtggtttctctgtgtatttcatttctttttaaaaggcccattgacagttggacaatacgaagcatccatttcctaaccacaaaaacaactccatttctctctccatgtaaaatagttaagaacaatttgccttttgaggaagagtgtaggcggaggtgttgggattggctgtgccaccctggctgcctgctgaggtaactcttggaaacagtgggttttgtttttgtggtttccagtgacctttggctacgggtaagctatttaaaaccccaagtaggaaggtgagtcttggcacatctaggaattaggttggcctttcctcatattatggatctatttcctgaccatttacctggcacttcttttgaatattttattatctacttggtttgtaatcaagcccacccacctgattttagcctacagagtttttcccctgtctttttattccctcaagccctcagcccatgtgtattcatgtttttgctttccattcacggagacctccagctgggaaaatatagtgtgtacaatactctctgccttcagctgacattgctcataaattgcaacagaaacactgctatcagcagcttaatagcaggtagaatacagctctacatatcaagcctcagcaggacacagaatctatggttaccaaattcccagtggcgcaggggaggggcagaaagttttctaagagcgaccacagcagcattggggtgcatgttcactgaaatgaaagcagctttctgaaaaggacttggggacccgactcagtggctgctccattgacacatatctttgctgagttgttagttttgaagcactcccgaagtggtttctgtggtagcaccatgtataaaaggcaaatttgttcagttctcttcctctctttctcttctgtcctttaaaaggaaaggtctttaaaaatgtagtgggaagggttctggtttgcaaattctcgtggccttgaataggtgcacttttacctgtggggcacagtcactttcccacacaggcatttggcagaggcgccaggcccggtgcaagtgtggaaagcaagcaatgctatctcttttgtctcggtgttagtgtactgcatgtactgcgtgtactgtgtgtactgcatgtactgcgtgtactgcgtgtactgtgtgtactgcatgtactgcgtgtactgcgtgtactgcgtgtactgcgtgtactgcatgtactgcaaaagcacagagatctgaggtcacatccttagcctctccataagaaagctggacacggggccactgagatcactcatgttggtaaaggcctttcccatggaacctgagttccatcctcagaaccaacatggtagaagagaacttcctcccacgagtcgtcctcggaacttcacatgcgtgctggggcacacaaaaacatacaaccaaccaatcaatcaaaagtttaaaaaaattaaatgtgtgcctgctcacctgaaacccccagccctgtgtggggcagaaacagaagggcctctggggcttatactcagtgagagatcctgtcttgtgagaataagctggagagatgagacgtgacacctgacatcctccaatggcctgtgtgtactggtgtgcctacccccaccccaacacgtgaacacttgtgcatgtgtgtagggagagtctaaagactattaaaattgtgtgagaggaaaacagacagcttctgtgatgtaagacttttctgtgactttgttatcatccgtgaggttatattaacattttgaagagttgcaagttcccgtccaggaagggaaggaagtctggggccctgtcatcttctgtgagaagccattgctggtattctgcttcttgccagaagagattagtgtggatggtggaataattcccttcttaaatcaagtgaagctgctatgctaatactcctgtcaaagggctcaggcagttaaaactccttagcctctgttaaagtgccttagcaaatttccccaaagggaatagcaaaatgcatcccaccctcaccctgagagtgaggcaccccgtttctttcctggaaatgttcagctctgatatgtacatcttattttatatggtatatatttttttcttttatactatcctgatgaatctaaaagccaccttacatcctgtagatagagctagcaattagtatcttcagtaaatagccagtgggattggttaggatctgaagagtttgaggaaacattcagtgtgcctagagctaagaaacaaatacatcattcaaaaggaaaagggaatcgcattccacgtggtcctttcaggacagaactttgactcttgccatgtagagaaagctagggccttgaaagctaagtgtccacacgcattgacaatcccatttggcttggccagtgtgagcttcaaaatgtcctgccaaggcttccaagtagttgcaggctgacatactggctcatccccattcagaaaatacctctgcttctatgtttggaactcaagtcaagtgcatccgtgatgatgcagccccaactgttctgccatcagtcactactttctggctgatgtgataaaataaagcaaaaagtaggcaggagtctcccggctgagtcaggtgagccctgcctgtctcctactgtgatgtagtcttcttcacccagtgctgtttgaggtgtctgtggtcatggcaattcacctaatcttggctctcagagttgctttctctgtttttgtttgtttcttgacttcaaacaaattgaattttgtagcttgtttatggcaatgaatactacccatgctcatctttttaaaagttttatgtcatgaatttgatgcaaccctctttagttttagtttccttgctaattgggccaagacatttaggatttattaagtgaagactcctgggatcacctgccacaggacttcagtattgttcattctttttctttcttctttctgaaaaaaacaaacaaacaaacaaacaaaaaaaaacaacttttttcaagacagagtttctcatgaagttgggctgaccctgaacttgatatatgactgaggaggactttgaactcctgatcttgctgcctccaccattcaagtggtgagactataggtgtgtaccactctgcctagctcatgtggtgctggagacggaatctaggaccttgtgtatgctagacaagcattctgccaactaagctacatccctggtctgagaaactttttcttgattctcctgttctccaaagcattttttctaggctgtgggtcaagcctcccccaatactcagaagaagcactaagagatctagatgtgtgtctttagccatggagccatgttaagacaaaggaccgctggaagggaaggtggtgagatatacactttggtctctgtcctggtttcagttctgttcttcttagtctaaggagcccaggtaaacccttttatcttgctgggcctttaaggtccttctttctcaataaaaattccccaagatgcttttgtgcttaaaaattagttgggtcttcatttatttgttacattttttgggggaggattctcacttttagattgttagtagggttcagtaaattaatatttatgagattctttgaaagaggcttaacacacagtcagcactttatgccctcttaaattaaacaaacgtgcatggcagcattgtgcatactcatgtttatgctggtaacagtcaagggagcttttcactagccagccggcatgctctctatgttcagatttcctcgaatttgcagctctaagctacagtgactaacaacgacggcagtgttgcctacatatcaaacaaaggtggtgtgagggagaagctgaggtcatgatgacacagacatgcagggaacggtgcttttgccaggggcccagttcctctgatggtcccatagtgctattctctggattgaggcgaaaggtaaattccaagaaactatgattggggacatatctggcagctaattgctctgtaaaaattatttaagacccccccacacacacaccacccccacttctgcttaatcaaacttccacatgaccatgtgaggactggagttttgaacatagtccaaggggaagtgactttataaggttgaccccaaatccctccagcagccagggatcaggcagtgagacgacatggctgctttgaccagacttccaccagcatctgcactgggctgtgactgtgaccatggtcttttgggtttttttttttttagaatgacagattacatttttttttttaaataaaatgcttgttcttaatgttttcttgtctggtctgtgtaacacatgcctagatagcagagtttctgtttccttactgtttctatttttaaatatgcatccacataaatttagattaatttaattaattagctgattaggtattagaggccatgatttgttaaacaaattaaacacactcacactaacaagtatgtactctctctccctctctctctctctctctctctctctcacacacacacacacacacacacacacagaacaaacttaatatacctaactcatacacacacatataaagcaaacccaacttaatatgtcatacagacaagagtttaatgttaattcttacccacatctgtctcctgtactggaggccaggtagatgactcctcacaggctggccacctaacatgtataaagaaacttctttattatttggagcataaggcttaaggcttccccagaagcacagggtgaagggaaaatctagaggtcacaggcacttgtcaaagaaaagtgatggctctgcccacttctgcctggcaggagcacgctcaccaagggcacatgaagccatctgtgtcaacacagggcacaacaggaaagcatctatcgagttgtccaatgtggatacttgggaactcttcatctccctgcttcacatcgccaagcaacaaggctgaataatttttgtgtctccttgaaatcaatttgtgctgatcacacacgaaggtgggaaccacagcttttgaatatttacatcgagcaaataaaatttacgttccctgaaaggcaaagaaggctgccatttcatgcttgctaaccttcactgtgtctttctcgttgctacacacagcagcctagtaggcacaaatgttcacggccattacagagggggagctttctgctttgtcaactttggtttagaaaaagctctggtttctctattgcctttatctattacatctgtaaaatttatttaagcaatgacagatctctctctttggggctccgagtctgggagaatagccattgggatgagatttgttgaatatgactgttcattaaattgcaagtagtcagggaagctaacagtgcggatctgctatgctgggcaggttatggtctatgtttagagcctctatgtcaggtgaagaacaactgtatctcattaattacttttagaatatttaaaatggaaatagaagagtggggagagaaaagaaaagaaggtttgaaatcccagaggaaaggttccttggcctgtttatcttgcaagattccagttttcaagagttttctttcaaagggcaaaagtgggagccaggccccagcagctaggggtttaatgagtgtggagcttgtgtagcctgctagaccttcctgcattttaagagctactcctcccttttacctctttcgtaagtgctcactcttggccaacactgaaaaatgtgacttaacaaggagaagaagctgggtggcaagcatccggaccctgcgcctcatgggcaactgttttggtaggaataccatgggaatggtcaggaaattgaaaggatttttaaaaaggctttctgagggcagtgctcctgaagttaaagaaaaccaggcccagaaaaggtgggccatggttctccacacccaagatgggaacaaggagttattttgaaagtcctgggtcccagaaaagattaaaggcactgtgaagtgtgaggcaggagaaggtacccatagaaaccagatccaagcctgagattgtccaagatgtgggtaatggggaagaagtgacatcaggagtcatgaagaggtcaagacagacacaccctgatgcccacagagatgtaagcgcttctgaggaaagggatgtctggtctgtgaattttgattcctttgaaagtgaacccacgtcataagatgttagtactctatcccacagagagttctggaatcctatctccaggtcttaattacctcctgtgaacttaaagacagatttagaatggatttgagattctatgcttcttccagatgtcattttctaagacaaagtgccttatggggtaagaaatgaaatgtgggacccactggagggccacagcaggcatccctacatggccttggcatgcggggtgcagctgaatttggtgcatctgctgctctgttgcacttgctgctttcaaggctgtgtacgtgctaccaccatggtcagtttcaagtttctagggtgctgccaccgaacctggagttgagatgagattctcaccccctccagcgcgagccgttagcacacctctggtcatcatagagcatccctgtacaggatgctccatccgtgctcctgtacgaaaagcgtgctattcataaaaccatgttccgtaaccatacagaacacacatgggaacaggacaacaggagtcagatcatgttcagatctctgactttctaaccaggggacatcagttaagcatccttagagttaatttgctcattagtaagataataattaaggagcttgacacgcaagctctgggaaaacaaatgagttgatctgtgtaagaacattgatgcttgtgactaatacatggtaagttcccagtcaatgctccttgcacttcttttcctcttagcagctgtaatacaaatattagccacctgatagataagataaattttaaattgcctttttgatgcttcagtggatacctccaccccaaggctctattctatcaagattcagtaggaaaatctccagttcagtttgtctgtgggtttctacttttactagtaagtttatgtctgtctcgggatgttttgtgctgcttcgatagaatacacaggattgggcaatttataatggacagaatttattttctcacagttgtgggtctgaggaagtctaaagtcaagactctggctttgaggctaggaagatggctcaattggtaaaatgcttgccacacagcatgaggctccagatccttagctacaacaactacacatcaaagatgtgtactaggtcctatgccagcttgcttctatcgttgtgataaacaccaggtcccaaagcagcataagaggacaaaacatttctttagcttgtgcttctagaacacacgccattgtcaaggaaagtcaggatgggggtggatgaaagagggaagctggaggaagcagctgaagcagaggatatgaagggacactgcttactggttttgtttccaggcctatgttcagctatggttttatacatcctaggcccacttacctaggggtggcaccagccacagtgggcttgtccctactgtatgaagtagcacccaattcacaggctaatctgatagaagcaattcaagtgagagtgcctcttcctagatgtgtcaagttgacaaccaagatatcacattacctaaacaatagaacagctgtttgcatccttagtgctgttaaggcagtataagaatgtaagaggctctgcaatggatttatgcaagaactgtatcctgtatgtaagaccttggtgtctggggtagaagagggctgtgttctataagcagtcccccagatccataaggatgacttatctgctcggactgcattctgacaattatttggtttctctcaggttcctttcctaacttacttgtctacaaaaacaaaaagcaaaacagcaacaataacaacaaaacttaaaaaaaaaaaaagaaagaaattccgggagagcgttctatgtgaaaacaggctacatagttactctcaatttgaacacttcaaaacatctattttggtctttggagcccaatgtgtttgtaaatttaatcagctatgacaatcgtaaacatgtatcaggatttataaaacacatcgaagtcacaggaacaagactgtcgtctaaggaacaaggatttgttgcaaatttgagtttctgctgatggaattttccctagtgttcaagttgagtggtcctcagttgccccacagaatgtcatcggtcaagcccagacgctctcccagacagaaaacagtatccactgttctctgaggcgttaccctttccagaaagcccaatcaggagtcccattacatgaccataagttagcagcacatacacacacacacacacacacacacacacacacacacacacacacacacacacacacaccagactttaacatggcagtagccccgtggctttctgggaaaattgttccttgctttaagaagtgcacatgcattcatgcatacagacccatagactggaatacactatctgaaacagtataaccctttggttaaatgtcaacagttttgtagttaaaaaatctcagttaaaactttaatttagccagttagtgttagtgtttctgccccacccccattcaaaaatattgatttctaaaacgtcaaattatgatttcttccctcattctgccctgttgtttaccactttgaacaacaaaaggcatctggctctgtaacaggcctggttgggccagggtcctctggtgattaccttccatcagccactggctttcccaccctcttccagagcagtctgcttgggtaagaagagataatagcttgctaggtttccctttcaaagaagccaggaagcctttggaccaataattctgcaacagctttagagtgctggattcttcaaacaaagccgagtagcatcttgttctcttcaccccaaggccatctcgctgctgctagctgctcataaatacagctcccagtttctactgaaaacacctttagttattgtaagcgagggacatcaggaggggataataggtctgcacctcattcttccaccaggcattttcctgtcctaggtaccaaccccacagctttttgttatgaaaacaaagcaaaataaaaacaaaacaaaaaacccttatctattgcttcctgtgctcgcttccagtattattagctctgcctaaccagacagcctgtttgcagtgatgcttgatttagcaatccagggatgggaatcagattcttgtcttccatcctcctccctcctccctcctccccgtctctctccctccccacttctccctcccccacttctccctcccccacctctctctctctctctctctgtgtgtgtgtgtgtgtgtgtgtgtccctatatatgccccttctctgtgtgtgtctgtatgtatatgttcagtcttaacagaagtacaagacaacctgggaaggcatttgaaatgttgagccaggtctttcagtgtgaagaggtgtataaaacacatcccagtgatgagtaccaattaacagtgcattgctttctggaaaagacttcaagttagctgccctgcaggtcagagtcaataaagactgagttactaacaatagcctttctctcttgctgaagtcttggacataaccctaacttcatcagaccagagaaaaggagaataatgtgaacaataggagtcttgggggttgacttgagcctaatgctcagaggctgtaaaaactgccagagagcttgattgattggctcatatgctccactcctccatggagaggactaatgtttctgcctcttctgagagagtttgatgtgccacctggggtcagaacttatcagcctgtggggctaatgtttctgatgaggccaaagtgcagtcaataatttatacagaaatttgtgcttagattcacaagggaagagttttgacttgcatcccttcctccatctgaagaagtgtgaaagaacttcaagttgttgtcctgccaacagcatctttggatgcatatgataaacacttaggacaattgtgaattcaaaatgagacttttaaaaaccattttggagtgttcaaaacgaggcccaactttggaagtttcagtatccgttggtgaaatgggtagagggaagccagcatcagcagtttacatatattataaaccagactctcctagaatgtaatgaccgtgtccgttagacctagagtgactttgaagcagttctgagtgaccatgggtaaagtccccatagtagaggtctcagggtagagccagcagagagaaaatagccggcaaaaccaagaatggagacagccgaggagaactagattttggctagatgcccaaaatattctgtatgtccggtatgcagagaaacagaaggtagagttggcctcgatggctgcgcatgaccacgcatgcgtacagtgcactacagcgcccatataaacgcatattcatccagctcctagaaattgagagtaacgcaatgacacggagcagggctggtcaatcaatacccagctaagttctgttctcctgcaaaatgacagtttgctccagtaagtgctaacaaaggcccctttaccttcgccctgcagtaggagagcgctgttagtcacacttcattaggtttgtttacagaaaagagctggtctctaagcagggtattgaaatccttgtaactctatagggccttaaaggggggaaaaaaaaaagcaaccttccctccctgaaagataagaactttggaatgtgggtgggggagggtgcaaagggatctcagaccattgtcaggaaaactggtttgttcagatgggaataaaaaaagatgagttggcggttaaggtgtttctgccttgtggggaaccagaaccagtaccatcggaaccagaccagacacttccgctgtcctcactgaactgcaaagcttcaatctggcctttttgtgacctagaaaaagtgaggtgctgttgagaacctgaaatgagtcttttttaccttaaaagtaattctgaggagcggcttctagggttttaagttgtagtcaagagacagaggaggaaacgcttgctttcagcaatgaatgcttgttaggagagatgagttcctaacggttgagattagtggtctgtatatagaagcaataaaaggttctcaagtttgtggcctgctaggactatataggctaatgggttcagaagcctgactgggaagttgcttcccgtggaaggtatgcaggaagactgccctgttagtgtggaacttttcttcagcagtggcctgagttacaagagtgtaacggacgtggtcacgtgactctgactagtagaggttgagctggagctcaggaaagtacaggtgagctccagggaggactgaggctgaggagcagctgtctcagttgctgcatttgttggggatggggcacggtgctccccctggctagcgtcctttcctgcctagccttcggaattcattgcagatccctctagcttggaatagacattcctcgtcttcccctgctactttctgaatctgagctatatgtgatgtgactccatcaccaaagacataaacttttgtgctacttgtgggatatggtcactgtaggagggaacaggggtgggcaaaagcttttctgtcgagctgaactctgtaatcgagagggggctgagcccaatttctctgatattatgtcctttgtatctttactagattgcccaagatggtggtggctttatctgttgtgtaatagtcacctctttgtatgccttatgcctgtaatatctcttctccctctccccccccccctctctctctctcacacacacacacacacacacacacactacacaccctgcagttcagagagtcagttcccagtttgagctgctgttgtaaattgctattttaaatttcagcgagtggaataatagccgagtgatcatccccagcaaatgttgttggcctttgtaaagaatggctccttcagaagctctctgatttacagaggacacagctggtgggcagcagagctgtaggaatctgtgctctcctgggcctagcaagctacagatgaaaagggcccagagctggcacaaaagcaaataagcgctctgactttaaataaagcatcctaatttataggaagcctagctcttcagtcccagcgagatctatggatcagtagcagccttttgatgtggagcataattgtcaattggttcccactgtttccttataattcaggaccaggcctggttaaaaaaaaaaaaatttttttttaaagcacagtctcataatctagaattgtggtacacatattctgacaagcaattcactaacgtttaaacctgaaactctgcaaacgaccaggacctataacctggtgctgagttgggagagagacagggtgactagaggaccacctcctcctgcttttcccttgcccactcttcccctaaggccatgaggttttccattctcaacttcctctctatccatccgattcactcatctacagaactgctttgtctttcctcccagctttcccctccccaatgcctggtccagataaaaatgggaaagccggctgttacgggactcagtattcacagcgtgtggacccctctactctgggtgttgaatatgctctgttgatggggtccgatctggaggggccctttttgccttggataactgttgccatcttcactggctcctcactttgcctgtttcccagctgaagccatgacaacatgaagagcttggataagaaggagttgttgatgcaaaaaaggcacatgaggtgcagggaactgtgggaatagtgatttgatagaccatatcctttcgattatctgtcttcagtggctctgacagggagagaaggaaacctctgtccatttcactctgggagatcttggccatatgccctgtgtgcccagggccacatgtcaaaaggctgtgtcatgaaccaacactnnnnnnnnnnnnnnnnnnnnnnnnnnnnnnnnnnnnnnnnnnnnnnnnnnnnnnnnnnnnnnnnnnnnnnnnnnnnnnnnnnnnnnnnnnnnnnnnnnnnnnnnnnnnnnnnnnnnnnnnnnnnnnnnnnnnnnnnnnnnnnnnnnnnnnngggggtgggggggggggagtggattcatgccttcccaggtgggaggtgtgagaaggccttctctaatgagggaagcacttcaaagtgtgtaagaaatctgcattgaaagtccatcaaggcgattcagatttcatataaacccaagagtggctggaaagctcaagtgcagaattgggtattggaagtggctttgggctccctgatgtcaagcctagagggaagccgttacttacaggaaagcttagtcaaaaatcataaatgcagcctctttgtccaaatatatccagacacattgtactcatgccacacggcatctgcttttcctgggtatgcatttagattacttcaaatgtttgcctccaaagattccctcaaggccccccagatcccccatgcgccccttggcctttccttcccactgtgtgttggactgagccttggtgggccgtgacctgcagggattggcaccgtgcccagtgaagtgtctctctggcttattgccctgttgtagaagctcccttgagagatgtcctcttccccatcctggcactgtcatctcagacgtgctttccagcttgcccccaagtaaagactctagacactttagcagaaactgttacaggaacttgccagcaataagggtacttgtggtagtgtgaatggtgtttgtatagagaatatgttctaaaaccatcaatgccactttaggatgtctatatctgcttaacctaaaggcaaatgcttttgttactgatcattcataaaactactttctaaaggtatccatgtattttctttcatggtgcttttcattacatttgaagtatattataaaacctatgacattttgtaagcaggaaacttgcacaacataggtcttggctcttgcaatcaacaggaatttatctctaatgacctgtcaggaaatggttttgttttcagacaatctcctgtcccaggctggccttgaacacgttttttttttccctaggctgatcttaaactcttgtttgtgctaccatctcctaaatagtaggattgtaatcgtgtgccaccatgcccacccgtaggcacggcttttcttagaagttgtgtcttaggctgttgtgatgttcattcatccttctacattggtgattttcggcaagaggacactttgtccctatctccataggcagcataaagacacagccttttttatgtctttgatgacggctgtcaaaagccttgctcctgctccctgttcttcgccagtagacttcctaacaggctgttgaaatttgtagacatgggagaagctactgttactggggaagcaaggaaaagaaagccagcaagagcttcctttagctgaccagtcagctggatattgaccacctgtcttcatgggaaagaaatagatggcagtgaataagtgagagtcgagttttccaacaagctgaatcattttcccaaatcaatacagctcatcagacctcggaacaaaggctgcacgggcagtgacagagatggaagtggttctgtgttcttctgtgtattaaagcatgaggcccatgggggaaacaaggcttctctggcagtaggtttgtgtgtgtacatgtgtgtgtatgcgtgctcattcttaaagacttactaagtacattcgtaggaaggaagtccctccagattaaagcaaaaagagctatatagattgtatatggctgctcaagtattttgagggaaacaaaaaggaatgtggagactattttgtcttctaaaaggtagattagagccagcccccatctttgctttcagtgttattggggtttctcccttcttacttatggtggtgtttagacaaactcaaacaaacgtctagaaatgaacgttagcccctggcaaaccgcccaaactagtctaccatgaataaaaccagcacctcacgccctgggaatatcagcaaaacggaatgctggaccgtcgtatagaggttataattaacaaaggtagaacacttgcaatgcattccagccgccaacagagactcaccagcaaactccagtccttctgtcctttaatcattaagccctctgtgctttcacaaggtagtaagttaacgccagaacagcgtgtctgtgggctttacgactggggtggcagcacactggggcataaagtatttcattatacttccttttgtcagccctgccctatctcgcaagctccattgccatacattatttgttcagataaagcccaatgttcagggtgactaatcgcacaactgtgttccagatggtttgattacaggatgtggttaaagtaactcttcaaacattcagcccagcagtagggctctatttaaaaagaacaaaaagagaaagaaaagaaaaagaggtggggggaaaacagcaataacaacaacaaaataaaccccactatttcatggccacgtgacaacactgacttttcttgccttgatacactatacatatatccctggtgtagataataggaaaatctttttgttctttggctggcaggtatttcatgggcaaacttagttgtgaatttaaagattttgcaaaaaattataaatgttgtcctctgaaagagaatctagctgaaggtgaagcggtctgaagcccgacccgtgaataaaggcattgtatcagctccacactcggaaaaggcaccaggaccacactcaaccgaacaaagccagagagctgtcatggaaagaagttctgcacaaagagatgtgataagccccaccctgcacggtggtcagactgggacaatgtagggtaaccaaggctctgaaatagtggcatttcttctatactcattggtgtttctcttgaaaaaaataaagggaagaaaatgtaaccacagagggggagaatcgcagcacaaacgggttacagtttggagttattagaatgaggtttgcattttctgcccgagtgcacaccaagtctctccagatgtggcagtctgaagaagagttcaggaaaactttgtgattccagatttggcatctgtgatgcctgccaatgctcttgctcctgaggagggagactcttttaagactcagccttttagctgtaatataaacagatttatgcaaagccaccgggctatcagcgtttgcccagttcttgaggaagcagcttcacaaatatgaggaataataattcataagccacatatctaaccacagtggagtagaatctctccacagagaaagtctgtcctcaataagctagtgggatgttacccttattgaaaatgtacgggagcagtgagacctcaaaagccagggttctgttgagagtcctgtaagctccaatgtgttcagtgagcttcctcacttaagatgcagtgcttctccgggctgtgtatgctgacaggcaacgcaccaataacaaaggagggctgtactgttggaagagatcaggtcagcatgtacatgagtggagggaaatgttgaaggaatgtcctctcaggatatgacacacatcctcacccatgttcaaacatggaatgagtttctctcctaaggatggggaattcctcgtgagtggaaagctgtctgtgacttgagctaccatgtgagggagaccttgctgccttgaacttgtagccttcaaggttcctttggtctttcctattcctggcaaacagaaaggagagcaaactaggagattgtatcctcaaagatcttacgggctatgccctttcatgctctccttcagtagagtgttatcacagctccaggtagacagacagagagaatccatctataaaccaaggaaagggggaataatgtgctagtgagcatccatcatggtagagacaacatggagtttagtcggtgacccaggagagactggatttagctggtaagatgctatgtgtctgcggatggacaggtgctgtcaccggagtttgtcccaatttattaggaacttcagctgtccttgaggaattctatagaggcactcaagccttctttaggggagttaagtgcgatgtgagggccagccagcaagatggcagaaagggtcagggagcctgcagtcaaacctgatgacctgatttccatctcccagacccacatggtagaaggagagaactgactctcaaaagtgtttccctgacgtcctaatgtatgccgcggtgtgcaagcacatacagacacacgtagacacccccacccccgcacacaatgtaataatcgttcatttgatactgtggcataaataatggctgaagaaacttgtttcaggctggaaggacaaaagagggtgtgacctggaggggaaataatgacaagaagttattgttctttgggcagagggtgagtggagtgcttctttgggatttcagaccagagcatggcacttacagacgatatctggtgtaaatcaaggtatatttctttttcaatataaacaagatggtaggatagtatctaagtagaccttaagcgagtgctgatagtgtcttctactggtgataagactagaggaaaagggcacacacgcacatgtagaatctttggccagcattggcatcttcaccccatgtcttagctattaaatatttgaggttcttgcccatcctggtcctcttagttaatacatagatctttcaactttagtatgtatcatcatttataaatgtagatgttattaatccagattcctggcatatgtgtgtctggttctctctgtttctggtacctatcactgacccagagatgggaagtcaggtttaggattattagtttgagcgcttgctggtctaagacatatttctgagcaaggtgtgaggacagggcatgaaccaagggcatcacacctgggctctagtgattggagcctaatctaatgtgtgagattaggcgagtctaaccaagagcccactcggtaagcaccggtgatatgcaaaaccatgcttctacttctgaattatgatgcatgtctgtactggctataagactgtagactccttaagtacagaagctgaacagggtttccaacaaaatatgatccagtagcaccaaataggtacttaagaaagacccaataggtataaccaaccttgatgggcctggataggaaatagaacataaattcttatgtgacttcagtgtgtgtgtgtgtgtgtgtgtgtgtgtgtgtgtgtgtgtgtgttctagtatatgggactggtatcaacagtacaaagaagaaaatcatatggattagcctctcgatccatcctcatacagtttttttctgcagtaatatacctcaggtatttttcaaatagcccttgggtgggaagggaagggcaataaacccagagagatccttgttgttataaaaataaaaagggctctcgtagagagcccccactcccatcgcacaggcagggcgttcaggagcataagtgtgcttgggatctaaatctttggggaactaaggtatgtgccagtctaatctgtatagagaggaacgtaactttaagcctggggttataaaatccaaacctgtgcttgctgaggactagttctcatctgacctttctcactcactaatttaagcctttagtaagttatgagttctatatgggcgtgggttacaagatgtttgaaatttgtaatttcattaaaataattttaaaaatatatacacttggattattgattgagagagggtcttcctatgtagccctagctggcttggacgttgctatgtagaccaggctggcttccagctcacagcatcacccccctctgcctagaaacaagtctgtgccatcacccccaacattttccacatttcagaggtaaccctcttaatttggaccttcagaatggcgtgttttctaaacgtggatcttcctaaaacaaaaaacaaaaaacaaaacaaccccccaaaaaccaaaaacaataacaacagtacattgtagttcatagaggaaagttgcttaacctctccactgacttagagccacagttgtcaatggtggcactgtgaagagacttgtacacatcaagacagaccaccacaggcccatctctaattagcattacttgagaggactctccctgagaggggagcttttgttttgagcgttttaaatccagactgtttttaggaaaaaacaaaaacaaaaagcctagggtgacttatttaggcttcctgaagttgaagtaggcttttctttacagccttttactactcccggtacagacaaccacgtgacccacgtggcttctaggcagtagcagctgtgaactgttttcatgaggaagttggaactgcagttcatcctttgtgaccgtttcaacctgcggaccaagatagccactgattgatggcctgtgtggttgggtcccttccttttccctggcccagttaccctcgcctggtttgaggccgcagatttgggctctgcgtgcatggcctgttggcagtatgatggggaccattgtgggggcggggatgtggagcctgcttccagcttccagggctttggtgaggggctctagcgatgctttcgcttccccgcggtggttgaggggaagctgaagctttctcctgcccagccctttctccttgccttgtcttccagtcttcaggccagccgcatcgggccagccaatcagacgcaagcgttcgctgcaggcactggccaatcggccgcccgcatttgctggaaacgcgaaacccttaggggaaaagcagtaacaaaagcctttcactgcagacaaatgttaagtgtctgtgcagacttttcctgtttttaattttattaccgcaagaatggagggtttgttgtttctttcatgtttcctttcaagcaattttaattatacatttgtgctacatcagggactctggaacgcagtgatttcagcctattgcctctgaagctaaaatgcagtaaccttctggcaatacagatacattcctgcactgtaaatatagctgacatgctaaagaattttaagcagctgcagaggtctctgacaccacacacagtgccccagagagcagatgatgagaaagccagcccaatctgcccccctcctccatgccccacccctctttcctgaagggatgtgctcatacagactcctttccgattgttctgtcttgtgcagtttttgaccgaatgcctaattaccatcgattctcactgcaatgggatttttttcctactcaatggttaaaccccacccccacccccttgggagaatcacaaaggaatcaagcatgatttgaggcgattcttcctagcttttttccccccatagctagactattgctacaatagtaggtggaatttacagtgagtaaattcagctgtcatataacttatagcagtctcaaccatatggaaaacaatttttaaatctccttttgagattttggggagaaattttccatgattcagtagttgagtcctgatcattcagatattttatcttctttttaaagattccccagtaaaaagagtcctgttgctttatgtggtttccaaaatggcagatagcacaggagaacaagcctcccaggaaagacttggaggaatggcctctgagggcggaagtgtgggcaccgaaagaaacaaaggctcctttaaatgtttcatttatttaccctactctgaatatagctttgttacaaatatgctttaaggatgtgatttttgttttgttttgttttaaatggcacttgtccccaagagaacaagcctcgtgttagatgttgtttcccagtgacatttggcatactaagcatgctttagtttagtatttcacagatgcagcgctcaattaaagtgtctgtctgctgagcagccgaggaagaagcaggatggctggaaggaaacatgagcgtgcgttcatttttttttttttttttttgagttctcttctaatcctctgtagcaaatgcttaccgaagttgactgaagataaccccaagagcagatgcattgtgcacacttatttccttaagagagctattttaagagcctctgagacaagaccaagcagtgacacagagcccgttctgaggttgatatttgtctcacacaggcgaggaggggaggatcaagaagaaatcacagctgccccaaggacccactttttcctctgtgcctatttttacatatctgcaagattttccccccaccctcttaataaaaaaaaaaagttagcattgttttctattgttgaattggaaaccagattccttttagtcatcctctgccttaagcactggtaactcgggcttggtttatgttggctgcctgccaaaggaaagcaattatgtgtaataatagaaaaattaagaggtgaatgttactgttttacagcaggacatggcaaaaaccatttccttctgtcagcaatatcttgatcacaccctcacacactctcaccctttgcaccacactcatgaacgcacgcgcacatacacacacactcacagagagggggtgagggggtgggtggaagagagagagagagagagagagagagagagagagagaaagagacatatttcctgtgggttttaacttgaggtcactgaaaccagaaagaggaagggtgcaaaccacaggttttgaaagccaagtgagaaaagaactttgctggtaaaaataatatcaatgaatgaagtcgaaataaagtactaggtgataaatgcgcccccgttcaccctccactctcccttccaggtgtcctagtggtcaatgtcacatggaggaacaaaacctacgtggggaccctcctagactgcaccaagcacgactgggcccctccccggtaggtgccttttctttcttgctccatcctctgctcctcccatcctgtttttgcatggaaaccatagaaagaaattagtaatatataaaactcttcctgtaattgaaaccaggcaaaggagaaatgagccattcagccctgagccagtaaaacccagatgctagctgtcttctcctaccagatctctcctcctctcacttccctctctcctttgttttcctctctctctctctctctctctctctctctctctctctctctctctctnnnnnnnnnnnnnnnnnnnntcccttctcccccccccccccttaaatggggatttgaactagttgaaagctagctctctgagctgctttcctttgattctctgtggatgaacaacataatccacagggcagcctggccctgggctgatgtaccagtacaaacagaggctggtcttctcttggctgcacctcactctcaagccaccagggcagtgggtcctctttgctaccttgtgtccctgagctcctccctggctctttcggagatgctcattatgacccacttattactcgcttccctaggttttgcgaatcaccgacaagtgacctggaaatgcgagggggccggggcagagggaagagagcgaggtctgccgcggctgccccaggctccgaggtcagcttcaccgagtccagagggctgcagagcaagaacagagggggagccaatgggaaagggaggcgtggcagcctcaacgccagcggacgaaggacacccccaaactgtgctgcagaggacataaaagccagcccttcctcaaccaacaaaaggaagaacaagcccccaatggagttggatctgaactcgagctctgaggacagtaagcccgggaagcgagtgcgcacgaattccagaagcacgcctaccactcctcaggggaagccagagactacttttttggaccaaggctgctcctctccagtgttaattgattgtccccacccaaactgcaacaaaaaatataagcacataaacggcctgaggtaccaccaggcacatgcgcacttagacccggaaaacaaactagagttcgagccggatagcgaggacaagatctcagactgtgaggaagccttgagcaacgtggccctcgaatgcaacgagtcaagcacaagtgtgtcatcatacgatcagacgaaagcacctgggtcccccggggctgggaacccccctgggacacccaagggaaagagagagcacgtgagcaatggcccaggtcctattataggttcgaaaactggcaagaattctggcaagaagaggggccttaacaacgaactgaacaaccttccggtcatctccaacatgacggccgctttagacatttgttcagccacagacagcaatctaacggcggaaatgcccaaattggaagcggaaggactgattgacaagaaaagtttgggggataaagaaaagggcaaaaaagcaaacaattgcaaaatggacaaaaacctctccaaactgaaaagcgcccgccccattgcccccgcccctgcccctacgcccccacagctgattgctataccgactgcagccttcacatccaccaccacagggaccatacctggactgccctccctcacgaccactgtggtccaggctacaccaaagagccctccattgaaacctattcaaccaaagcccacaattatgggggagcccatcaccgtgaacccagctctggtgtcactcaaagacagaaagaaaaaggagaagcgaaagctcaaggacaaagaagggaaagagactggaggtcccaaaatggatgctaagctggggaagctggaggaagccaaggcggctagcaaggatttgtctgggcattttttaaaggaccatctcggtaagagcgaagggctggctaatggattgtcagagtctcaggagagccgcatggccagcatcaaagccgaggccgataaggtttacacattcacggacaatgcccccagcccttccatcgggagtgcctcacgcatggaatgcagtaccttggtgaatgggcaagcacccatggcaccactgcatgtattgacccagaatggggctgagagcgcagcagctaagaccagcagtccagcctattcggacatatcagatgctgcagatgatggcggttctgacagcaggtcagagggcatgaggtcaaaggccagttccccatcggataccttttctaacaaagacggtgttgtgaaagggcatccttcaacttcagcacagccatctcagctgaaagagtcccattctccctattaccatggctatgagccttactattctccgagttacatgcaccctggacaggttggtgccccggcagctgggaatggtgggagcacacagggcatgaagatcaagaaggagtcagaggaagatgcggagaagaaagacaaggcggaacagttggagtccaagaaagtagaccatacttctgcacccctgcagcctcagcaccagtcagtcatcacccagagacaccctgccctggctcagtcactttattacggccagtatgcctacgggctctatatggaccagaaatctctgatggctaccagccctgcctacagacagcagtatgagaagtactatgaggaccagagactggcagagcagaaaatggcccagagtgggagaggagactgtgaaagaaaggctgaactccccttgaaagaactgggcaaggaagacaataagcagaaaaacatgccatcagccactatctcaaaagctccctctaccccggagcctaacaaaaaccattctaaactagggccatcagtgcctaataaaactgaggagacaggtaaatcacagcttctctccagtcaccagcagcagcttcaggccgacagcttcaaagctaagcagatggaaaaccaccagcttattaaggaggctgtagaaatgaagtctgtcatggactctatgaagcagacaggtgtagacccaacctcgagatttaaacaagtaagattgtggagtgtggcccccgacagacagggagcagtctgagttgtgcacatgtcttgggcttgatcttgctagacatctaagcagtgggaggaagccgtcgtcagggggtttccctcttcccttgagaagtatgatccttgggagttcctgtacaactctaaaatgtacatgactcactgaggccatggtgtgtagctaagggatctctgggcatgcgccctgcagctatgtgttacctaagagtaattaattctgcggaggactcttgatttcttcatgagccaaagatgaaggcattttactaaagggcctcagaagtctctcaaattctgagatttcatttcctgtctctgaaacacttggagatatatatatatatatatatatatatatatatatatataaagatttttaaacccaggtcactgagttcctacttcccattcatcatttaatctaaggaagtgtgagcacctggtatctcttacaaagaggtctgagatgtctgggtttctggtttatgttctgtttggaacccaaagtagaactcttgagctgtggttttttataaggagtcagaagctggaggtgacagttctcaggacagttcctccacccaggctgagtgcacttgaagtgcagtcaccataaaaccagacacatagctagttctgcgaccgtcactccctgctggtattccccagcatcaacaccccaactttactacacccggtgtttgccccctagtgagtcagaacaacaagggttcttaactgctatgtttccagccagtgttgcgattgagggccaacttcaaatcctcagtcaagacctgaaccctaggtggagttacaccatgagtgggctgagtcatgaagagggtttcaagcctcagtcccgtgcccaccatagctctaaatcggctgtcgtctcccaaggttaccggagaacaagacaatttaaaaggcccatgaatgggtttgctttctaataagcaaaccataatacatgccattggtttgatatttgggctttcgattcaagatgttaacatattaatgagccagcatagtgagatcctcagctgtagtcagtgaagaaaatgtgttaggaagccaagagtttatttttgcctaattggtgttaataactgtaataactgcttaaaatttttaccgttagcttgaggtagagtttttgaaatcccttttacctgtgtgagataacaaaaggaaaacatagactgaattaaatatctttgaggatgttattatctaaggccttttaacccagctgccatgtgaccttgatgttggctgaactgtaaaagcattggtttagcctgtggtacgaggactgatgctaacacctacctcagacattttttttttcctttcagagtaggttgaacagcacctggtcacttcgaatgaaataacaataaatactgctgccatgtaaattaacaggtttgctttgcagatgatgacattttaagacagatctttattttcaaaccaggatccagagtcaaggacatggcaccattatgtataccagcccaagtacctggaccaacaaaagccagaagaacttgacagagaaaagaaattgaaagaggacagtccaaggaagactcctaacaaagagagtggcgtgtccagtctccccgtgtcattaacaaacatcaaagaggagcccaaagagggcaagcgtcctgattcccagtcggtggaggagaacaagctaaagaatgatgatcggaagacaccggtgaactggaaggactctcgggggacacgagtggccgtgtcctcacccatgagtcagcaccagtcctacatacaatacttgcatgcttatccttacccacagatgtatgaccccagccaccctgcataccgggctgtctctcctgtcttaatgcacagttaccctggtacgtgttacgggttctaactacgttggcgggaagaggctgtgttcaaatgatagctattaacaactggagatgaatcagaaacttcccagatgtctttcggtttggcttgttttgggggctgcttagagtgccaaagaggaaactgatttaatgggagatttttatattttgtaaggaaatgtcaagagtccttgggctctagcttccataccttctgatggcttactatagacgtttagactgacagatactttattgcctgtggaaatattctaagcacttactgtcataatcattatagttaccgtttctttcacttaagcggacacataaatggatgaagtagctataagctcaattctgtttacatcctcccttcatcacgacgaattaaccagagaagaaaatcagagaacctagacacagataaataatcatgtagcccattcttaatgtaaccccttattttaggatgtctgatttgtatgccccaaaaaaatcacatgttccagccgatttcttgttgttgttgttgttgttgttttttaagatgtatcctgtaacatgatgtgacatttgttgtttatctgcaggggcctatctctctccaggatttcattatcctgtttatggaaagatgtctgggagagaagaggcagagaaagtcaatactagtcccagcatcaacacaaaaacagccagcgaagccaaagccctggacctactccaacatcacgccaaccaataccgcagcaagtcccctgctgtaagcctccttttgttggtagttaaaaggccatgtttggtgggggaagggagacaagaaacagaacagtcttgaaagagaaatggtttagaaacccagctgggatttcaggatgctgttctattccaatacataaagaatggaatcttgaaatataagatgtggtcacacaggagtggaaaaaaatgtcattgaagcctttgtgggaacggggagattttctgttgcaaaactgtcgtgttctttacctacccaggaggagatgtgttagggagaaatttaaagttatagtgacttgtacaaaatagtgtaaatgttacaacattaggaaagtaaatgctggaagtttagtttatactacccttgttactaagcagtttagaggccacaaacttttaacctatttgacaagttgaacttttgctaaatgccttcttaaggatgggggtgtagctcggtggtaggatgcttgcctgtcatgtgccaaggcaacatccctagcctgaaaaagaaacatcaacgaagacacaaatgaaaacaaaacaaaacaaatccaaacaaacctaaaatacgttttcttcagaaacaactttcaaaaattgactttttttttttcacaaatggaaaggcttgcttccttttaagacagtcgacagtagcaaatgtagccagcaattatgtgacagtggttgatagaaaaatgaattcaaccaagacagtccagctagcttgtgaggtgaccagacagatgtcacccctgtcccctgtgctcgcctaaccacagtagacactcgagtttcagatccttctgatgaccatggtattcacatgttccatactgaagaagctcatgtgaagcaatgctgagggttcatgacacaccattaccattaactttgtacagacacttgagcctgagttgcatggcataggagtaaaggctgcatctgctgcctgctggtcttgatgcattatcctgtcctcatcgttccacaggagagttacaagaaatgtatctctgtgaaagatgtactcccagagaagtgacaactgctagtcctaaatactgcttataaagagaccaaagaaaagccatagctcctgggtagaaaagaaaagggggtgagatgaataagatggggcgtccacagggcgaacataaccactaccaagaaactagaaaaggtgatcgatccccgcccgatcctttttctgtaagttctcctttcagtgcacgcagacgttgttccactgagaacctgccgtgggaaaggagagctaggttctaaaagggagaaatgtgtttgagaaacactgtccttaatcctctcggatgtggaagatgtggaatttgtggtgacttttcagaattgaataatctggactgtgggcagggcagtgctttcctgctgattctgcccacccttgagtacgcaagaaattggttcccgaacctctcggttctcaaaatctgaagatactttataaagtgatgacacagattttgcctgtcaacctacattcatctttgtatttttagtcatccccagattacctccaagaatctactacaacaaaagcatcatctgagagtcctcagactgcgctgcttaggggataatggcaattaaaccaggcttaatacccttactgtgccagtttccttcagaaaactgttcatccaggctagctaagtcacacaagtggggctcgtgcatgcagtcaggagaattataaagtgattaaactatgtgtgcagcataaatattgtatattgttgcatgaatttgggtgtggatctttgtaagaacacaatgaattctttgttgggttttgatctttgagacattttttttttctcagtatagccctggaactcactttgtagatcagcctggcctctgtctcagagatctgcctctgcctctgcctctgcctctgcctctgcctctgcctctgcctctgcctctgcctctgcctctgcctctgcctctgcctctgcctctgcctctgcctctgcctctgcctctgcctctgcctctgcctctgcctctgcctctaggattaaaccatgcctgaacacaataaatactgttttaaaaaaaaaaaaaaaacatgagatgaacttccttcacaacgtataaaggtataattagaaaacttaacctttaaaaatagtcttagaaaatcctttaaaaatttcatatattaaaaaatgtttctgaaagtcaccaattggtttctaaatagccattttgagtagtgaatcttgagaacatttttaggaaatatttgcagaaaatattggtgccatttagatgactgtgggaggttctctattgttagcttcgctcttttaaatcaaatgcctatcttttgaagttttcttccactggtataggatttttagtctgtatctactcaatgacctgaatgaaatactatcgatagacggcgaaaggtgttttggtatttctgatgtttgtatgtcagcaccttaaaggagagcatttctcttttcagcctgtggagaaggcttccacggagcgagaacgggaagcagagcgggaacgggatcgccactcccccttcagccagcggcacctgcacacacaccaccacacccatgttggcatgggctaccctctcatccctggtcaatacgacccttttcaaggtcagcattctcaccacattggtgcaattctgttttggccaacagttgctatgactgtctatcagtatttaaaaattaaaatactgaactcggactaacactggtggtagaggtgattcctagcatttatttcctagtgttcctggaagacacaactaaggctgtttgtattctactgagacagaaagtggctaccgcttaataattgtcactgagagatgttatctcacagactgagggtggtagctggtgtctagggcaccatataacaccctgaagatcagataactgcttcggggatattgtagggaaaacagagccatggtaggtggctttggtgagatcacttgctctgatacctctactccttttaagttgcctcttccccatgtgagtaactagcatggtcaggcctaacatttcagaactcacctgaaacctgcttctcatcctttcactgatgtaacactttcactaaagctgaggagagaccttagtcataatgcgcaaggcaatcacatcttacctgtccccatttctattacctcagacccttcttgattagctatctttattttgtcacagttttgaaagttatagctggagagcctggtgcagattatacggaaccctttctggtgaggattcttaatagcatcggggaggggcttcctgctatctttgttcatagcacacggcagagttctggaatcagttcctacaagaacattaagcctgtcagatcaaaatgagccatcgggaactcattttactttaactacttctgcataagctcctgagtccaaacgcactcaaattgagaatttgggcctcaacatgggatcttagaagaattcagccatagccttagccaacgaacttagcaagacaatgttggataatgcttccaaatgcaggaaatgtaaaggaagtggactttttcttttaattcatttgctacttgatgctaagatagataggtaggtagatagataaagagataggcaggtgaatagattgatctctcaaagcaccaagtgtgaagagaacaagagaaggacatgcgttctattctaacacatcacagatgtaaagatggcttacttgagcagaataagtatgtctttctttttttgttaatgctactgtaatgtctcaaattatctctggaaaaaaatgtcagaggctggccttgaactgtacctccggaattattggcatgtactcccatgtctatttccctgaacaattttccatgggaatcaaatacttttttctgtgtgactgttcaggtctctgctcccttattagccttacagattaagaccattgttctaagaccatgtagacttaaagggcaggtttgtttgtttgtttgtttgtttgtttaaatttgatagctttatatcatgtactttatgggatgcatcatatttaagtcagtggagaaaaatgttacagtgatgaaagtcatcatacaagttttctaaagcaaatagcatgttgcttctcagttcactgtgacttctgcttcctattgctagctgggcagtacctgttatttgtcttgagtttcctattcaggaattcgtgcaaactccttagcaccaggcagagccagtcagatagaaggctgctatcctctgagtagctatttaaaaagccaccaagaactcagtaatggagtagatgggctacaccgagtggtttgtcatctgtctttgaggcatgaaacatttcatgtgtgtttttggcaaaggacaaatgattgctacaggttctgtgcccttgaccactgggcctgtgtccactcttttccaatgtcatggaaaccctgtgttttcctcccactaggcttgacctctgctgccctagttgcctctcagcaggtggctgcccaggcatctgcttctggaatgtttcctgcacagagaaggtaaatattcctgacacctggaattagttttctggcagagatgggctaatggtattcacggaagagaatataggctttgcagatgagaaacttggcacctgagtttcattttactgtaatgattgaacatgctatgacaagatgtttcacacggggctttgattccatgatcctcattctataaatgtgatgtacatctgtaaagaaatgtggggtttttttgttttatttttgttttgttttgttttgttttgttttaagtctaagataagggtaattgtccttaggttaagataaggccaagcctacacttttgttaacatattcatggggtagttcggtgttttagcatttgaccagaatgcctacagtcccaggttctagtctcagttctatcaaataaaatatcaggatacaaagcttttcattttattatacttaaaattaacattgcacatggagaaatgagttaccataatgctaaagggagcctttgtttctcttgtgttctaagttaccctgcaagctgttctgagaagaaaaataaattaaaaaaaaatcagattatcaatataaaattaacactccctaaaaatgtagcttatcactttgtgattcttcatttccccgggaatcgtagggaggaagcagaactctcaggctcactgtttttatgtagttcctgcccactgttgacagaaccggttgctaaggtgtgctcttcttttgcagagaataacagaatcggaagtgtccggtgccatgtgactggatcacatggggaagcgctttatatagacatcagttccatggtgttaatttgaaatgccttaatggcaggcaaaaaaccagtcatttcattttgtaaattacagattttatcacagagtaacaaatgttgctgtaattaaacttctgttttatatatatgtatatatatacgtatacatatctgtatatatacatatatatatatacatatatatatatatattctttacttttttgtaacagtaaccaggctcgcacacacagggtctgctgccaagttgcaaaccactcagtaaaggaaattaaaaaagaaaaaaaaaatgtatttgtcatgttgaaagtgttagccacaacaggctgcttacattcttttccttttaaattgtaaataaataatgttctgtatcagtgtgcctgaaccttgcatatccttcatctctctcccataaaacccctcagaaaggccaactgtgatgatgacacttggtacaatttagatgtctaattggtggctcctcttaaagatgcatcagtgtaaaaaatgtccccgtggtcactctttgtacttgtttattgtggaaataaatacttttggaaggcatggggttgccagaaccacaaaaactgtgttgtatatataatgtaaaaattaagatggggaaataatgagcatctgtgaataatgaggtgtcatttttttttgataatcttgaatggcagataacccaatagcctgcataccagagacatctgcgatctctctcttacttgaatagccctgcagtccttttttttttttccttttttttttctttaatgtttacaattatccagttttagaagagaaggattttaacgccattgcctggttacttgttttatgctgtaatctagtttattttatgtaaaatgtatattgaatgctttcctttttatacctgccttaaataatttggcaatcagaattaaaaaggttttgttttgttttttttttaataatggtttcttgtgtgtctgatgttacttctcgctggctgggagtgagtctaactttcagaggagaatttcttcacactatggacacgtaattcaacaatacacagatactaacttttcatacatgctaaaatgatataacaaccaaacgccgggttcaattctataaatatgggcagaactacatgactactctaaacatggacacatagcaccccaacagtatgctaaacatgtaatcttgtgtgtgtgtgtgtgtgtgtgtgtgtgtgtgtgttggtttatttcttaaaacttgttctctttatattatcccagctgtgctggatctcatagagatcctcctgcctctgtcccttcccaaatgttcatgttaaagccatttatcaccatacctggcctaaacatctaagtcttgtgacatatggacagtagacagaacatataaaatactcagctaagcaaggtgtggtggcaacacctttaatcccagcactcaggaggtggagacagatatatctctgtgagttcaaggccagcctagtctacatatttgagttatatgtagcagccccaaggtaacacagagaaaccctgtcttgggggggggggggaaacaatccaaaataaaaggattaaaaagtcagtgagttgtcactgacatatatagatatttcatgtccaatttcaccttttcttggctcatctttctgcctattgagccccccacactatcctaagctgggatgtatatcaatgaacaaaacagacagaaagtcccattctcatggagcttgtatctcccagtagacagtgcaaacatacaatgaagtccatgcacatagtaggttgtttgataagatgagtggggacacgttgaggatttgtgggagtttataaggctactcagtctgggacaatgtcactaacttgctgagaagggagttcatgtgaatttgaggggtggaggtgggtcaaagcaccacagtgaaatgggaaagctggtgcagaatccctccactggggattcactttggattggttaaggttttttctggtgctggggcccaagccaccccccgcctggcagatgctctgtccctgagctgcacaccccagccctggaacttgctcggcttcacaatctcatcccaatctggctctctatggctcccctccaatcaccaaagacaggtctaccagctcactaagaagtgctctcacgtgggtacctttgtttagctcgcctaccgcgtcccagaattctggcccagtagagaaatgctccctctgctttggcaagactaaagcagcatgctcctgttgagggctgagcaatattatgggttcctgaagactttccaacttacaattaggcacattttacaaataatatacaggaggccaggcttccctttcagtggtaaaatcctgaatgtacacgtatcacatgtcaggcttctcatcaatccagctcaggtggctgactagacagattataaatatgcacattagcccatacttaattctacttttgccgcgaatgggcgtgctgataaagatggagagatgcatgaccaaaaccacaagaccacgagagtagccttcctcctccctaggctttcgcttattcgtgactggtttacagtgatcacaaaatggaattttctttgtctcccccccccacccccttacggttatgattgctgtctatccccaggtcatgaagtgccgaaggccagagctcattgacattgtgtataccatttcactggctgagtctacattcagtactgaatggtaaattaaagattccccaaagacaagcatacttggctccattatattactatgatgaatctgtcattaatatgcttctaattgttttacttttatagacataaaatcagtccccttagtgactaataatagggtttattgattttactaaacattattcattccaggcctgcacatatcagcttgtccagaacataggcaaaaagcctgcagtgccagcagagtgcaaattaacttcgtggagaaatggggatggagagctgtttacagctgcagcccccattgaatgccgaatattaaaaacaaggctctatatagaaccatttatttctaggttagattctcagatggctttttcatggaaacttgccattgatgttcagcccaggtcattaacacatgcagagtgaaaagactggccttttccattcgcactggctctgaccccgacttcaagcggttgcagcccaaggctctctgaatgacctgaatgaatagctctgattgagaccgggatgaaacagccgtttaatgataattactggtcagtccagtctctctctgactctgaaaaagaaacaagacaggcaaagccatttatgattgtttgtgtcactaaccacagtcattttctcccctcttcccacagccctctgagtcataaatgctgttttctctcagttaacttaccggagagaaaacaaagtgaggccctgcaagctgaccattagccaggcctcagccatgaattcccttttagttctgtaaacaaaccctatgtaaagcctggggtggttgtcggcttcaacactgctgacttttgggagccagtagcgttttgggagactggcctgtgtgctctggtctgttcaacactacctggaacggggcagaagcaacctaccccacaaggtatcaccaactggcagagggcatttagcatccctgcccagcccctctgcacagtaaactcctgagttttctttagaagtatttagaaaacaagaaaactgactggacagcggtggtgtgcacctttaagcccagcacacaggcaaactgaactctgagttaaaagaaagatagtcagggagggcaaagagatgcaaaacaaccatggtgcaatgaaggggaagggccctgccccggaatattcagttgtggggatggaggataggggaaaactttaaaaagtcccagagacctgggatgtgaggctcctggggcacaatgaagactgccttagctgaactggtcaacagaggggagatagaaactcaagagaccacctgcagtaagtagatagacatggcccccatttgaggcatgtggtcatcaacatttttgacccagaattgtttctacctaaaagaaatgcagggactaaaatggagcagagattgaaggaaaggccatccagtagccagcccaatttgggatccattccatgggtgggcaccaaaccctgacaccgatgctatgttgtgcttgcaaacaggagctgtcctctgagaggctcttccaccagctgactgagacagatgcagatacttatagccaaacattgcactgaggtcagggaccgttagagttaggggaaggattgaaggacctgaaggggatggcaaccccataggaagaccaacagtatcaactaatcctgacttctgggagctcccagagactaagccaccaaccaaagagcatacatgggctagtccgtggcccctggcacatatgtagcaatggattgccttgtctggcctcagtggaagaggttatacttaatcctatagagacttgatgtcccagggaatgagaatgcaaaggaggatagtgaggtaagagtgggtgggtgggtgaaggagcaccttctcagaggcagtggtggaatggggtgaactcttggagggggggacctggacgaggggcaacatttggaatataaataaataaaaccaccccccccacacacacacacacacaaataaacaaaaatactgaatgggagatacttctaaacttttacataaggatcagtactgttgttacagttaaaaatcaatataatctaaaaaccatgcctgtggctaaattcactttagagtccatcaatttacaatattattttgtattgatcttccagtataatatctcctagcatgaaggttaataaattgggaaaataagtaattcttaaatgaattactggaatttaacttgaacttcttcccatgaaaaaaaaattcacttcatccacaaaagtaagctttgagagatattcagacatagtgtacactttggtgtcttagtctgttttatgttgttgatataatgccataagctaaggtagtttctaaagtttgtttggcctatatttatttgatgtttgaagtcctccacaatggaaatgtatcttgggaggaccttcttgctgagtttttacatggtggagagagagaggtaaaggacaagacttatatcagaaatccattcctaaagaaacccactcccatgaccattaacccatctcagaaatccattcctaaagaaacccactcccgtgaccatcaacctatctctgtggcacaacccacctttaaggtctgtctctcagtctactctgttggggattaaactttagaaaacattcaaaccacaacacaaaagtaatttgccaagcccttgctatgtaatggtcagagttcataacatccacattctactgcttcagaaaacacaaactctctagagaattatagccaaatctttccattgctaatccttttctttcagggagtctgatgaagaaaactcagtctgcttttccagtttttaatgaggcagagtctatgtcagagccaagcctcaatccctgttaaactccacactcaggcccagaactcctcaggagccctggggagaggggtgtacttggagcattgcagcaatggttactgggagatctgtgtttgccctcactttcacgatgtgggatgacacggcatggcatgaggtggcaggcaatccactctgtgatctgataactaaaagcctagagtgctaaagttggacttagggctctgaggccaagagggagagctgaggggttagagtctggtcaactatcatagggtccaacactggtcatcgctacatcctgacaaagggtctcaactttgtacttaagtatttccaaacgatgtcattcttcaggtcccggaggacttgtaagttggaagaggaggatgttgaaaccataactttaaacttatttcctgtaaccagatcctcctccggtacatgctgtatgcaccaagggaagtaagcaatttgaaacgttgatttgtacaatgtaaatgtttaaactggaatttcctaaccttgagttggaaaagcttttatactttattatgactaaaacctcaaaaaaaaaaaaaaagctaagaccttcctccctttccactcctctctccccctctttctccctttctccccctttttctaaacatggcatatttatgtctgcacatgtgtgggcctacatgtgtgtaacagtttatgtgcacatgtgtgcacgtggatctgaggcagcctaacattgaaaggcagaatcttccaccaacactgcacttcctctctgaggtaggctcttgcaatcaatctcagagcaccagtttgctctggaaaccctgattctaactcccaagtctggaattgtagccaggtcaccatgtccacccagcatttctgtgagtccaagatatataaattctggtcctcttgtttggccagtcctttaaaaattgagtggtccctctagtcccgttcttggtcaatgaaaagtctttgattcaaatgaaaaatttggaggcagcaatatgctaattaaaaagattcttcctaataatggtttcaaaggctggcatcatccagtccctattcgatcactaaagacagtagtaggtcaggaacaaaaggaagtcccttctcctgcacctccccactgggagaatgagtggagtcatcagtataacaggaatggctttcagcatgactgccacagagattgagcttgggtagctgcctgaacagttggacactttcttctgcctataaccaatgctatcactcagccaatcctctcctacacggagagctattttctccccaagtataaagttggaagcttggtgagctccaacacgctctgcacacagctggctctactcctctgaaagacattgcttagtctatgcttaaggcagttctgaagcacatacccagaggcatcaacatccaaggaaaacactcttgacttcctgtccgtctcttaggaaggaagaagaaaactttcccgatcactgctggaatcaaatgagtcacatatccatccttaaacggtcactgatgagaagatgattgctaagtcaccctcctcaggctaaggaggatgtgactgtgccctggcttatgggatagatggactatggcccatagctaaggttgcattaggatgagagaagagaggagtcaacgtttggttgctttacctagaacttgcttgaagacccgaggaattagctgaatctctgtagcccactccggttcaagatatgactctataggggatggagcaattgatagcattccagggggacttacagagagtttttgttgattttcctccatatgcaagagctgaggctgccaaataaaagtgaaggggtcatgcacaaacctgtcacatttggttttcttcttatttcatgtcaaagtaaattaggactttatttgtgagaacagagatgctaatccctactaccactccctaacattcacacagacacacaccattttacatgcagccctacctcctgcctataatgatacctcagaacttacaatttataggaaagaagagggatatcccttccacccaaatcaatcagtctacatcagacactaaaaaggaacttggagaaaaaaaaaaaaaaagacaggagaggaggagatggatggatgttaaacagagcatggattggagccctgtaaacccaaaatgagaagagcacggacagattagtcactagcaggaagaaaattgcactgtatgaggaacaacgaagattccttgacaggagaaatttgaggcttagtcatgggatgatcttggagctactgaaggctttaggtcaagaaagatccttgtctaaatctcagaaagcaatgtgctattaatggaagacttgtgaggaggaagtcctagatctagttgccaaaggagtctgccctttctgctaccacactgtgcccacttgtagagagcagagtggaggctctcaaatttagaagaacactaaggagtagccacagttccttgcccttctctagtcttgcctggatttcctacacaatggactaacacttctactaaatggtcacccctgtggaggggttgggggactctgaccaggagtgatgggctagggccccacctaccatattatatactcagaatctttgggtggaaaaaaatcataagaagcatgctatgataaagaccctgatcaaaagtaattttgagggaagaaagggtgtatttggctcatatggttacagttcattgagggaaaccaaggcaagacctctagagaaggagctgaagacgtcaagaactgaagcagaggccatggaggagcactgctcattggcttgctgcacttgacttgttccatttgctcacttatacctcctaggaccatgggccagagatggcactgcccacacagtgggctggaccttcccacatcaaagagattgaagttaataacccacaggcttttctgcaggccaatcaaatggaggcacttcttaattgacattccctcttcttaaattactctaatttgtgtcaagttaacaaagacctaaccgtcacaatggaagtttggaaatggatgatgccatgagacattctaactagaacaagtttcctaagctccctggattcttagagatataaagtctagacatcctcctgacatttaggataggcaatgggcagccttctcctctgggagaatgtggatgtttctgaagagtcaagcaaagtcaaatctgaagacctactgtgcagacgagttcctactttggaactgtggtggaaacttaactctggatcccccaaaacccctaggtgcctgtacctgtgcaatcccttcaatgataagacagaaacatatcaaataaggattgagggatagagcacagttagtagagggtttgactagcaagtataagaccctaggtttagttttagttcctaacaccatccatactgagtgtggtattgcttgccggtaacagtagccctaaagaggtagattgtcagaggatcagaacaaaaattcaaagtcatcctcagatacacaccaacgaccctggggctgggggtgggggtgggcaggaagagagagagagagagagagagagagagaataaataaataaataaataaataaataaataaataaataaaagattggctttggcacagctttgtgacagattgtcttgtcttctcatcatgctgaaataggatatcaccaggtctctgacctgatattgctgtgagctcatttgttactgatcactaggaagtagcaaacatggctagctgctaattcttacaccttggtgcagtctgtcagacattcatgttcctgaagaaggctgagtcagaccctgactttgctgccactaaggaaattacctagggtggagccttcctccctagatcactctattgttcagctaatgtcacggttcctcttcatgatactgctacctgctgagaggcccctgggagctattccagagactatgccctatcctgcacgccatcacctgcagctggttccaggctccaaggatgaattggcgggaatgggcctccccctcctcctttataagcgcatttgccattaaacatttgagccttgatcagaaccttgtcttggctctatttctctctctttcagcctcagtttgcctcccaggtgaaacccagtttatgtgagccgctggctggttcgcaacatgttcccttctgaatgaggttcgactcagaggcaagtgaatgtcatacaaccacaccttatccagaatccaagatggtttcagctccacacttcccattgtagaactttgtgggcaacttacagagctagggacagtcccctgactcccgtgagtggggtgttctggagaacctgtagctaccttccaaggtctactagaagaagctgttttgtgtcatgcatggctggacacagatgaattggtgataaatattgatgtggcattctcttggaaggcgaagtagctaatctcatcacactaaatgggaacagttgtatgggctctgttgctccttctgcatgcttggcagggctcctagttatctttgtcccagcagtgccaccaagccttagtcaagcctttgcagatgtaagtaacaaagctgtggtaacataaacaaaatagacttacttcaagggcagaagggttctcaagtgatcaggagtaggtagtgagttcaagttcaaaggaggtagggcccaaaccagcctctcatgagtctgagagtccagtggatgggatgaacctgcttgcttggaggggtacagtgagaagaggcaccaggttgctaggttggctcctagtctaggctcctttggaccagtactattaacactggagtttaagtcttttggtggctggaagcagaaatccattcaaaccagcttgcttacaaatcaggattactgaaaggctctaagagtatctcataatatagaaggacaggaagggaattggcagacaagccatgtatctcaaaaaccttaaatctcagattatcacagcatcacacacgtctgtttctctgtggattttgttcctccggcagcctctgctgcaggctttcaacttccctacttctgtcatgggaagagccttgggggtagctctggagctcacactagctcactctgtaccatcatctaagaggcccagctttccacctacaccccaaattcccatgccaggtgtaatgggttcctgtcattggaataaccaaatgtggttgagcagacatgggaa

SEQ ID NO: 84 - DNA, 5545 bp, Mus musculus
gagctcatcttcaggatgtccgtgaacgtttcgactgcaggaaaaggtgtggatccaaatacagttgatacttatgacagtggcgatgattgggaaatcggggttggaaatttaatcattgatttggacgccgatttggaaaaggacagacaaaaatttgagatgaataattccaccaacaccactaccaacaccactaaggattgtggaggtccggcctccaatgggacctgttctacctcagccttagctgatggcctaaaatttgcttctgttcagccctccgctccccaggggaattcacacaaagaaaccagcaaatcaaaagtgaaaagggctaaaacttctaaggatgctaataaatctctgccttctgctgccttgtatggaattcccgagatcagcagcactggcaagaggcaggaagtccaagggcgccctggagaggctactggcatgaattcagcgctgggtcaaagtgtgagcggcggcggcagcagcaacccaaacagcaacggtaccagcaccgggacctcggctgccaccgcgggggcaggctcctgtgggaaaagcaaggaagagaagccagggaaaagccacagcagccgaggcgccaagcgggataaggatgctgcgagatcccggaaagagaaacacgacctgctgcagggccaccagaatggcggcggaggccaggccccctccggtggtcacctctatggctttgggaccaagagcaatggaagtggcgcgagcccctttcactgtgggggcgctgggagtggcagcgttggggctgcaggggaagttagcaaaactgctccggattcaacgctcatgggaaactctatgctggtcaagaaggaagaggaggaggaggagagccacaggcgaatcaagaaactgaaaactgagaaggttgaccccctgtttacagtgccggcaccaccgccgccgattgccagcagtctcgcacctcagattccgccctcctactttcccccatcttcatccaatattgcagcaccagtcgaacagcttttggttcggactcggtccgtgggtgtcaatacgtgtgaagttggagtagtgacagagccagagtgtcttgggccctgtgaacctgggaccagtgtcaatttggaagggatcgtgtggcatgaaacagaagaaggtgtcctagtggtcaatgtcacatggaggaacaaaacctacgtggggaccctcctagactgcaccaagcacgactgggcccctccccggttttgcgaatcaccgacaagtgacctggaaatgcgagggggccggggcagagggaagagagcgaggtctgccgcggctgccccaggctccgaggtcagcttcaccgagtccagagggctgcagagcaagaacagagggggagccaatgggaaagggaggcgtggcagcctcaacgccagcggacgaaggacacccccaaactgtgctgcagaggacataaaagccagcccttcctcaaccaacaaaaggaagaacaagcccccaatggagttggatctgaactcgagctctgaggacagtaagcccgggaagcgagtgcgcacgaattccagaagcacgcctaccactcctcaggggaagccagagactacttttttggaccaaggctgctcctctccagtgttaattgattgtccccacccaaactgcaacaaaaaatataagcacataaacggcctgaggtaccaccaggcacatgcgcacttagacccggaaaacaaactagagttcgagccggatagcgaggacaagatctcagactgtgaggaagccttgagcaacgtggccctcgaatgcaacgagtcaagcacaagtgtgtcatcatacgatcagacgaaagcacctgggtcccccggggctgggaacccccctgggacacccaagggaaagagagagcacgtgagcaatggcccaggtcctattataggttcgaaaactggcaagaattctggcaagaagaggggccttaacaacgaactgaacaaccttccggtcatctccaacatgacggccgctttagacatttgttcagccacagacagcaatctaacggcggaaatgcccaaattggaagcggaaggactgattgacaagaaaagtttgggggataaagaaaagggcaaaaaagcaaacaattgcaaaatggacaaaaacctctccaaactgaaaagcgcccgccccattgcccccgcccctgcccctacgcccccacagctgattgctataccgactgcagccttcacatccaccaccacagggaccatacctggactgccctccctcacgaccactgtggtccaggctacaccaaagagccctccattgaaacctattcaaccaaagcccacaattatgggggagcccatcaccgtgaacccagctctggtgtcactcaaagacagaaagaaaaaggagaagcgaaagctcaaggacaaagaagggaaagagactggaggtcccaaaatggatgctaagctggggaagctggaggaagccaaggcggctagcaaggatttgtctgggcattttttaaaggaccatctcggtaagagcgaagggctggctaatggattgtcagagtctcaggagagccgcatggccagcatcaaagccgaggccgataaggtttacacattcacggacaatgcccccagcccttccatcgggagtgcctcacgcatggaatgcagtaccttggtgaatgggcaagcacccatggcaccactgcatgtattgacccagaatggggctgagagcgcagcagctaagaccagcagtccagcctattcggacatatcagatgctgcagatgatggcggttctgacagcaggtcagagggcatgaggtcaaaggccagttccccatcggataccttttctaacaaagacggtgttgtgaaagggcatccttcaacttcagcacagccatctcagctgaaagagtcccattctccctattaccatggctatgagccttactattctccgagttacatgcaccctggacaggttggtgccccggcagctgggaatggtgggagcacacagggcatgaagatcaagaaggagtcagaggaagatgcggagaagaaagacaaggcggaacagttggagtccaagaaagtagaccatacttctgcacccctgcagcctcagcaccagtcagtcatcacccagagacaccctgccctggctcagtcactttattacggccagtatgcctacgggctctatatggaccagaaatctctgatggctaccagccctgcctacagacagcagtatgagaagtactatgaggaccagagactggcagagcagaaaatggcccagagtgggagaggagactgtgaaagaaaggctgaactccccttgaaagaactgggcaaggaagacaataagcagaaaaacatgccatcagccactatctcaaaagctccctctaccccggagcctaacaaaaaccattctaaactagggccatcagtgcctaataaaactgaggagacaggtaaatcacagcttctctccagtcaccagcagcagcttcaggccgacagcttcaaagctaagcagatggaaaaccaccagcttattaaggaggctgtagaaatgaagtctgtcatggactctatgaagcagacaggtgtagacccaacctcgagatttaaacaagatccagagtcaaggacatggcaccattatgtataccagcccaagtacctggaccaacaaaagccagaagaacttgacagagaaaagaaattgaaagaggacagtccaaggaagactcctaacaaagagagtggcgtgtccagtctccccgtgtcattaacaaacatcaaagaggagcccaaagagggcaagcgtcctgattcccagtcggtggaggagaacaagctaaagaatgatgatcggaagacaccggtgaactggaaggactctcgggggacacgagtggccgtgtcctcacccatgagtcagcaccagtcctacatacaatacttgcatgcttatccttacccacagatgtatgaccccagccaccctgcataccgggctgtctctcctgtcttaatgcacagttaccctggggcctatctctctccaggatttcattatcctgtttatggaaagatgtctgggagagaagaggcagagaaagtcaatactagtcccagcatcaacacaaaaacagccagcgaagccaaagccctggacctactccaacatcacgccaaccaataccgcagcaagtcccctgctcctgtggagaaggcttccacggagcgagaacgggaagcagagcgggaacgggatcgccactcccccttcagccagcggcacctgcacacacaccaccacacccatgttggcatgggctaccctctcatccctggtcaatacgacccttttcaaggcttgacctctgctgccctagttgcctctcagcaggtggctgcccaggcatctgcttctggaatgtttcctgcacagagaagagaataacagaatcggaagtgtccggtgccatgtgactggatcacatggggaagcgctttatatagacatcagttccatggtgttaatttgaaatgccttaatggcaggcaaaaaaccagtcatttcattttgtaaattacagattttatcacagagtaacaaatgttgctgtaattaaacttctgttttatatatatgtatatatatacgtatacatatctgtatatatacatatatatatatacatatatatatatatattctttacttttttgtaacagtaaccaggctcgcacacacagggtctgctgccaagttgcaaaccactcagtaaaggaaattaaaaaagaaaaaaaaaatgtatttgtcatgttgaaagtgttagccacaacaggctgcttacattcttttccttttaaattgtaaataaataatgttctgtatcagtgtgcctgaaccttgcatatccttcatctctctcccataaaacccctcagaaaggccaactgtgatgatgacacttggtacaatttagatgtctaattggtggctcctcttaaagatgcatcagtgtaaaaaatgtccccgtggtcactctttgtacttgtttattgtggaaataaatacttttggaaggcatggggttgccagaaccacaaaaactgtgttgtatatataatgtaaaaattaagatggggaaataatgagcatctgtgaataatgaggtgtcatttttttttgataatcttgaatggcagataacccaatagcctgcataccagagacatctgcgatctctctcttacttgaatagccctgcagtccttttttttttttccttttttttttctttaatgtttacaattatccagttttagaagagaaggattttaacgccattgcctggttacttgttttatgctgtaatctagtttattttatgtaaaatgtatattgaatgctttcctttttatacctgccttaaataatttggcaatca

SEQ ID NO: 85 - protein, 1500 aa, Mus musculus
ELIFRMSVNVSTAGKGVDPNTVDTYDSGDDWEIGVGNLIIDLDADLEKDRQKFEMNNSTNTTTNTTKDCGGPNGTCSTSADGLKFASVQPSAPQGNSHKETSKSKVKRAKTSKDANKSLPSAALYGIPEISSTGKRQEVQGRPGEATGMNSALGQSVSGGGSSNPNSNGTSTGTSAATAGAGSCGKSKEEKPGKSHSSRGAKRDKDAARSRKEKHDLLQGHQNGGGGQAPSGGHLYGFGTKSNGSGDFHCGGAGSGSVGAAGEVSKTAPDSTLMGNSMLVKKEEEEEESHRRIKKLKTEKVDPLFTVPAPPPPIASSLAPQIPPSYFPPSSSNIAAPVEQLLVRTRSVGVNTCEVGVVTEPECLGPCEPGTSVNLEGIVWHETEEGVLVVNVTWRNKTYVGTLLDCTKHDWAPPRFCESPTSDLEMRGGRGRGKRARSAAAAPGSEVSFTESRGLQSKNRGGANGKGRRGSLNASGRRTPPNCAAEDIKDSSTNKRKNKPPMELDLNSSSEDSKPGKRVRTNSRSTPTTPQGKPETTFLDQGCSSPVLIDCPHPNCNKKYKHINGLRYHQAHAHLDPENKLEFEPDSEDKISDCEEALSNVECNESSTSVSSYDQTKAPGSPGAGNPPGTPKGKREHVSNGPGPIIGSKTGKNSGKKRQNELNNLPVISNMTAALDICSATDSNLTAEMPKLEAEGLIDKKSLGDKEKGKKANNCKMDKNLSKLKSARPIAPAPAPTPPQLIAIPTAAFTSTTTGTIPGLPSLTTTVVQATPKSPPLKPIQPKPTIMGEPITVNPALVSLKDRKKKEKRKLKDKEGKETGGPKMDAKLGKLEEAKAASKDLSGHFLKDHLGKSEGLANGLSESQESRMASIKAEADKVYTFTDNAPSPSIGSASRMECSTLVNGQAPMAPLHVLTQNGAESAAAKTSSPAYSDISDAADDGGSDSRSEGMRSKASSPSDTFSNKDGVVKGHPSTSAQPSQLKESHSPYYHGYEPYYSPSYMHPGQVGAPAAGNGGSTQGMKIKKESEEDAEKKDKAEQLESKKVDHTSAPLQPQHQSVITQRHPAQSLYYGQYAYGMDQKSLMATSPAYRQQYEKYYEDQRLAEQKMAQSGRGDCERKAELPLKELGKEDNKQKNMPSATISKAPSTPEPNKNHSKLGPSVPNKTEETGKSQLLSSHQQQLQADSFKAKQMENHQLIKEAVEMKSVMDSMKQTGVDPTSRFKQDPESRTWHHYVYQPKYLDQQKPEELDREKKLKEDSPRKTPNKESGVSSLPVSLTNIKEEPKEGKRPDSQSVEENKLKNDDRKTPVNWKDSRGTRVAVSSPMSQHQSYIQYLHAYPYPQMYDPSHPAYRAVSPVLMHSYPGAYLSPGFHYPVYGKMSGREEAEKVNTSPSINTKTASEAKALDLLQHHANQYRSKSPAPVEKASTEREREAERERDRHSPFSQRHLHTHHHTHVGMGYPLIPGQYDPFQGLTSAALVASQQVAAQASASGMFPAQRRE

(The sequence listing continues in the following parts.)
